United States Patent Application Publication US 2018/0126003 A1 - sequence listing, part 10

SEQ ID NO: 12481 - DNA, 8439 bp, Artificial Sequence
  derived and/or modified sequence
atgattccggcgcgttttgccggcgtcctcctcgcactggccctgatcctgccgggaactctgtgtgcggagggaaccagaggtcggtcaagcactgcaaggtgctccctctttggatccgacttcgtgaacactttcgacggatccatgtactcgttcgctgggtactgctcctacctgttggccggaggatgccagaaaaggagctttagcatcatcggtgatttccagaacggaaaaagagtgtccctttccgtgtaccttggagaattctttgacatccacttgttcgtcaatgggactgtcactcaaggtgaccaacgcgtctcaatgccatacgcatccaaaggactctacctcgagacggaagctggctactacaagctgtcgggagaagcctacggattcgtggcgcgcatcgacggctctggcaacttccaagtgctcttgtcagatcgctacttcaacaagacttgcgggctctgcggtaactttaacattttcgcggaggacgacttcatgactcaagaaggaacgctcacttccgatccatacgacttcgctaactcgtgggcactctcatccggagagcagtggtgtgaaagagcttcgccgccgagctcgagctgtaatatctcgtctggtgaaatgcagaaggggctttgggagcaatgtcagttgctgaagtcaacttcagtgttcgcgagatgccacccgctggtcgacccagagccatttgtcgcactgtgtgagaaaactctgtgtgaatgcgcgggcggtctggagtgcgcctgtccagcgctcctcgaatacgcccggacttgcgctcaggagggaatggtcctgtatggatggaccgatcactccgcatgctctccagtttgtcctgctggaatggaataccgccagtgtgtctccccgtgcgctcgcacctgccagtccctgcacataaatgagatgtgccaggaacgctgtgtcgacggatgttcatgcccggagggacagcttctcgacgaagggctctgtgtggaatccaccgaatgtccatgtgtgcactcaggtaaacggtacccacctggaacttcgttgtcgcgcgattgcaacacctgcatctgccgcaactcccagtggatttgtagcaacgaggagtgcccgggcgaatgtcttgtgaccgggcaatcacacttcaagtccttcgacaaccggtactttacgtttagcggcatctgtcagtacctgctggcgcgcgattgccaagatcatagcttctccatcgtgatcgagactgtgcaatgcgcggatgatcgagacgccgtctgtaccagatctgtgacggtgcgcctgccaggcctccataattcgttggtgaagctgaagcatggcgcgggggtcgctatggatggacaggacgtgcagctgccattgctcaagggggatctgcggatccagcacaccgtgactgcgtcagtgcggctgtcgtacggcgaagatcttcagatggattgggacggacgcggccgcctcctggttaaactgtccccggtgtacgcgggaaagacttgtgggctgtgcgggaactacaatggaaaccagggggatgattttctgacccccagcggactcgctgagccaagggttgaggattttggaaacgcatggaaattgcacggtgactgccaagatctccaaaagcagcattccgacccctgcgccctcaatccgcgcatgacccggttcagcgaagaagcatgcgcggtgctcacctcaccaacgttcgaagcctgtcacagggccgtctcgccactgccctacctgcgcaactgccggtacgatgtctgtagctgcagcgacgggcgcgagtgcctctgcggcgcactggcctcgtacgcggccgcatgcgcaggccgcggcgtgcgggttgcttggcgcgagccaggtaggtgcgaacttaattgcccgaagggccaggtgtacttgcaatgcggaacgccgtgcaacctgacttgccgttccctctcttacccggacgaggagtgcaatgaggcatgtctggaaggatgcttctgcccgcctggattgtacatggacgagcgaggcgactgcgtgcccaaggcccaatgtccgtgttactacgatggtgagatttttcagccggaggatatcttctccgaccaccacaccatgtgttactgcgaagatggattcatgcactgtactatgtcgggtgtcccaggttcgctgctgcccgacgctgtgctgtccagccccctctcacaccggtccaagcgctccctcagctgccggcccccgatggtcaaacttgtctgccccgctgacaacctcagagctgaagggcttgagtgtaccaagacttgccaaaactatgatctggagtgcatgtcgatgggatgcgtgtcgggatgcctgtgcccaccgggcatggtcagacacgaaaataggtgtgttgccctggaacgttgtccatgctttcaccagggcaaggaatacgcccccggggagacggtgaaaatcggctgtaatacctgcgtgtgccaggaccgcaagtggaattgcactgaccatgtttgtgatgctacttgctcaaccataggaatggcccattacctcacgttcgacggtctgaaatacctctttccgggagagtgccagtacgtcctggtgcaagactactgcggatcaaatcccggtaccttccgcatccttgtgggtaacaaaggttgcagccacccatcggtgaaatgtaagaagcgcgtgactatcctggttgaaggaggcgagattgagctgtttgatggagaagttaacgtcaaacgccccatgaaggacgaaacccatttcgaagtcgtggaatccggacgctacatcatcctgttgcttggaaaggcactgtcagtggtctgggaccgccatttgtcgatttcggtggtgctgaagcagacctaccaggagaaggtctgcggcctttgcggaaacttcgacggtatccaaaacaatgacctcacctcctcgaatctgcaagtcgaggaagatccggtggatttcggaaactcatggaaggtcagctcccaatgcgccgacaccaggaaggtcccgctggattcatcgccggcaacctgccataacaacattatgaagcaaactatggttgactcgtcgtgccgcatcctgacctcggacgtctttcaagactgcaacaaattggtggacccagaaccctatctggacgtgtgcatctacgacacctgcagctgcgagtccatcggagactgcgcgtgcttctgtgacaccatcgcggcctacgcccacgtgtgcgctcagcacggaaaagtggtgacttggcgtactgccaccctgtgcccgcagtcgtgtgaagagcggaatctgcgggagaacgggtatgaatgcgaatggcggtacaactcatgcgcccccgcgtgccaagtgacctgccaacatcctgaaccgctggcatgtcccgtgcagtgcgtggagggctgccacgcccactgccctcccggcaagatactggacgaactgctccagacctgcgtcgatccggaggattgtccggtctgcgaggttgccgggcggagattcgcgagcggaaagaaggtcaccctgaacccgtctgatcctgagcattgccaaatctgtcactgcgacgtggtgaacctgacgtgtgaggcctgccaggaaccgggcggactggtggtgccaccgaccgacgccccagtctcaccgaccaccctgtacgttgaggacatttcggaaccaccactccacgatttctactgctcgagactcctggatctcgtgttcctcctggacgggtccagccggctgtccgaagcggagttcgaggtgctgaaagcattcgtcgtggacatgatggaaagactcaggatctcacagaaatgggtcagagtcgctgtggtcgagtaccacgatggcagccatgcgtatatcggtttgaaggatcgcaagcgaccgagcgagctgcgccgcatcgcttcgcaagtgaaatacgccggcagccaggtggcgtcgacttccgaagtcctcaagtataccctgttccaaatcttctcaaagattgaccggccggaggcatcaaggatcaccctcttgcttatggcgtcgcaggaacctcagcgaatgagcagaaactttgtccgatacgtgcagggacttaagaagaaaaaggtgatcgtgatcccagttggaattgggcctcatgctaatctgaaacagatcaggctcatcgagaagcaggctccggaaaacaaggccttcgttttgtcgtcggttgacgaactggagcagcaacgcgacgagatcgtgtcttacctctgcgacctggctccggaggcaccgccgcctacgctcccccctgacatggcacaggtgactgtgggaccgggattgctgggcgtgtcgacgcttggtccaaagaggaattcgatggttctggacgtggcgttcgttctggagggtagcgataagatcggcgaagccgacttcaaccggtcaaaggaattcatggaagaggtcatccagcgcatggacgttggtcaggatagcattcatgtgactgtgctccagtactcgtatatggtgaccgtcgaatacccattcagcgaggcccagtccaagggggatatcctccaaagggttcgggaaatcaggtaccaaggtgggaacagaactaatactggcttggcacttagatacttgtctgaccatagcttcctcgtgagccagggagacagggagcaagcccctaaccttgtctacatggtgaccggcaacccggcgtccgacgagattaaacggctcccgggcgacatccaagtggtcccgatcggagtgggacctaacgcaaacgtgcaggaactggagcggattgggtggccgaatgcacctatcctgatccaggacttcgaaacccttccgcgggaagccccggacttggtcctccagagatgctgcagcggggaaggactgcaaatccctactctttcaccggctccggattgtagccagccgctggacgtgatcctcctcctcgatggatcatccagcttcccggcctcgtactttgacgagatgaaatccttcgccaaggctttcatctcgaaggccaatatcggaccacgtctgactcaggtgtcagttctccagtatggttccatcaccaccatcgatgtgccgtggaacgtcgtgccggaaaaggcacatctgctttcgctggtcgatgtgatgcaacgggaaggcggaccctcacagattggagacgcccttggatttgccgtgcggtacctgacttcggaaatgcacggagcgaggccgggagccagcaaggcggtggtcatcctggtcaccgatgtgtcggtggactctgtggacgcagccgccgacgcggcgcgctccaatcgggttaccgtgttcccgatcggaatcggagacaggtacgacgcagcccagctgagaattctggccggaccggcaggggactccaacgtggtgaagttgcagcgcatcgaggacctgccaactatggtcactctcggcaattcgtttcttcacaagctgtgttccgggtttgtgcgaatctgcatggatgaggacggcaacgagaaacgcccgggagatgtgtggaccttgccggatcaatgtcacactgttacctgccagccagacggacaaactctgctgaagtcgcaccgggtgaattgcgatcgggggctgcgaccatcgtgtcctaattcacagagccccgtcaaggtcgaagagacttgcgggtgccggtggacctgtccttgtgtgtgcaccggctcctccacccgccacatcgtgacgttcgatggacaaaacttcaagctgaccggatcctgcagctacgtgctcttccagaacaaagaacaagacctcgaagtgatcctccacaatggcgcctgtagcccaggagcccgccaaggctgtatgaaatccattgaagtgaagcactccgcgctgtcagtggaactgcattcagacatggaagtcaccgtcaatggccggctggtgagcgtgccatacgttggaggaaacatggaagtgaatgtgtacggggctatcatgcatgaggtccgcttcaaccacctgggtcacatctttaccttcaccccgcaaaacaatgagttccagctgcaactgagcccaaaaaccttcgcctccaagacgtatggactttgtgggatctgcgacgaaaacggcgcgaatgatttcatgctcagagacggcactgttaccactgactggaaaacgctggtccaagagtggaccgtgcaacgcccgggacagacctgtcaacccatacttgaagagcagtgcctcgtgccggactcgtcccattgccaagtgctgctcttgccgctcttcgcagagtgccacaaggtgctggcgccggcgaccttttatgccatctgccagcaagattcatgccatcaagaacaagtgtgcgaggtcatcgccagctacgcccatctgtgcagaacgaacggggtgtgcgtggactggcgcactccggatttctgcgccatgagctgcccgccatcgctcgtgtataatcactgtgaacacgggtgcccgcggcactgcgatggaaacgtctcctcctgcggtgaccaccctagcgaaggctgcttttgccctcctgacaaagtgatgctcgagggaagctgcgtccccgaagaggcatgcactcagtgtatcggcgaagatggagtgcagcatcagttcctcgaagcatgggtccccgaccatcagccctgccagatctgtacttgtctctcgggacggaaagtgaactgcactacgcaaccgtgcccgactgccaaggcgccaacctgcggtttgtgtgaagtcgcccggctgcgacagaatgcggatcagtgctgtccggagtacgaatgtgtgtgtgaccccgtctcatgcgatctgccgccagtgccgcactgcgaaagaggactgcaacctaccctgaccaatccaggggagtgcaggccaaacttcacttgcgcgtgccgcaaggaagaatgcaaacgggtttccccgccttcctgtccacctcatagactcccgactttgcgcaagacgcagtgctgcgacgaatacgagtgcgcctgcaactgcgtgaacagcactgtgagctgccctctgggctacctggcctcgaccgctaccaatgactgcggatgtactaccactacctgcctccctgacaaggtgtgcgtccaccgttcaactatctacccagtgggacaattttgggaagagggctgcgacgtgtgtacttgcaccgacatggaggacgccgtgatgggcttgagagtggcgcagtgctcgcagaagccgtgcgaggattcgtgtcggtcgggattcacgtatgtgctgcacgaaggagaatgctgcggacggtgcttgccctccgcgtgcgaggtggtgacgggaagcccaagaggagattcacagtctagctggaagtcggtcggatcccagtgggcctctcccgagaacccgtgtctgatcaacgaatgtgtgagagtcaaggaagaagtgttcatacagcagcgcaatgtctcctgtccccaactggaagtgcctgtgtgcccttccggattccagctgagctgcaagacttccgcctgttgcccttcctgccggtgcgagcggatggaagcctgtatgttgaacggaaccgtgatcggtccgggcaagaccgtgatgatcgatgtgtgcacgacgtgccggtgcatggttcaggtgggagtcatctcgggcttcaaacttgaatgccgcaagaccacttgcaatccttgtccactgggatacaaggaggaaaacaataccggagagtgttgtggtcggtgcctgccgactgcgtgcaccattcagctgcggggtggccagatcatgactctcaagagggatgaaactctccaagatggatgcgacacccatttttgcaaagtcaacgaacggggagaatacttctgggaaaagcgggtgaccggatgcccaccgttcgacgaacacaagtgcctcgcggagggaggtaagattatgaagattccaggaacttgctgcgatacttgtgaggagcctgaatgtaatgacatcacggcgcggcttcagtatgtgaaggtcggatcgtgcaagtccgaagtggaagtcgatatccattactgccagggcaagtgtgcaagcaaggcaatgtactcgatcgatatcaacgatgtgcaggatcagtgctcttgctgttcccctactcgcactgaacctatgcaagtcgccttgcactgcaccaacgggtcagtggtgtaccatgaggtgctgaatgctatggaatgtaagtgctcccctcggaaatgctcaaaa

SEQ ID NO: 12482 - DNA, 8439 bp, Artificial Sequence
  derived and/or modified sequence
atgatccccgcccgttttgcgggggtactgctggccctcgcactgatcttgccaggtactctctgcgctgaaggaacgcgcggccgctcgagcactgcccgatgctcactcttcggatccgatttcgtgaacactttcgacggatccatgtactcattcgccggatactgctcttacttgctcgccggcggatgccagaagagatcgttctccattatcggcgattttcagaacggaaagagagtgtcgctttcagtgtacttgggagaattcttcgacatccatctgttcgtcaacggaaccgtcacccaaggggaccagcgggttagcatgccctacgcttccaaaggactttacctggaaacggaagctgggtactacaagctgtcgggggaagcgtacgggttcgtggcacggatcgatggaagcggaaatttccaggtactcctctcagacagatacttcaacaaaacctgtgggctgtgcggaaatttcaatatcttcgcggaggacgatttcatgacccaagaaggtactctgaccagcgacccatatgacttcgcaaattcgtgggctctgtcatcaggcgaacagtggtgcgagcgggccagcccgcccagctcttcctgcaacatctctagcggagagatgcagaagggtctttgggaacagtgccaactgttgaagtcgacgtccgtattcgcacgctgccatcctctggtggacccggaaccattcgtggcactgtgcgagaaaacgttgtgcgaatgcgccggaggcctcgaatgcgcttgcccggcccttctggagtatgcccgtacctgcgcccaggagggcatggtgctgtacggctggactgaccattcggcttgctccccggtatgcccagccggcatggaatacaggcaatgtgtctcgccgtgcgctagaacttgccagtcgctgcacatcaacgaaatgtgccaggaacgctgcgtcgacggctgctcctgccccgagggtcagctgttggatgaaggtttgtgtgtggagtcaaccgaatgcccgtgtgttcatagcggaaagcgctacccaccggggacttccctgtcacgggattgcaatacctgcatctgccgcaattctcaatggatctgcagcaacgaagaatgcccgggtgagtgcctcgtgaccggacagagccactttaagtcattcgacaaccgctacttcactttctccgggatctgccagtacctgctggccagggattgccaggaccatagtttttccatcgtgatcgaaaccgtgcagtgcgcagatgaccgcgacgcggtctgcactaggtccgtgaccgtgcgcctgccaggacttcataacagcctggtgaagctcaagcacggagcaggggtggctatggacggacaagatgtgcagctgccactgctgaagggtgatctgaggatccagcatactgtcacggcctcagttcgcctgtcctatggcgaggacctgcagatggactgggacggacgagggcggttgctcgtgaaactgtcgccagtctacgcgggcaagacttgcggcttgtgtgggaactacaacggaaaccagggcgacgatttcctcaccccatcgggactcgctgagcctagagtggaagatttcggaaatgcctggaagctgcacggggactgccaagatttgcaaaagcaacactcggacccctgcgcgctcaatccaagaatgacccggttctccgaggaggcgtgcgccgtcctgacctcaccgacttttgaagcatgccaccgcgccgtcagtcctctcccatacctgaggaactgcaggtacgacgtctgctcttgcagcgatggaagggagtgtctgtgtggggccctggcatcatacgccgccgcctgcgccggccgcggcgtaagggtggcatggcgcgaacccggtcggtgcgaactgaactgtccgaagggacaagtctacttgcagtgcggcactccttgcaatcttacttgcagatccctgtcctaccctgacgaggagtgcaacgaagcctgccttgaaggatgtttctgcccgccgggactgtacatggacgagcgcggcgactgtgtgccgaaggcacaatgcccttgctattacgacggggagatctttcagccggaggacatcttctccgaccaccacaccatgtgctattgcgaggatggctttatgcactgtacgatgagcggagtccctggaagccttctgccagacgccgtcctctccagcccactctcgcacagatccaagagaagcctgtcatgccggccgcctatggtgaaactcgtgtgcccggccgataatctgcgcgcggagggactggaatgtaccaagacgtgccagaattatgatctggagtgtatgagcatgggttgcgtcagcgggtgcctgtgtccgccgggaatggttcgccacgaaaaccggtgtgttgcactcgagagatgcccttgcttccaccagggaaaggaatacgcgcccggcgagactgtgaagatcggctgcaatacttgtgtgtgtcaggataggaagtggaactgcactgaccacgtgtgtgatgcaacctgttccacgatcggaatggcacactacctgaccttcgacggcctgaaatacctcttcccgggagaatgccagtacgttctcgtccaggactactgcggatctaatccagggactttccggatccttgtggggaacaaaggctgctcgcatccatcggtgaaatgcaaaaagcgggtcacgatcctggtcgaaggaggagagatcgagctgttcgacggcgaagtgaacgtcaagcggccgatgaaggacgagactcactttgaggtggtggaatcaggaaggtacatcatcctgcttcttggaaaggcgctgagcgtcgtctgggatcgccatctgtccatctcggtcgtgttgaagcagacttaccaggaaaaagtgtgcggactgtgcggaaacttcgatggcatccagaacaacgacctcacttcgtcgaacctccaggtggaagaagatcccgtggactttgggaactcctggaaggtgtcctcccaatgcgcggataccaggaaggtgccgctggatagctcaccggcaacttgccataacaacatcatgaaacagacgatggtggatagctcgtgcaggatcctcacctccgacgtgttccaagactgtaacaaactcgtcgatccggagccctacctggacgtgtgcatttacgatacgtgctcatgtgaatccattggagattgcgcttgcttctgtgacaccatcgcagcgtacgcgcatgtgtgtgcccaacacggaaaagtggtcacgtggcgcaccgccactctgtgtccgcagtcatgcgaggaacggaacctcagagagaacgggtacgagtgtgagtggcggtacaattcctgtgccccggcgtgccaggtgacctgtcaacatccagagccgctggcttgcccagtgcaatgtgtggaaggatgccatgctcactgccctccgggtaaaatcctggacgaattgttgcaaacttgcgtggatccagaggattgcccggtgtgcgaagtggctggacggcgctttgccagcgggaaaaaggtcaccctcaacccttccgacccagaacactgccaaatctgtcattgcgatgtcgtgaacctgacctgcgaggcatgtcaggaacctggaggtttggttgtcccaccaactgatgctcctgtgtcgcccaccaccctgtacgtcgaagatatctccgagccgccgctccatgacttttactgtagccgcctgctggaccttgtgttcttgttggacggttcgagtcggctgtctgaggcggaattcgaagtccttaaggctttcgtcgtcgatatgatggagaggctgaggatctcgcaaaagtgggttcgtgtcgccgtggtcgaataccatgatggttcgcacgcgtacatcggactgaaggatcgcaaacggccgtcagaactgcgacggatcgcctcacaggtgaagtatgccggatctcaggtggcgtcgacgagtgaagtgcttaagtataccctcttccagattttcagcaagatcgaccgccccgaagcgagccggatcactctgctcctgatggcgtcccaggaaccacagcgcatgtccaggaattttgttcggtacgttcaaggtcttaagaaaaagaaggtcatcgtcattccggtgggcatcgggccacacgctaatctcaagcaaatccggctgattgaaaaacaggccccagaaaacaaggccttcgtgctctcgagcgtggatgaactggagcaacagcgggacgaaatcgtctcgtacctgtgtgacctggccccggaagcccctccgccgaccctgccacctgatatggcccaggtaacggtgggaccaggactgctgggagtgtcaacgcttggaccgaagaggaattcaatggtcctggatgtcgcattcgtccttgagggatccgacaaaatcggagaggctgacttcaaccgctcaaaggagttcatggaagaggttatccagcggatggatgtgggccaggacagtattcatgtcactgtcctccagtactcctacatggtgactgtcgaatacccgttctcggaagcccagagcaagggggacatcctgcaaagagtgagagaaatacggtaccagggagggaaccggaccaataccggactggcattgagatacctctccgaccactcgttcctcgtgtcgcaaggtgaccgtgaacaagcgcccaacctcgtgtacatggtgacgggcaatccggcctcagacgagatcaagcggctcccgggagacatacaggtggtgccaatcggcgtgggccccaatgccaacgtgcaagagctggaacgcatcggttggcctaatgcgccgattctgatccaggattttgaaactctcccaagagaggcgccggatctcgtgctccagaggtgttgttccggagaggggctccaaatcccgaccttgagccccgcgcctgattgctcgcagccgctggacgtcattctgctgctggatggatcctccagcttcccggcttcgtactttgatgaaatgaaatcgtttgcaaaggcctttatctccaaggccaacatcggtccacgcttgacccaagtctcggtcctccaatacggtagcattaccactattgacgtcccatggaacgtggtgccggaaaaagcacacctgctgtccctggtggacgtcatgcagcgggagggaggaccatcccaaatcggggacgctctgggtttcgccgtgaggtacctgactagcgaaatgcacggcgcgcgaccaggagcgagtaaggcagtcgtgatcctggtcaccgacgtttccgtggattcagtggacgcagctgccgacgctgcgcgatcgaatcgcgtaactgtgttcccgatcggcatcggagatcggtacgatgccgcgcagttgaggatactcgccggacctgccggagacagcaacgtggtgaagctccagcggatcgaggatctgccgaccatggtgaccctgggcaatagcttcctccacaaactttgttccggcttcgtgcgaatctgtatggatgaggacggaaacgagaagcgccctggcgatgtgtggactttgcccgaccaatgtcacaccgtgacttgtcagccggatggacagactctgctcaaatcgcaccgcgtgaactgcgacaggggactccgccccagctgtcccaattcacagagcccggtgaaggtcgaggaaacctgcggctgccggtggacctgtccgtgcgtctgcaccggatcatcgacccggcatattgtgacttttgatggccaaaacttcaagctgacggggtcgtgctcgtacgtgttgtttcagaataaggagcaggacctcgaagtcatcctccacaacggggcctgttcccccggagcccggcagggatgtatgaagtccattgaagtcaagcattcggccctgtccgttgagctgcattcggacatggaagtcaccgtcaatggacgcctcgtgagcgtgccatacgtcgggggcaatatggaagtgaacgtgtacggagcgattatgcatgaagtgcgtttcaatcacctgggacacattttcacctttaccccccaaaacaacgagttccagctgcagctctcccctaaaacttttgcctcaaaaacttatgggctctgcgggatttgtgacgagaacggagccaacgacttcatgctcagggacggaaccgttactaccgactggaaaactcttgtgcaagagtggaccgtgcaacggccgggacagacctgccagcctattttggaagaacaatgccttgtgccggactccagccactgccaggtgctgcttcttccgcttttcgctgagtgtcacaaagtgctcgcccctgcaactttttacgctatttgccagcaggactcctgccaccaggaacaggtgtgcgaggtgatcgcctcgtacgcgcacctctgccggaccaatggagtgtgcgttgactggagaactccggatttttgcgccatgtcatgcccgccatcgctcgtgtataatcactgtgaacatggttgccctcgccattgcgatggcaatgtgagcagctgcggcgatcatccgtcggaaggatgcttctgtccacccgataaggtgatgctcgaggggtcatgcgtccccgaagaagcctgcactcagtgcattggcgaggacggggtgcaacaccagttcctggaagcatgggtgccggatcatcagccatgccagatctgtacctgtctgtctggaagaaaagtcaactgtactactcaaccctgccctaccgcaaaggcccctacttgcgggctgtgtgaggtcgcaagactgcggcaaaacgcggaccaatgctgtccggaatacgaatgcgtatgtgacccggtgtcgtgtgatctgccaccggtcccgcattgcgagcgaggtttgcaacccaccctcaccaatccaggcgaatgcagaccaaatttcacttgtgcctgccgcaaggaagaatgtaagagagtgtctccgccgtcgtgtccgccgcaccgcctgccaaccttgaggaaaacccaatgctgtgacgagtacgagtgcgcatgtaattgcgtgaactccactgtcagctgtccactgggctacctggcgtcgaccgcaactaacgactgcggatgcacgactactacgtgccttccggataaggtgtgcgtgcaccgaagcactatatacccggtgggacagttttgggaagaaggctgtgacgtgtgcacttgcaccgatatggaggacgccgtgatgggcctgcgggtggcacagtgctcgcaaaagccatgtgaggacagctgcaggtcaggatttacgtacgtgcttcacgagggtgagtgctgcggccgctgtttgccatccgcctgcgaggtcgtgaccggatcacctagaggcgactcacaatctagctggaagagcgtgggctcgcagtgggcgagccccgagaacccatgcctcatcaacgagtgcgtccgcgtgaaggaggaggttttcattcaacagcgaaacgtgtcgtgccctcagctggaagtccccgtgtgccctagcgggttccagctgtcatgcaaaaccagcgcatgctgcccatcgtgccggtgcgaaagaatggaggcctgcatgctgaacgggaccgtgatcgggcctggaaaaaccgtgatgattgacgtctgcaccacttgccgctgcatggtgcaagtcggagtgatctccggtttcaagctggaatgccgcaagaccacctgtaacccgtgtccactcggatacaaagaagagaacaacacgggcgaatgctgcggtcggtgtctgccgactgcgtgcaccatccagctgagaggaggccaaatcatgaccctgaagcgcgatgaaactctccaggacgggtgcgacacccacttctgcaaggtcaacgagagaggcgaatacttctgggagaaacgggtgaccggatgccctccatttgatgaacacaagtgtctcgcagaaggcggaaagatcatgaagatcccgggaacctgctgtgacacgtgtgaggaaccagagtgtaatgacatcactgccaggctgcaatacgtgaaggtgggaagctgcaaatccgaagtggaggtcgatatccattactgccaaggaaagtgcgcatccaaggctatgtactcaatcgacatcaatgatgtgcaggaccagtgctcgtgctgttcacctacccggaccgaacctatgcaggtggcccttcactgcaccaacggttcagtcgtgtaccatgaagtgctgaacgcgatggaatgcaagtgctcgccgcgcaagtgctcgaaa

SEQ ID NO: 12483 - DNA, 8439 bp, Artificial Sequence
  derived and/or modified sequence
atgatcccagctaggttcgctggtgtgcttctggccctggcactgattcttccaggaacgctgtgtgccgaggggacccggggtagatcaagcactgcaagatgctctttgttcgggagcgatttcgtcaacaccttcgacggctctatgtacagttttgctgggtattgtagctatctattagctggtggatgccagaaacgctccttctctatcattggggattttcaaaatggaaagcgtgtctcactaagcgtctatctgggggaattcttcgatatccacttgttcgtaaatgggaccgttacccaaggagaccaaagagtgagcatgccatacgccagtaagggcttgtacctggagaccgaagccggatactataagctgagtggagaggcatatggcttcgtcgcacgcatagacggctcgggcaattttcaggtgttgctgtccgatcgctactttaacaaaacatgtggtttgtgcggaaacttcaacatctttgcagaagacgactttatgacccaggaggggactctcacaagtgatccctacgacttcgccaacagctgggctctgtctagcggagagcagtggtgcgaaagagcgagtccacccagttcctcttgcaacatctccagcggggagatgcagaaaggcctgtgggaacagtgtcagttgcttaagagtacgagtgtgtttgcccgttgccaccccctggtagatcccgaacctttcgtggctctatgcgaaaagactctctgcgagtgtgcgggcggcctggagtgtgcatgccctgcgctcctcgagtacgcaaggacctgtgctcaggaggggatggttttatacggctggacagaccattcagcctgttcgcccgtgtgtcccgcaggaatggaatatagacagtgtgtttcaccttgtgcaaggacctgccagtctcttcacattaacgagatgtgtcaggagaggtgtgtggacggctgttcttgtccggagggtcagttgttggacgaggggctttgtgtcgagagcacagagtgtccttgcgtccatagcggtaagcgttaccctcctggaacttctctctctcgagattgcaatacttgcatttgccgaaattcgcaatggatctgcagcaacgaggagtgccctggagagtgcttggtgactgggcaaagccattttaagtctttcgacaatcgttacttcaccttctccggaatatgtcagtatctgctcgcccgagactgtcaggaccacagcttctccattgtgattgaaaccgtccagtgtgccgatgaccgggacgccgtgtgcactcgctccgtgacagtgcgcctccctggtcttcataattcacttgtgaagctgaagcacggagcaggagtagcaatggatgggcaggacgtccagctgccactgctaaagggtgatctgagaatccagcacaccgtcacagccagtgtgcggctctcttacggagaggacttgcagatggattgggacggccgcggacggttgcttgtaaagttgtccccggtctacgctggaaagacttgtggtctttgcggtaattacaacgggaaccagggcgatgattttctgacacccagcgggctagctgaacctagagtggaagatttcggtaatgcttggaaactccacggagactgccaggacctgcagaagcagcactccgacccgtgtgcattgaaccctaggatgacacgattctctgaggaagcatgtgcggtgttaactagtccaacctttgaagcgtgccaccgggctgtgtcacccctgccataccttcgaaactgcaggtacgatgtttgtagttgcagcgacggcagggagtgcctgtgcggggcgttggcaagctatgctgccgcatgtgccgggagaggggtgagggtggcctggagagaaccaggccgatgcgagctgaactgccctaaggggcaggtgtacctgcagtgtgggactccatgtaacctcacctgcagatccctgagctacccagacgaggaatgtaacgaggcatgtttggagggttgtttttgtccccccggactctacatggacgagaggggggactgtgtacccaaggcccagtgtccatgctactatgacggggaaatctttcagccagaagacattttttcagatcaccatactatgtgttactgtgaagatggtttcatgcactgcaccatgagtggagttccagggtccctgctaccagacgccgtgctgagctcaccactcagccaccgatccaagcggtccctgagctgtcggcctccaatggtgaagctggtatgccctgcagacaacctaagagcggaaggcctggagtgtacaaagacgtgtcagaattacgacctggagtgcatgtctatgggatgtgtgtctggctgcctgtgcccacccggaatggttagacacgagaacaggtgcgtcgcccttgaacgctgcccatgctttcatcagggcaaagaatacgctccaggcgaaaccgttaaaatcgggtgcaatacttgcgtgtgccaggaccgcaaatggaactgtacagaccatgtctgtgatgctacgtgcagtacaattggtatggcccactatctcactttcgatgggctcaagtatctgttcccaggggaatgtcagtatgttctcgtgcaagattactgcgggtccaacccagggactttccggatcctggtgggcaacaagggatgctcccacccttccgtaaaatgtaagaaaagagtaaccatccttgtggaggggggagaaatcgagctgttcgacggagaggtgaacgttaagaggccaatgaaagacgagacgcactttgaggtcgtggaatccggtcgatacatcatcctcctgttgggaaaggccttaagcgtcgtttgggatcgacatctgagcatatccgtagtgttgaaacagacttatcaggagaaagtgtgtggactctgtggaaatttcgacggtatccagaataatgacttgacatcttcaaatttacaagtcgaagaagatcccgttgactttggcaacagctggaaggtgtcatcgcagtgcgctgataccaggaaggtgccactcgattcctcccccgcgacatgccacaataacatcatgaaacagacaatggtggatagctcctgcagaattttgacctcagacgtcttccaggattgcaataagctggtcgatcctgagccatatctggacgtgtgtatctacgatacctgttcttgcgagagcataggcgactgtgcatgtttttgtgacacaatcgcggcatatgcacacgtctgcgcccagcacggcaaggtggtgacctggcgcacagccacattgtgtccgcagagctgcgaggagcgaaacctgagagagaatggctacgaatgcgagtggcggtacaactcctgcgcccccgcctgtcaggttacctgccagcaccctgaaccactcgcctgccccgtgcagtgtgtagagggttgtcacgcccactgtccccccggaaaaatcttggacgagctgcttcaaacctgcgttgacccagaggattgtccagtgtgcgaggtggccgggcggaggtttgccagcggcaagaaggtcacacttaatccctccgaccccgaacattgtcagatttgccattgtgatgtggtgaatctgacgtgtgaggcctgccaggagcctggagggctggtcgtaccacctacagacgctccagtcagtccaaccaccctgtacgttgaggacattagtgagccccctctacatgatttctattgctccaggttattggacctcgtgtttctcctggacgggtcctccagacttagcgaagctgagtttgaagtgctgaaggcctttgttgtagacatgatggagcgccttaggatatcccagaaatgggttagggtcgcagtggtcgaatatcacgacggcagccatgcgtacatcggcctgaaagataggaagcgcccttctgagcttagaagaattgcatcccaggtgaaatacgcgggttcccaggtcgcgtccacgtcagaggtactgaagtacactctgtttcagatcttcagcaaaatagatcgtcccgaggcttcacgtatcaccttgctgctgatggcatcccaagagccccaacgaatgtctcggaacttcgtcaggtacgtccagggcctgaaaaaaaagaaagtaattgtgatcccagtggggatcgggccacatgccaatctcaagcagatccgcctgattgaaaaacaagcgcctgaaaacaaggcttttgtcctcagtagtgttgacgagctggagcaacagcgtgacgaaatcgtcagctatctttgcgatcttgcacctgaagcacctccacctaccctgcccccagatatggcccaggtgaccgttgggcccgggctgctgggagtatcaacactcggcccaaagcggaatagtatggtgctggatgtggcgtttgtgcttgagggctctgataaaatcggggaagccgatttcaatcggtcaaaagagttcatggaggaagtcattcagaggatggacgtcggtcaagattcaatacacgtcaccgtgctccagtactcctacatggtgacagttgagtaccctttctccgaggcccagagcaagggagatatcctccagagagtgagagaaattaggtaccaggggggtaacaggacaaacacgggcttagcccttagatacttgtctgatcattccttcctagtctcgcaaggtgatcgggaacaagcccccaatctcgtatatatggtaaccggaaatcccgcaagcgatgaaataaaaaggctccccggcgacattcaggttgtgcccatcggggtcgggccaaacgcaaacgtgcaggaactggaacggattggctggcctaacgcccccatacttattcaggactttgagaccttacctcgtgaggcccctgacctcgttctgcaacggtgctgctctggcgaaggcttacagatacccacactctctccagcacctgactgcagccagcctctcgatgtgatcctgcttctcgacgggtcttcgtccttccctgcctcctacttcgatgagatgaagtcgtttgccaaggcgttcatcagcaaggcgaacatcggaccccggcttacccaggtcagcgttctgcagtatggtagcataaccacgattgacgtcccatggaacgtggtgcccgagaaggcgcacttgttatccctcgttgatgtgatgcagagagagggtggaccatcacaaataggtgatgccttaggattcgccgtccgctacttgacgtcagaaatgcatggtgctagacccggcgcatcaaaagccgtggtaatcttggtcaccgatgtaagtgtggacagcgttgacgctgccgccgatgccgcgcgttccaaccgtgtaaccgtgtttccgatcggaatcggcgataggtatgacgccgcccagctgcgcatactcgctggaccagccggagacagtaacgtggttaaactgcagcgcattgaagacctccccaccatggtaacattgggtaacagctttctccacaagctctgcagcggtttcgtcaggatttgtatggacgaggatggcaacgaaaagaggcccggagatgtctggaccttgccagatcagtgtcacactgtaacctgtcaacctgatggacagactctgctgaagagtcaccgggtcaactgtgaccgaggactccgccctagttgtccgaacagccagtctccagtgaaggtggaggagacatgcggctgtcggtggacctgtccttgcgtttgtactggctcatcaacccggcacatcgtgacattcgacggtcaaaacttcaaactgactgggtcatgctcctatgtgttgtttcagaacaaggaacaggatttagaggtcatcctgcacaatggggcttgcagccccggggcccgacagggatgcatgaagtccattgaagtgaagcacagcgctctctctgtggagctgcattctgacatggaggtcaccgtgaatggccggctggtgtcagttccatacgtaggagggaatatggaagtcaacgtttatggcgccattatgcatgaagtccgattcaatcatctgggccacatcttcacatttaccccccagaataacgagtttcagcttcagctaagtccaaaaacttttgcctctaagacttacggcctgtgtggtatctgcgatgaaaacggcgctaacgattttatgttgagagatggtactgtcaccacagattggaaaactttagttcaggaatggacagtacagagaccgggtcagacctgccagccgattttggaggaacagtgtctggtgcctgacagctcccattgccaagttcttctcttgccactgttcgccgagtgccataaggtgctcgctcccgctactttctatgctatttgccagcaagattcctgtcaccaggagcaagtgtgcgaggtgatcgcttcatatgcccacctttgtagaacaaacggcgtgtgcgttgattggcggaccccagatttttgtgccatgtcttgtcctccctctctcgtctataatcactgcgagcacgggtgcccacgccattgcgatggcaacgttagctcatgtggcgaccatccatctgagggctgcttttgtccaccagataaggtgatgctggagggttcatgtgtcccggaggaggcctgtacccaatgtatcggcgaagacggcgttcaacaccagttcctggaagcatgggtcccagatcaccagccgtgtcagatctgcacgtgtctctccggaaggaaggtgaactgcacaacacagccctgccccacagctaaagctcccacttgtggattgtgtgaagttgcccggctgaggcaaaacgccgaccagtgttgccccgagtatgagtgcgtctgtgaccccgtttcttgtgatttgcctccagtccctcattgtgagaggggcctgcagcccacactgactaaccccggcgagtgccggccaaactttacctgcgcttgtcgcaaggaggaatgtaagagggtaagtcctccttcgtgtccgcctcacagactgcccacactccgtaaaacacagtgttgtgacgaatacgaatgtgcatgcaactgcgtgaactctaccgttagttgccccctcggttatctcgcgtccacagccacaaacgattgtggctgcacaacaactacctgtttaccagataaggtatgcgtgcataggagcaccatatacccggtgggtcagttctgggaggagggatgtgacgtgtgtacctgtactgatatggaggacgccgtgatggggctgcgcgtggcgcagtgctctcaaaaaccctgcgaagattcctgtagaagcgggttcacatacgttttgcacgaaggagaatgttgcggccggtgtctgccatcagcttgcgaggtggtaacgggtagcccccgcggggacagccagtcctcatggaaatcagtgggtagccaatgggcgagtcctgagaatccgtgcctaattaacgaatgtgtacgggtaaaggaggaagttttcatacagcaacgaaacgtgtcttgtccccagcttgaggtcccagtgtgcccgtccggctttcagctcagctgtaagacgagcgcgtgctgcccctcgtgtagatgcgaacgtatggaggcctgtatgctgaatgggacagttattgggcctggaaagaccgtcatgattgacgtctgtacaacctgtaggtgtatggttcaggtgggcgtgatcagcgggttcaaactggagtgcaggaagaccacttgcaatccatgtcctcttggatataaggaggagaacaataccggcgaatgctgtggtcgctgtctgccaaccgcctgtactattcagctgaggggcggccagatcatgaccttgaagagggacgagacattgcaggacggatgcgatacgcatttttgcaaagtgaatgaacgtggagagtacttctgggagaaacgagtcactggctgtccaccctttgacgagcataagtgcctcgccgagggtggtaagatcatgaagatccccggtacatgctgtgacacttgtgaagagcctgagtgcaacgacattacggcacgactgcaatacgtaaaggtgggcagttgtaaaagtgaggtagaagtcgacatccactactgccaggggaaatgcgcctctaaggctatgtacagtatcgatattaacgatgtccaggatcagtgtagttgttgctcccctacacgaaccgagccaatgcaggtggcattgcattgcactaacggctctgtagtctaccatgaagtactgaacgcaatggaatgtaagtgctcacctcgcaaatgttccaag

SEQ ID NO: 12484 - DNA, 8439 bp, Artificial Sequence
  derived and/or modified sequence
atgatccccgcccgatttgcaggtgtgctattggccctcgccttgatcttgccgggtaccctgtgcgcggagggaacgcggggccgctcctccaccgcacgctgcagtctttttgggagcgactttgtgaatacctttgatggctcaatgtatagcttcgcaggatactgctcgtacctactcgctggcggctgccagaagcggtctttctccataattggcgacttccagaatggcaaaagagtgtccctgtccgtgtacctaggagagttcttcgatatccatctgtttgttaacggcacagtgactcaaggagaccagcgggtgagcatgccatatgcatccaagggcctgtacctggagaccgaggcaggctactataagttgtctggcgaggcgtacggcttcgttgctagaatcgacgggtcaggaaattttcaagtcctcctctccgatcgttacttcaacaaaacatgtggcttgtgcggcaacttcaatatattcgccgaggacgatttcatgacacaagaggggacgttgacttcggacccctacgatttcgcgaacagctgggctttgagcagcggcgaacagtggtgtgaacgtgcctctccaccgtccagcagctgtaacatttcgagtggagagatgcagaagggcctgtgggagcagtgccagctcttgaagtccacgtcggttttcgctcgctgccatccattagttgacccagagcccttcgttgccttgtgcgagaagacactgtgtgagtgcgccggcggactggagtgtgcctgccccgccttactggaatacgctcgcacatgcgcacaagagggcatggtgctctatggctggaccgaccactcggcctgttcccccgtgtgtccagctggcatggagtaccgacagtgtgtatcaccgtgcgcccgtacctgtcagtcgctgcatatcaacgagatgtgtcaagaacggtgcgtcgacggttgcagctgccccgaaggccagctgctagatgagggcttgtgcgtggaatccacggaatgtccttgcgtgcactctggaaagcgttaccctcctggaacgtcgctatcccgcgactgcaatacctgcatttgcaggaacagccagtggatatgctcgaatgaagagtgccctggcgagtgcctggtgaccggacagagccacttcaaaagtttcgacaatcggtattttacgttttcaggaatctgtcagtacctactggctcgtgactgccaggaccatagctttagcatagtgatcgagaccgtgcagtgtgccgacgatcgagatgccgtatgtacgaggagtgtgactgtcaggctgcccggcctccataatagcctagtaaagctgaagcatggcgcaggtgtggcaatggacggacaagatgtccaattgccgttgcttaaaggagatctgcgcatccaacacaccgtgactgcatcagtgcgcctctcctacggcgaggatttgcaaatggactgggacggtaggggtaggcttctcgtgaagctgagtccggtctacgcgggtaaaacttgcggtctgtgcggcaactacaatggcaatcagggagatgactttttgaccccgtcgggactggccgaaccacgcgttgaggattttggaaatgcgtggaagctgcacggggactgtcaggatctgcagaagcagcactctgacccatgcgctctaaacccacgcatgactcggttcagcgaggaagcctgcgccgtgctcaccagtcctacgtttgaggcctgccatagggcggtgtcccccctgccttacctcagaaattgccggtatgatgtttgttcgtgcagtgatggtcgagagtgtctttgcggcgctttggcttcgtatgcggcggcatgtgcaggccgcggcgtgcgggtggcatggcgtgaaccgggacgctgcgaattgaattgtcccaaaggccaggtatacctgcagtgcggcactccgtgcaacctgacctgccggtccctgagttacccagatgaggagtgcaatgaggcgtgcttggaggggtgcttctgcccaccgggtctctacatggacgagcgaggcgattgcgtacctaaggcacagtgcccatgctactacgatggagaaatctttcagcccgaggacatcttctccgaccatcatactatgtgctactgcgaagacggcttcatgcactgcactatgtccggcgtgcctggctccctgctgccagatgcggtgctgagctctccgctgtctcaccggagtaaacgatctctgagctgccgccccccgatggtgaagctagtttgccctgccgataatcttcgtgccgagggattagagtgcacgaaaacgtgtcagaactacgatctggagtgcatgtcaatgggttgcgtgtcgggatgcttgtgtccacctggaatggtgcgacacgagaatcggtgtgtcgcgctggagcgatgcccctgtttccaccagggtaaggagtacgcacccggcgaaacagtcaagatcggctgcaatacctgtgtttgccaggatcgcaagtggaattgcaccgatcacgtgtgtgatgctacctgctccactatcggcatggcacattaccttacgtttgatggcctaaagtatctgtttcccggagagtgtcagtacgtgttggtgcaggattactgcggcagtaacccgggcacgttccgtattctggttggcaacaagggctgctcccacccgagcgtgaagtgcaagaaacgtgtcacaattttggtcgagggtggcgaaatcgaattattcgatggtgaggtgaacgttaagcgtccgatgaaggatgagacgcactttgaagtggtcgagagtggccgttacatcatactattactcggtaaggctctgagtgtggtgtgggaccgacacctgtcaatcagcgtagtattgaaacagacctaccaggaaaaagtgtgcggtttgtgtggaaacttcgacggcatccagaataacgatctgaccagtagcaacttgcaggttgaggaggatccagtagattttggcaacagctggaaagtaagttcacagtgtgccgacacacgcaaggttccccttgactcgtccccggccacgtgccacaacaatatcatgaagcagaccatggtcgatagttcctgccgaattttgacgtccgacgtattccaggactgcaataagctcgtagatccagaaccatacctggatgtatgtatctatgatacgtgtagctgcgagagcattggagattgcgcctgcttttgcgacacgatcgcagcctacgcacatgtgtgcgcgcagcatgggaaggtcgtgacctggaggacggccacgctatgccctcaatcctgcgaggaacgtaaccttcgagagaatgggtacgagtgcgaatggcgctataattcctgcgctccggcctgccaggttacctgccaacacccagaacccctggcatgccccgtacaatgcgtagaaggctgccatgcccactgcccgccgggaaagatactagatgagttgttgcagacgtgcgtggatccggaggactgtccggtctgtgaggtggctggccggcgtttcgcctccggcaaaaaggtaaccctgaatccgtcggatccagaacattgccagatatgccactgcgacgtcgtgaacctcacatgtgaggcctgccaggagcctggcggcctcgttgtgccaccaacagacgccccggtatcgccgaccactctgtacgtcgaggacatctccgagccgccgttgcacgacttctactgttcaaggttgctggacttggttttcctactcgatggtagctccagactgagtgaggccgaatttgaggtgctgaaggcttttgtcgtggacatgatggaacggctacgcatctcccaaaagtgggtacgggtggccgtcgttgagtaccacgatggttcccatgcgtacatcggactcaaggaccgcaaacgaccaagtgagttgcgccgtatcgcctcgcaggtgaaatacgccggcagccaggttgcttccacgagcgaggtgttgaagtataccctatttcaaatattctccaaaatcgatcgtccggaagcttcgcgcatcacgttgctcttgatggccagccaggagccacaacgaatgtcccgtaatttcgtccgctacgtccagggcctgaagaagaaaaaggtcatcgtaatacccgtcggaattggtccacacgccaatcttaagcagattcgactaatcgagaagcaggcaccggagaataaggccttcgtcctgtcatccgtagacgagctcgagcagcaaagggacgagatcgtgagctacctgtgcgatctcgcgcccgaagcgcccccaccgacgctgccgcccgatatggcacaagtgacggtggggcccggcctccttggtgtttccacgctaggcccgaaacgtaattccatggttttggacgttgctttcgtactggagggctctgacaagatcggagaggctgacttcaatcgcagcaaggaattcatggaggaggtcattcagaggatggacgtgggccaggactctatccacgtaacagtgctccaatactcctacatggtcactgtggaatatcccttcagcgaagcgcagagtaagggtgatatattacagcgcgttagggaaatccgctatcaaggaggaaatcgcactaacacaggtcttgccctccgatatctatcagatcactcttttctggtgagccaaggcgatagggaacaggccccaaatctagtgtacatggtcactggcaatccggcctccgacgaaatcaagcgcctcccaggagatatacaggtggtgccgatcggtgtaggtcctaacgcgaacgtccaggagctggagcgaattggatggcccaatgcacccatcctgattcaggacttcgagacactgccacgggaagcaccagatctggtgttacaaaggtgctgtagtggcgaaggactccagatcccgacgctgtccccggccccggattgctcacagccgctggatgtgattcttctcctggacggcagttcaagcttccctgcttcgtattttgacgagatgaaatcgtttgccaaggccttcatttcaaaggccaacataggccccagactgacccaagtttcggtactccagtacggtagcataaccaccattgatgttccgtggaatgtggtgcccgagaaggcccacctcctatcattggtcgacgtgatgcaacgcgaaggcggtccgtcacagatcggcgatgcgctcggttttgcggtgcgctacctgacttccgaaatgcacggcgcgcgtccaggagcgtccaaagcagtggttatcttggtcaccgatgtttcggtggactcggttgatgctgcggctgatgcagcacggtcgaacagagttactgtcttcccgatcggcattggcgaccggtacgatgccgcgcagctacgcatccttgccggacccgccggtgattcgaatgtggtcaagctccagcgcatcgaggatctccccaccatggtgactctgggtaattcattccttcataagctctgctccggattcgttagaatatgcatggatgaagatggcaatgaaaagcgaccaggcgatgtctggaccttaccggatcagtgtcataccgtgacctgtcaaccagacggtcaaacgttgctgaagagtcacagggtcaattgcgataggggccttcgtccctcatgcccgaactctcaaagtcctgtgaaggtcgaggagacttgcggttgccgttggacgtgcccctgcgtctgcacgggctccagcacgcgccacattgtcaccttcgatggtcagaactttaaattgacaggatcgtgctcctacgtactctttcagaacaaggaacaagatctggaggtcattttgcataatggagcgtgttctcccggcgcccgccagggatgtatgaagagtattgaggtcaagcactcggctctcagtgtggagctgcacagcgacatggaggttaccgttaatggccgtctggtgtccgtgccatacgtaggcggaaacatggaagttaatgtatatggcgccatcatgcatgaggtgcgcttcaaccatctgggccacatcttcactttcaccccacagaataatgagttccagctacagctgtccccgaaaaccttcgcctctaagacctacggcctctgcggcatatgcgacgagaatggtgccaatgattttatgcttcgtgacggaacagtgacaacggattggaagacgctggtccaggagtggacggtgcagaggcccggccagacttgccagcccatattggaggaacagtgcttggtcccggactcgtcgcattgtcaggtgctgctactgccactgttcgccgagtgtcacaaggtgctggccccagccacgttttacgcaatttgccaacaagacagctgtcaccaggaacaggtgtgcgaggttatagcctcctacgctcatttgtgtcgtaccaatggtgtctgcgttgattggcgaacaccggatttctgcgcgatgtcgtgcccgccatcattggtgtataaccattgcgagcatggctgcccacggcattgcgatggcaatgtctcgtcgtgcggcgatcatccgagcgagggttgtttctgcccaccagacaaggtgatgctggagggatcctgtgtcccagaggaggcatgcacacagtgcatcggagaggatggagttcagcatcagtttctggaggcatgggttcccgatcatcagccatgccagatctgcacctgcctgagcgggcggaaagtgaactgtaccacccagccttgccccacggcaaaggctccaacatgcggcctgtgcgaggttgctcgactacgccaaaacgccgatcagtgctgcccagaatatgagtgtgtctgtgaccccgtctcctgcgatctgccgccagtccctcattgcgagcgtggactgcagcccactctgacaaaccctggcgagtgccgccccaatttcacgtgcgcatgtagaaaggaagaatgcaagcgcgtgtcccccccatcctgtccgccacaccgtctcccaacccttcggaaaacgcagtgctgcgatgagtacgagtgcgcctgcaattgcgtgaactcaactgtttcgtgcccgctcggatacctggcctcgacggcaacgaacgattgcggctgtacgactacgacatgtttgcccgataaggtatgcgtgcatcggtccactatttatcccgtgggacaattttgggaggagggatgcgatgtgtgcacctgcacggacatggaggatgctgttatgggcctccgcgtggcgcagtgcagtcagaaaccatgcgaggattcttgccgatcgggctttacctatgtgctgcacgagggcgagtgctgcggacggtgcctgccaagcgcgtgcgaggtcgtgacaggcagcccccgtggtgactcccagagctcgtggaagagcgtcggatctcaatgggcaagcccagagaatccctgcctcatcaacgagtgcgtgcgcgtcaaggaagaagttttcattcagcagagaaatgtgtcctgtcctcagctcgaagttccagtttgcccctctggcttccaactatcctgcaagacaagtgcctgttgcccatcttgcaggtgcgagcgcatggaggcctgcatgttgaacggaacggtgatcggccccggtaagacagtcatgatagatgtttgcaccacgtgccgttgcatggtgcaggtgggcgtaatcagcggtttcaaattggagtgccgtaagaccacgtgcaacccctgcccactgggatacaaggaagaaaacaataccggcgaatgctgcggccgctgcttgccgacggcgtgcaccatccagctccgaggaggtcagattatgacgctgaagagagatgagacactgcaggacggctgcgatacccatttttgtaaggtcaacgaacgcggtgaatatttctgggagaagcgagtgacgggatgtccgccatttgacgagcacaaatgtctggcagaaggaggaaagattatgaagattccggggacctgctgcgacacatgcgaggagcccgagtgcaatgatattaccgcaaggctgcaatatgttaaggtgggaagctgtaaaagcgaggtggaggtcgacatccactactgccagggcaagtgcgcgtccaaggctatgtatagtatcgacatcaacgatgtgcaagaccagtgttcctgctgcagcccgacccgcacggaaccaatgcaggtggccttgcattgcacgaatggcagcgtggtgtatcacgaagtgctgaacgccatggagtgtaagtgctcgccgcgcaaatgctccaag

SEQ ID NO: 12485 - DNA, 8439 bp, Artificial Sequence
  derived and/or modified sequence
atgatccctgctcgctttgccggtgtattactggcccttgctttgattctgccaggcactctgtgcgccgagggaacccgcggcagatcctcaaccgcccgctgttctttatttggcagcgattttgtcaatacattcgatggaagcatgtacagctttgctgggtactgttcatatctcctggccgggggttgtcagaagagaagcttcagcatcatcggtgacttccagaatggcaaaagggtaagcctgtccgtgtacctgggcgaattctttgacatccatctcttcgttaatggcactgtcactcagggggaccagagggtgtctatgccatacgcctccaagggactgtacctggagaccgaagcaggctattataaactgtcaggcgaggcctatgggtttgttgccagaattgatggctctggaaactttcaggtgcttttgagcgacagatattttaacaagacttgtggcttatgcggcaacttcaacatatttgccgaagacgattttatgactcaggagggcactctgacatcagacccctacgacttcgccaactcctgggcgctcagttctggcgaacagtggtgtgaaagggcttcaccaccaagcagctcttgtaacataagttccggcgagatgcagaaggggctttgggagcaatgccagttgctcaagtcaacaagcgtgttcgcgcgctgtcacccgctcgtggaccccgaacccttcgtcgctctctgtgagaagacattgtgcgagtgcgcaggtggcctggaatgtgcgtgtccagcactcttagaatatgctcgcacttgtgctcaagaaggcatggtcctttacggctggacagatcacagtgcctgtagccctgtttgtccagcaggaatggaatatcgacagtgtgtcagcccatgtgccaggacctgccagagcctccatatcaacgaaatgtgtcaggagcgttgtgtcgatggttgctcatgcccggagggacagcttctcgacgagggtttgtgtgtcgagagcaccgaatgcccttgtgtgcactctggtaagcggtaccctccggggacttcactgagcagagattgcaatacctgcatctgtcggaactcgcagtggatctgctccaatgaggagtgtcctggcgagtgcctcgtgacaggacagagccactttaaatccttcgataacaggtattttacattctccgggatctgtcaatacctcctcgctcgggactgccaggaccactccttttccatagtcatcgaaaccgtgcagtgtgcggatgacagagacgccgtatgcacacgttcagtgactgtgagactgccgggacttcacaacagccttgttaagctgaagcacggagcgggagtcgctatggacggtcaggatgtgcaactgcctcttctaaaaggggacctcagaatccagcatacagttactgcgtcagtgcgcctgtcctacggagaggacttgcagatggattgggatgggaggggcagacttttggtgaaactctcccctgtctatgcaggcaaaacctgtggactctgcgggaattataatggtaaccagggcgatgactttctaacacctagcggtctggctgaaccccgggttgaagactttgggaatgcctggaaactccacggggactgccaagacttgcagaagcaacactctgatccatgcgccctgaacccgaggatgactaggtttagcgaggaagcttgcgcagtgttaacttcccctacattcgaggcgtgccatcgggctgtgagtcccctgccttacttgcggaattgtcggtacgacgtctgttcatgcagtgacggaagggaatgcctgtgtggtgctttggcatcctatgctgcagcctgtgcgggacgcggcgtccgcgtggcctggagggagccaggaaggtgcgaattgaactgtccaaaggggcaggtgtaccttcaatgtggcactccttgcaacttgacatgtcggagcctgagttatcccgacgaggaatgtaatgaagcatgtcttgaaggctgtttctgtccgcctgggctctatatggatgagcgcggagactgtgtccctaaagcacagtgtccttgttattatgatggtgagatcttccaacctgaagacattttctcggaccaccacaccatgtgttactgtgaggacgggttcatgcattgcaccatgtctggtgttcctggtagtctattgcccgacgccgttctctccagtcccctgtcccaccgctcgaaacggtctttgagctgtcggcctccaatggtgaagctcgtttgtcctgccgataatctccgcgccgagggattagagtgcactaagacctgccagaactatgacctcgaatgtatgtcgatgggatgcgtgagcggatgtctgtgcccacctggcatggtgaggcacgagaatcggtgcgtagcactggaaagatgcccctgttttcaccaagggaaggaatatgcccctggtgaaacagtcaagatcggatgtaatacttgcgtgtgccaggataggaagtggaactgcaccgaccatgtgtgtgatgccacatgttcaacaattggcatggcacactatctcacattcgatgggctgaagtacctttttccaggcgaatgccagtacgtgctggttcaggactattgcgggtccaatccaggcacgtttcggatcctggtgggtaacaaggggtgcagtcatcctagcgtgaaatgtaagaagagagtcacaattcttgtagaaggtggggaaattgagctgtttgatggtgaagtaaatgttaaacgcccaatgaaagacgaaacgcatttcgaggttgtggagagcgggcgctatatcatcctgctgctgggcaaggcgctttcagttgtctgggatcgacatctgtctatctctgtcgtgctgaagcagacctaccaagagaaggtgtgcggtctttgtgggaactttgacgggatacagaacaatgacttgacgtcatccaatctgcaggtcgaggaagatccggtggatttcggcaactcctggaaagtatcttcccagtgtgctgacacccggaaagtacccctcgacagttcacctgccacatgtcacaataatattatgaagcaaaccatggtggattcttcgtgccgaatccttacatccgatgtcttccaggattgtaataagctcgttgatcccgaaccttacttggatgtctgtatatatgacacctgttcgtgcgagtctattggcgactgcgcgtgtttttgtgataccattgctgcctacgcccacgtctgcgcccagcacggcaaggtggtgacatggcgtacggccacactttgcccgcagtcttgtgaggaaagaaacttaagggagaacggatacgagtgtgagtggcggtacaattcttgtgcaccagcttgccaggtgacatgccagcatccagaaccactggcatgccctgtacagtgcgtcgaagggtgccacgcgcattgccccccaggtaagattttggatgagcttcttcaaacatgtgtggaccccgaagactgccctgtctgcgaagttgctggccggcggtttgcaagcggcaagaaagtgactctgaatcctagtgatcctgaacattgtcaaatctgccactgcgacgtggtgaacctgacctgcgaggcttgccaggaaccgggaggactggtggtgccgcccacagatgcaccggtgtccccaaccacgctctacgttgaagatatatccgagccacccctacatgatttctactgctctagactgctggatctggtattcttgttggatggttcctctcggctctccgaagcagagttcgaggtcctgaaggcctttgtcgtggacatgatggagaggctgaggatctctcagaagtgggtccgggtcgctgtggtagaataccatgacggaagccatgcatacatagggcttaaggataggaaaaggccctctgagcttcgaagaatcgccagccaggtaaagtacgcaggttcgcaggtcgcttctaccagcgaggttctcaagtataccctgttccagattttctcaaagatcgacaggcccgaagcaagccgaattactctgctacttatggcttcccaagagcctcagagaatgagcagaaattttgtccgttatgttcaggggctgaaaaagaaaaaagtgattgtcataccagttgggatcggcccccacgctaacctcaaacaaattagactcatcgaaaagcaggcccctgagaataaagcgttcgttctgtcctcagtggacgagttggaacagcagagggacgagattgtctcctacctatgcgatctggcgcccgaagctccaccgcctactctgccacctgacatggcccaagtgactgtgggtccaggacttttgggggttagtacactcggcccaaagcgtaacagcatggtgctggacgtggcgttcgtacttgaggggagtgataagatcggagaggccgattttaatcgaagcaaagaatttatggaggaggtcatccaacgcatggacgtggggcaggatagcatccatgtaactgtcctgcagtattcatatatggtgaccgtggagtaccccttttcggaggcccaaagtaaaggtgatatactgcagcgcgtacgggagattcgctaccagggaggaaaccgaactaatactggtctggcgctgaggtatctttccgaccactcctttctggtgagccaaggcgatcgtgagcaggcccccaatcttgtttatatggttactggcaacccagccagtgacgaaattaagaggctgccgggggacatccaggtagttccgattggcgtaggccctaatgctaatgtgcaagagctagagaggattggatggcccaatgccccgatcctcatccaggattttgagacgcttccaagggaggcccctgacctggtcctacagcgctgttgctccggggagggattgcagattcctacactgtcccccgcccctgactgtagccagccacttgatgtcatcctgctgttagacgggtccagcagttttcccgctagttatttcgatgaaatgaagagttttgcgaaagcctttatttccaaagcaaacatcggcccacggctgacgcaggttagcgtgctgcagtacggctccattacaaccatcgatgtgccatggaatgttgtgcccgagaaggcacacctgttgagtctcgttgacgtcatgcagagagaaggcgggccttcacaaataggggatgctctcggtttcgccgtgcgctatctgacatccgaaatgcacggggccaggccaggcgcttcaaaggctgtcgtgatcttggtgacagatgtgtccgtggattctgttgacgccgcagcagatgcagctcgcagcaatcgtgttacagttttcccaattgggattggcgacagatacgatgccgcccagttgcgcatacttgccggtccagcaggcgattccaatgtcgtgaagttgcagcgcattgaagaccttccaactatggtcaccctgggaaacagtttcctgcataaactgtgctcaggattcgtccgcatctgtatggacgaagacggcaacgagaaaagacccggcgatgtatggaccctgcctgaccaatgccacaccgtgacgtgtcaacctgacggacagacactgctgaagtctcaccgggtaaactgcgaccgcgggctgcggccgtcttgcccgaattcacagtctcctgtgaaggtagaagaaacgtgcggatgtagatggacgtgcccctgtgtatgcactggctcctctacacggcacattgtgaccttcgatggccagaacttcaaattgaccggctcttgctcctatgtcctttttcagaacaaggaacaggatctggaagttatcctgcataacggggcatgttctccaggggcccgccaaggttgcatgaaatcaatcgaggtgaaacatagcgctctctctgtggagctgcactcagacatggaagtgacagtaaacggtcggcttgtcagtgtgccgtacgtgggcggcaatatggaagtgaatgtatacggcgccataatgcatgaggtccggttcaatcatcttggtcacattttcaccttcaccccacagaataacgaattccagctccaacttagtcctaagacgtttgcgtccaaaacctatgggctctgcgggatctgcgatgagaatggagctaatgacttcatgcttcgagatggcaccgtgaccacggattggaaaacccttgtacaggagtggacggtgcagagacccgggcagacttgtcaaccgattttggaagagcaatgtctggtgccagattcctctcactgtcaggttctcctgctgcctctattcgccgagtgccataaggttctcgctcctgccacattctatgcaatatgtcaacaagactcctgccaccaggaacaggtgtgcgaggtaatagcctcgtatgcccacctatgtagaacaaacggagtctgcgttgattggcgaacaccggatttctgtgctatgagctgcccacccagtcttgtctataaccattgtgagcacgggtgccctagacattgcgatggtaacgtgagttcctgtggggatcaccccagcgaaggctgcttttgtccacctgacaaagttatgctcgaaggctcctgcgttccagaagaggcttgcacccagtgtatcggtgaggacggcgtccaacatcagttcctagaggcctgggtccccgatcaccaaccgtgtcagatttgcacttgcctttctggccgtaaagtgaactgtaccacacaaccatgtccgactgctaaggcgcctacctgtggtttgtgcgaggtggcacgcctgcgccaaaacgctgaccagtgctgccctgagtatgagtgtgtctgcgatcccgtcagttgcgacttgccccccgtgccccattgcgaacgcgggctgcaacctaccctcacgaaccccggtgaatgtaggcctaactttacttgtgcatgtcggaaggaagagtgcaagagggtctcccccccctcttgccccccacaccgactccccactctgcggaaaactcagtgttgtgacgagtacgaatgcgcatgtaattgcgtgaattctaccgtttcctgtccactcggatatctggcatctaccgctactaatgattgcggctgcaccaccaccacctgtttgccggataaagtgtgtgtgcaccggtcaacgatttaccccgttggacagttctgggaagaaggatgcgacgtttgcacctgtacggatatggaggatgctgttatgggcttgcgcgtcgctcaatgctcccaaaagccctgtgaagatagctgccgaagcgggttcacttacgtgttgcacgagggcgaatgttgtggccgctgcctaccttcagcctgtgaagtggtaacaggctccccgcggggggatagccagtcgtcttggaagagcgtgggaagccagtgggcttctccagaaaacccatgcttgattaacgaatgtgtgcgagtgaaggaagaagtgtttatccagcagcgcaacgtgagctgtccccagctagaggtccctgtctgtccctcgggctttcagcttagctgcaaaactagcgcctgttgcccgtcctgtcgatgcgagcgaatggaggcttgcatgttgaacggaactgtgattggtccaggcaagacagttatgatcgatgtttgtaccacgtgcagatgtatggtgcaggttggcgtaatttcaggtttcaagctggagtgtcgtaaaactacatgcaatccatgcccgttaggatacaaagaggagaataacaccggcgagtgctgcggaagatgtctccccacggcatgtaccattcagctgcgcggcggtcagatcatgacgctgaaaagagatgaaacgctccaggacggatgcgacacacacttctgcaaggttaacgaaagaggggagtatttttgggaaaagcgcgtgaccggctgccctccctttgatgagcataagtgtctagcagagggcggaaagattatgaagattccaggcacatgttgcgatacttgtgaggaaccagagtgcaacgacatcaccgcgcggctgcagtatgtgaaggtcgggtcctgcaagtcagaagtcgaggtggacatccattattgccaagggaagtgtgcttcaaaagccatgtacagcattgacattaatgatgtacaagaccaatgctcttgttgctcaccaaccagaactgagccaatgcaagtggccctccactgcacaaacggcagtgtggtctatcatgaggtgctcaacgccatggagtgcaaatgcagcccccgcaaatgcagtaaa

SEQ ID NO: 12486 - DNA, 8439 bp, Artificial Sequence
  derived and/or modified sequence
atgattccggctcggttcgccggagtgctcctggccctggctctgatcctgcctggcactctctgcgctgaaggaacccgcgggagaagctctaccgccaggtgctcactgttcggctccgattttgtgaacacgttcgacgggtctatgtattcattcgctggctactgcagctacctcctggccgggggatgtcagaagcgcagcttttccatcattggtgactttcagaatggaaagcgagtgtccctgagcgtctacctgggtgaattcttcgacattcacctgttcgtcaacggaacggtcacccagggcgaccagcgcgtgtcgatgccatacgccagcaaaggcctgtacctggaaaccgaggcgggctactacaaactgagcggcgaggcctacggattcgtcgccagaatcgatggatcggggaacttccaggtcttgctctcggatagatacttcaacaagacctgcggtctgtgcggcaactttaacatcttcgcggaggacgatttcatgactcaggaaggaactttgacctccgatccgtacgattttgcaaattcgtgggcactgtcaagcggagagcagtggtgcgaacgggcttccccaccgtcgtcaagctgtaacatcagctccggagagatgcagaagggactgtgggaacagtgtcagctgctcaagtccacctcggtctttgcccggtgccacccgctggtcgatcctgaaccgttcgtggcgctgtgcgaaaagaccctctgcgaatgcgcgggaggcctggagtgtgcgtgcccggccctcctggagtacgccagaacttgtgcgcaggaaggaatggtgctgtacggttggactgaccattcagcgtgctcgccggtgtgcccggccggaatggagtaccggcaatgcgtgagcccgtgcgcccgcacttgccagtcacttcatatcaatgagatgtgtcaagaacgctgcgtggacggttgctcgtgcccggaaggccagctgctcgatgagggcctgtgcgtggaatcaactgaatgtccgtgtgtgcactccgggaaacgatacccgccggggacgtccctgagccgggactgtaatacctgcatctgccggaacagccagtggatttgctcaaacgaggaatgtccgggggaatgcctggtgaccggacagtctcactttaagagctttgataacagatacttcacctttagcggaatctgccagtacctcctggcgcgggattgccaggaccacagcttcagcatcgttatcgagactgtgcagtgcgccgacgacagagatgcggtgtgcaccagaagcgtcactgtccggctgccgggactgcataactctctcgtgaagctgaaacatggagctggcgtggcaatggacggacaggatgtgcagttgccgctgctgaagggggacctcagaatccagcataccgtgaccgcttccgtgcgcctctcctacggagaggacctgcaaatggactgggacgggcgcggccggctgctggtgaaactctcgccggtctacgcaggaaagacctgtggactgtgcggaaactacaacggaaaccagggagacgactttctgactcctagcggactggctgagccaagagtggaggactttggaaacgcctggaagctccacggagattgccaggatctgcaaaagcagcactcggacccatgcgctctcaatccacgcatgactaggttctccgaagaggcttgtgcagtcttgacctcccctacctttgaggcctgccaccgcgctgtgtcgccgttgccgtacctcagaaattgccggtacgacgtctgttcctgctccgatggacgggaatgcttgtgcggagcactcgctagctacgcggccgcatgcgccgggagaggagtgcgtgttgcctggcgggaaccgggaagatgcgaactgaactgtcccaagggccaagtgtacctgcagtgcggcaccccgtgtaatctcacttgtagaagcctgagctacccagatgaagaatgcaacgaggcctgccttgaaggctgcttctgtccgcctggattgtacatggatgagaggggagactgtgttccgaaggcgcagtgcccttgctactacgatggagagatcttccagcctgaggacatcttttccgaccatcacaccatgtgctactgtgaggacggattcatgcattgcactatgtccggagtgcctggatcactgctgccggacgcggtcctgagctcgccactgtcccacagatcgaagaggtccctctcctgccggccgccaatggtcaagctggtgtgccccgccgacaatttgagagccgagggactggagtgcacgaaaacgtgccagaactacgacctggagtgcatgtctatgggttgcgtgagcggttgtttgtgcccgcctgggatggtgcgccacgagaaccggtgcgtcgctctggaaaggtgcccgtgtttccatcagggcaaagaatacgcgcctggtgagactgtaaagataggatgcaacacctgcgtgtgtcaggaccggaaatggaattgcactgatcacgtgtgtgacgccacttgttcgactatcggcatggcccactatctgacctttgacggactcaaatatctgtttccgggggagtgtcaatatgtgctggtgcaggattactgcggatcgaaccctggaacgttccgcatccttgtgggaaacaagggatgttcgcatccaagcgtcaaatgcaaaaagagagtcactatcctcgtggagggcggggaaatcgaactgttcgacggagaggtcaatgtgaagcggccaatgaaggatgaaactcattttgaggtggtggaaagtggacgatacattatcttgctcctcggtaaggcactgtctgtggtgtgggaccgccacctgtctatctcggtggtgctgaagcaaacctaccaggaaaaggtgtgtggcctttgcgggaactttgacggaatccaaaacaacgacctcactagctccaacctgcaggtggaagaagatccagtggattttggaaacagctggaaggtgtcatcacagtgcgctgatacccggaaggtgccgctcgactcatcaccggccacttgccacaataacattatgaagcagaccatggtcgactcgtcatgcaggatcctgacttcggacgtgtttcaggattgcaataagctggtggatccggaaccgtatttggacgtgtgtatctatgacacctgctcttgtgagtccattggggactgtgcatgcttctgcgacactatcgcggcgtacgcacatgtgtgcgcacagcacgggaaggtggtaacctggcggactgctaccctgtgccctcagagctgcgaggaaagaaacctccgggaaaacgggtacgagtgcgagtggcgctacaatagctgcgccccggcgtgccaggtcacctgccagcacccagagccgttggcgtgtccagtgcaatgcgttgaggggtgccatgcgcattgccccccaggaaagatcctggacgaactgcttcagacttgcgtcgatccagaggactgcccagtgtgtgaggtggccggccgtaggttcgcctccggtaaaaaggtaactctcaacccctcggaccctgaacactgccagatttgccactgtgacgtcgtgaacttgacctgtgaagcatgtcaagagccggggggcctggtggttccgccaactgatgcccctgtgtcgcccactactctctacgtcgaagatatcagcgaacctccgttgcacgacttttactgctcgagactccttgacttggtgtttctcctggatgggtcgtcgcggctgagcgaagctgaattcgaggtgctcaaggcatttgtggttgacatgatggaaagactgcggattagccaaaagtgggtgcgggtggctgtggtcgaataccacgacggatcgcacgcctacatcggcctgaaagatcggaagcgtcctagcgagctcagacgcatcgccagccaggtgaaatacgctggatcccaggtcgccagcacttccgaggtcctcaaatacaccctcttccagatcttttcaaaaatcgatcgcccagaggcatcgcggattaccctgctgctgatggcgtcccaggagccacaaagaatgtcgcggaacttcgtccgctacgtgcaggggcttaagaaaaagaaggtgatcgtgattcccgtgggaatcggccctcatgccaatctgaagcaaattaggctcatcgaaaaacaggcgcctgaaaacaaggctttcgtgctgtcatcggtggatgagctggagcagcagcgcgatgaaatcgtgagctacctttgtgacctggccccggaagcgccgccgcctactctgccgccagatatggcgcaggtgaccgtgggtcccggtttgctgggcgtgagcaccctgggaccgaagcggaacagcatggtgctggatgtggcgttcgtgttggaaggctcggataagatcggcgaagctgacttcaatcggtccaaggagttcatggaggaagtgatccaacgcatggatgtcggacaagactccatccacgtgactgtgctccagtacagctacatggttactgtggagtacccatttagcgaggcccaatctaagggtgatatcctccagcgcgtcagagaaatccggtaccagggagggaatagaactaatactggactggcgctccggtacctgtcagatcactcgttcttggtatcccaaggcgaccgcgaacaagcccctaaccttgtctacatggtgaccggaaatccagcgtccgacgagatcaagcgccttccaggagacatccaggtcgtcccgatcggggtcggaccaaacgctaacgtccaagagctggaacggatcggatggccaaatgccccaatcctcatccaggatttcgagactctgccgcgggaagcaccggatctcgtgcttcagcggtgttgctcaggggagggcctgcagatccccactctctctccggcgcccgattgctcccagccactggatgtgatcctcctgctggacggatcctcatcgttcccggccagctattttgacgagatgaaatccttcgcgaaagcatttatcagcaaggcgaacatcggacctagactcactcaagtgtccgtgctgcaatacggctcaattactactatcgacgtgccatggaacgtggtcccggagaaagcgcatttgctcagccttgtggatgtcatgcaacgcgagggtgggccttcgcaaattggagatgccctcggattcgccgtgcggtaccttacgtcggagatgcacggggcaaggcccggagcatccaaggcagtggtcatcctggtgacggacgtgtcagtggattcggtggatgccgcagcggacgcagctcgctcgaatagggtgacggtgttcccaatcggaatcggggatagatacgatgcggcacagctccgcattctcgctggcccagccggggactctaacgtggtgaagctgcagcggatcgaggacctgccgactatggtgaccctgggtaactcctttctgcataagctctgttccggcttcgtgcggatctgtatggacgaggatgggaacgagaagcgacccggcgatgtttggaccctgccggatcagtgccatacggtgacctgccagccggacggacagactctgctcaagtcgcatagagtgaactgcgatcgcgggcttagacctagctgtccgaacagccagtcgccagtgaaggtcgaagaaacctgtggatgccgatggacctgcccttgcgtgtgcactggaagctctactcgccacattgtcactttcgatggtcaaaactttaaactgaccggaagctgttcctacgtgcttttccagaacaaggagcaggatctggaagtgatcctgcacaacggggcctgcagcccgggagcccgtcagggatgcatgaagtccatcgaagtgaagcattccgccctttcagtcgaactgcactcggatatggaggtgaccgtcaacggaaggctcgtgagcgtgccctacgtcggaggaaacatggaagtgaacgtgtacggcgctatcatgcatgaagtgcggttcaaccatctggggcacatattcaccttcactccccagaacaacgaattccaactgcaactgtcgccgaaaaccttcgcttccaaaacttatggactttgcgggatctgcgacgagaatggagcgaacgatttcatgctgcgcgacggtactgtcaccactgattggaaaacgcttgtgcaagaatggaccgtccagcgcccgggccagacctgtcagcctatcctcgaagaacagtgcctcgtaccggactcgtcccactgccaggtgctgctccttccgctgttcgccgagtgccacaaggtcctggcgcccgccactttctacgccatttgccaacaggactcctgtcaccaggaacaagtttgtgaggtcatcgcatcgtatgctcacctgtgcagaactaacggtgtctgcgtcgactggcggactcccgatttttgcgccatgagctgccccccgagccttgtgtacaaccattgtgaacacggttgccctcgccactgcgacggaaacgtgtcgtcgtgcggggatcacccgtcggaaggatgcttctgcccccctgataaggtcatgctggaggggtcctgcgtgccggaagaggcgtgcactcagtgtatcggtgaagatggagtgcagcaccagttcctggaagcatgggtcccagaccatcaaccgtgccagatctgcacctgcctgtcgggccgcaaggtcaactgcaccactcaaccatgccccaccgccaaggccccaacctgcggtttgtgcgaagtggcccggttgaggcagaacgccgaccaatgctgcccagagtatgaatgcgtgtgcgacccagtctcatgcgacttgccaccggttccgcactgtgagcgggggttgcaaccaaccttgactaacccgggtgaatgccggccgaacttcacctgtgcgtgccgcaaggaggaatgcaagcgggttagcccaccgtcgtgccctccacatagattgccaacccttcgcaagacccaatgctgtgatgaatacgagtgtgcttgcaactgcgtgaactccactgtgagctgccctctgggttacctggcctcgactgcgactaatgactgcggatgcaccaccaccacttgtttgcctgacaaagtctgcgtgcaccgctcgactatctacccggtggggcaattctgggaagaaggttgcgatgtctgcacttgcactgacatggaagatgctgtgatgggcctgcgcgtggcccagtgcagccagaagccctgcgaagattcctgtagatccggattcacctacgtgctgcacgagggtgaatgctgcggacggtgcttgccttctgcatgcgaagtggtcactggctcgcctcgcggagattcacagtcatcctggaagtcggtcggatcacaatgggcatcccctgaaaacccatgcctcatcaatgaatgcgtgcgggtgaaggaagaagtgttcatccaacagcgcaacgtgtcatgcccgcaacttgaagtgccggtgtgtccttcgggattccaactgtcctgtaagacttccgcgtgttgtccgtcgtgccggtgcgagcgcatggaggcctgcatgctgaatggaaccgtcattggacccggcaaaaccgtgatgatcgatgtgtgcaccacctgccggtgcatggtgcaagtgggagtgattagcggattcaaactcgaatgtaggaaaacgacttgcaatccttgccccctcggatacaaggaggaaaacaacacgggagaatgctgcgggaggtgcctccctacggcctgtaccatccagttgcggggaggacaaatcatgacgctgaagcgcgacgaaaccctgcaagatggctgcgacactcacttttgcaaagtgaacgaacggggcgagtacttctgggagaaacgcgtgaccggttgcccaccgttcgacgaacataagtgtctggcagaaggcgggaagatcatgaagatccccgggacgtgctgcgacacctgtgaggagccggaatgtaacgatattactgcccgcctgcaatacgtcaaggtgggatcgtgcaagtccgaagtggaggtggacatccactactgccaaggaaagtgcgcctccaaagcaatgtactcgatcgacatcaatgacgtgcaggaccagtgctcgtgctgttctccgacccgcactgaaccgatgcaggtcgcgcttcattgcaccaacggaagcgtggtgtaccatgaggtgctgaacgcaatggaatgcaaatgttcaccgcgcaagtgctcgaag

SEQ ID NO: 12487 - DNA, 8439 bp, Artificial Sequence
  derived and/or modified sequence
atgattcctgctcgatttgcaggtgttttattagcacttgcattaattttaccaggaactttgtgtgcagaaggtacaagaggaagatcttctactgctagatgtagtttattcggttctgatttcgtaaacacatttgatggatctatgtattcatttgctggttattgctcttatcttttagctggaggttgtcaaaaaagatcattttcaattattggagattttcaaaatggaaaaagagtaagtctatctgtttatcttggagaattttttgacatacatctttttgttaacgggactgtcacacagggagatcaaagagtgtcaatgccatatgcatcaaagggactttatttggagactgaagcaggatattataaattaagtggagaagcatatggatttgttgctagaattgatggaagtggaaatttccaagttttactaagtgatagatattttaataaaacatgtggactttgtggaaattttaatatatttgccgaagatgactttatgacacaagaaggaactcttactagtgatccttatgactttgcaaatagttgggcccttagtagtggagaacaatggtgtgaaagagcttcaccaccaagttcttcatgtaatatttcatctggagaaatgcaaaaaggattgtgggaacaatgtcaattattaaaaagtacatcagtttttgcaagatgtcatccacttgttgatcctgaaccatttgttgcattatgtgaaaagacattatgtgaatgtgctggtggtttagaatgtgcatgtcctgctttattagaatatgcaagaacatgtgcacaagaagggatggtcctttatggatggacagatcattcagcttgttctccagtttgtccagctgggatggaatatagacaatgtgtttcaccatgtgcaagaacatgtcaatcattacacataaatgaaatgtgtcaagaaagatgtgttgatggatgttcttgtcctgaaggacaacttcttgatgaaggtttatgtgtggaatctacagaatgtccttgtgttcattcaggaaaaaggtatccaccaggaacttcattaagtcgtgattgtaatacatgtatatgtagaaattctcaatggatttgttctaatgaagaatgtccaggagaatgtcttgttactggacaatcacattttaaaagttttgacaatagatattttacattctcaggtatttgtcaatacttacttgctagagattgtcaagatcattctttctctattgtaatagaaactgttcaatgtgcagacgatagagacgcagtttgtactagatcagtcactgttaggttaccaggattacataattctttagttaaattgaaacatggtgcaggagttgctatggatggacaagatgttcaacttccacttcttaaaggtgatcttagaattcaacatacagttactgcttcagttcgactaagttatggagaagatttacaaatggattgggatggaagaggtagattactagttaaattatcgccagtatatgctggaaaaacatgtggactttgtggaaattataatggaaatcaaggagatgattttttaactccatcaggtcttgctgaaccaagagttgaagattttggtaatgcatggaaattacatggggattgtcaagatcttcaaaaacaacattcagatccatgcgcattaaatccaaggatgacaagatttagtgaagaagcatgtgcagtattaacatccccaacatttgaagcatgtcatagggcagtttcaccattaccttatttaagaaactgtagatatgatgtatgttcctgtagtgacggaagagaatgtttatgtggagcattagcttcatatgcagcagcatgtgcaggaagaggagttagagttgcttggagagaaccaggaagatgtgaacttaattgtccaaaaggacaagtttatcttcaatgtggaactccttgtaatttaacatgtagaagtttatcttatcctgatgaagaatgtaatgaagcttgtcttgaaggatgtttttgtccaccaggtttatatatggacgagagaggagattgtgttccaaaggctcaatgtccttgttattatgatggagaaatttttcaacctgaagatatttttagtgatcatcacactatgtgctattgtgaagatggattcatgcattgtactatgtccggagtaccaggatcattattaccagatgcagtacttagttcaccactttcacacagatctaaaaggtcattatcgtgtagacctccaatggttaaattagtatgtcctgcagataatttaagagctgaagggttggaatgcacaaaaacatgtcaaaattatgatttagagtgtatgtctatgggttgtgtttctggttgtttatgcccacctggtatggttagacatgagaatagatgtgtggctttagaaagatgtccatgttttcatcaaggaaaggaatatgcaccaggagaaactgttaaaataggatgtaatacttgtgtttgtcaagatagaaaatggaattgtacagatcatgtttgtgacgcaacttgtagtactatcggaatggctcattatttaacatttgatggtttaaaatatctttttccaggtgaatgtcaatatgtgttagttcaagattactgtggatcaaatcctggaacttttagaatacttgtcggaaataaaggatgttcacatcctagtgtaaaatgtaaaaaaagagtaacgattcttgttgaaggaggtgaaatcgaactttttgatggtgaagttaatgttaaaagaccaatgaaagatgaaacacattttgaagttgttgagtcaggtagatatattattcttttgttaggaaaagcacttagtgttgtatgggatagacatctttcaatatcagtagtattaaaacaaacatatcaggaaaaggtttgtggattatgtggaaattttgatggaattcaaaataatgatttaacttcatcaaatttgcaagtcgaagaagatccagttgattttggtaattcatggaaagtttcttctcaatgtgctgatactcgaaaagtgccattagatagttctcctgctacatgtcataataatataatgaaacaaactatggttgactctagttgtagaattttaacttctgacgtttttcaagattgtaataaacttgttgatcctgaaccatatctagatgtttgtatttatgacacatgttcatgtgaaagtattggtgattgcgcttgtttttgtgatactattgcagcatatgctcacgtttgtgcacaacatggaaaagttgtaacatggagaacagctactctttgtccacaaagttgtgaagaaagaaatttaagagaaaatgggtatgaatgtgaatggagatataattcttgtgctcctgcttgtcaagttacttgtcaacaccctgaacctttagcatgtccagttcaatgtgtagaaggatgtcatgcacattgcccaccaggtaaaattcttgatgaattattacaaacttgtgttgatccagaagattgtcctgtttgtgaagttgctggaagaagattcgcaagtggtaaaaaggttactttaaatccatcagatccagagcattgtcaaatttgtcattgtgatgtagtaaatcttacatgtgaagcatgtcaagaacctggaggattagttgttccaccaacagatgctccagttagtccaacaacactttatgttgaagatatttcagaaccaccactacatgatttttattgctcaagacttttagatcttgtatttttattggatggttcaagtagattgtcagaagcagaatttgaagttttaaaagcatttgtagtagacatgatggagcgattaagaattagtcaaaaatgggttagagtagcagtggttgaatatcatgatggttcacatgcatatataggattgaaagatcgaaagcgtccatctgaattaagaagaattgcttctcaagttaaatacgctggatcacaagtggcttctacatctgaagttttgaaatatacactttttcaaattttttctaaaatcgatagaccagaagcaagtagaattactttattacttatggctagtcaagaaccacaaagaatgtcacgtaattttgttagatatgtccaaggattaaaaaaaaaaaaagttattgtaatcccagttggtattggaccacatgctaacttaaaacaaattagacttattgaaaaacaagctccagaaaataaagctttcgttttaagttctgttgatgaacttgagcaacaaagagatgaaattgtatcatacctttgtgatttagcaccagaggcacctccaccaacacttccaccagatatggctcaagttactgttggtccaggattattaggagttagtacgttaggacctaaaagaaattctatggtattagatgtagcatttgttcttgaaggatctgataaaatcggtgaagctgactttaatagaagtaaggaatttatggaagaggttattcaaagaatggatgtaggtcaagattcaattcatgtcactgttttacaatattcatatatggtaacagttgagtaccctttttcagaagctcaatctaagggagatattttacaaagagttagagaaattagatatcaaggaggaaatcgaacaaatacaggattagcattaagatatttatctgatcactcatttcttgtttcacaaggggaccgtgaacaagctccaaatttggtttatatggtaactggtaatccagctagtgatgaaattaagcgtttaccaggagacattcaagtagttccaattggagttggaccaaatgcaaacgttcaagaattagaaaggattggatggccaaatgcaccaattcttatacaagattttgaaactcttccaagagaagcaccagatttagttcttcaaagatgttgctctggagaaggtttacaaatacctacattatcaccagctcctgattgtagtcaaccattagacgttatactacttttagatggttcatcatcatttccagctagttactttgatgaaatgaaatcttttgcaaaagcttttatatcaaaagcaaatataggtccaagacttacacaagtttcagtattgcaatatggttcaataactactatcgatgttccatggaatgttgtaccagaaaaggcacatcttctttctttagttgacgtaatgcaaagagaaggtggaccatcacaaattggagatgccttaggatttgcagttagatatttgacatcagaaatgcatggagcacgacctggagctagtaaggcagtagttattttagtaacagacgtatcagttgattcagtagatgcagctgcagatgctgctagatctaaccgtgttacagtttttccaattggaattggtgatagatatgatgcagctcaattaagaattcttgcaggacctgcaggtgattcaaatgtagttaaattacaaagaattgaagatttaccaactatggtaacattgggtaattcatttcttcataaattatgttctggtttcgttagaatttgtatggatgaagatggtaatgaaaagagaccaggtgacgtttggactttgcctgatcaatgtcatacagtaacttgtcaaccagatggtcaaacattattaaaaagtcatagagtgaattgtgatagaggattaagaccatcttgtccaaattcacaatcaccagtaaaagttgaggaaacttgtggatgtagatggacatgtccatgtgtttgtacgggatcatccacacgtcatattgttacatttgatggacaaaattttaaacttacagggtcatgttcatatgttttatttcaaaataaagaacaagatcttgaagttatattacataatggagcatgttctccaggagcaagacaaggatgcatgaaaagtattgaagtaaaacattctgctttatcagtggaattacatagtgatatggaagttacagtaaatggaagacttgttagtgtaccatacgtcggaggaaatatggaggttaatgtttacggggctattatgcacgaagttcgttttaatcatcttggacatatatttactttcacaccacaaaataatgaatttcaattacaattatcaccaaagacatttgctagtaagacttatggtctttgtggaatatgtgatgagaatggagcaaacgacttcatgttacgagatggaacagttacaactgattggaaaactcttgtgcaagaatggacagttcaaagaccaggtcaaacatgtcaaccaattttagaagaacaatgcttagtaccagattcaagtcattgtcaagttttattacttccactttttgcagaatgtcataaagtattagctccagctactttttatgcaatttgtcaacaagattcttgtcatcaagaacaagtatgtgaagtgattgctagttatgctcatttgtgtagaacaaatggagtttgtgttgattggagaacaccagatttctgtgctatgagttgtcctccaagtttagtgtataatcattgtgaacacggatgccctaggcattgtgatggaaatgtaagttcatgcggagatcatccttcagaaggatgtttttgtccaccagacaaagttatgttagaaggttcttgtgtaccagaagaagcatgtacacaatgtattggagaagatggggttcaacatcaatttttagaagcatgggttccagatcatcaaccatgtcaaatttgtacttgtctatcaggtagaaaggttaattgtactactcaaccatgtccaacagctaaagctccaacatgtggattgtgtgaagttgctagattacgtcaaaatgctgatcaatgttgtcctgaatatgaatgtgtatgtgatccagtatcgtgtgatttaccaccagttccacattgtgaacgaggattacaaccaactttgacaaatcctggagaatgtagaccaaattttacatgtgcttgtagaaaggaagaatgtaaaagagtcagtccaccaagttgtccaccacatagattaccaacacttagaaaaacacaatgttgtgacgaatatgaatgtgcatgtaattgtgttaatagtactgtttcatgtccattaggatatttagcaagtactgctaccaatgattgtggatgtacaactacaacatgtttaccagataaagtttgtgttcatagatcaactatatatccagttggacaattttgggaagaaggatgtgatgtttgtacatgtacagatatggaagatgctgttatgggtttaagggttgctcaatgtagtcaaaagccttgtgaagattcttgtagatcaggtttcacttatgttcttcatgaaggagaatgctgtggtagatgtttaccatctgcatgtgaagttgttacaggaagtccaagaggagatagtcaaagttcatggaagtcagttggttctcaatgggcaagtccagaaaatccttgtttaattaatgaatgtgttagagttaaagaggaagttttcatacaacaaagaaacgtttcatgtccacaattagaagttccagtatgtccatcaggttttcaactttcttgtaaaacaagcgcttgttgtccaagttgcagatgtgaaaggatggaagcttgtatgttaaatggtacagttattggtcctggaaaaacagttatgattgatgtttgtacaacttgtcgttgtatggttcaagtaggggtaatttcaggatttaagctagaatgccgaaaaacaacatgtaatccatgtccattaggatataaagaagaaaataatacaggtgaatgttgtggaaggtgtttacctacagcttgtacaattcaattaagaggaggacaaattatgacattaaagagagatgaaacgcttcaagatggatgtgatacacatttttgtaaagttaatgaaagaggagaatatttttgggaaaaaagagttactggatgcccaccatttgatgagcataagtgtttggctgaaggaggaaaaattatgaagatcccaggaacttgttgtgatacttgcgaagaaccagagtgtaatgatattacagcaagattacaatatgtcaaagttggttcatgtaaatcagaagttgaagttgatatacactattgtcaaggtaaatgtgcatcaaaggcaatgtactctattgacatcaacgatgttcaagaccaatgctcatgttgttctccaacaagaacagaaccaatgcaagttgcattacattgtacaaatggatcagttgtgtatcatgaagtacttaatgctatggaatgtaagtgttctccaaggaagtgttcaaaa

SEQ ID NO: 12488 - DNA, 8439 bp, Artificial Sequence
  derived and/or modified sequence
atgatccctgcacgatttgctggcgtgcttcttgcccttgcactgatccttccgggaactctctgtgctgaaggtaccagaggtcggtcgtcaaccgcacgatgtagcctctttggtagcgattttgtgaacaccttcgatggatccatgtacagcttcgcgggatactgcagctacctcctcgccggagggtgccagaagagatcctttagcattatcggtgacttccaaaacggtaagagggtcagcctcagcgtgtatctgggagagttttttgacattcatctcttcgtgaatgggaccgtgactcaaggtgatcagcgtgtgtcaatgccgtacgcatccaagggtctttacttggaaaccgaagcaggttactacaaactttctggagaagcctacggattcgttgcaagaattgatggctcgggcaactttcaagtgcttctgtcggatcgttactttaacaagacctgtggcttgtgtgggaacttcaacattttcgcagaagatgatttcatgacccaggaagggactctcacctcggatccctacgattttgccaactcatgggccctgtcctccggagaacagtggtgtgaaagggccagcccaccaagctcatcatgtaacatctcatccggagagatgcaaaagggcctttgggagcagtgtcagctgcttaagtcgaccagcgtgtttgcacggtgtcaccctctggtggatccagaaccatttgtcgccctttgtgaaaagactctctgtgaatgtgcaggaggccttgaatgtgcgtgccctgcacttcttgagtacgcccgcacgtgcgctcaggaaggaatggtcctgtacgggtggacggatcattccgcctgtagccctgtctgtccagccggaatggagtaccgtcagtgtgtgtccccatgtgcaagaacgtgtcaatccctccatatcaatgagatgtgccaagaaagatgtgtcgacggatgctcgtgcccggaagggcagctcttggatgagggattgtgcgtggaatcaaccgagtgcccttgtgttcatagcgggaagaggtatccgcctggaacctcactttccagagactgtaacacctgtatttgtaggaactcccaatggatctgctccaacgaagagtgtccaggtgaatgcctggttaccggtcaatcgcactttaagtcctttgacaatcgttacttcacttttagcggtatctgccagtacctgcttgcccgcgactgtcaggatcattctttttcaatagtgattgaaaccgttcagtgtgcggatgaccgcgacgcagtgtgtacgcgaagcgtgaccgtgagacttcctgggcttcacaatagccttgtgaaactcaagcatggtgcaggcgtggcaatggatgggcaggatgtccagctcccccttctgaaaggggatcttagaattcaacataccgtgactgcctcggtgaggctctcctacggagaagatctccagatggattgggatgggcgaggaaggcttctggtcaagctgtccccggtctacgcgggaaagacgtgcggactgtgcgggaactacaatggtaaccaaggggacgactttctgactccatcaggtcttgcagagcctagggtggaggatttcggaaacgcgtggaaactgcatggtgattgtcaggatcttcaaaagcagcactctgacccatgtgcgctcaaccctcgcatgactcgtttctcagaagaagcatgcgcagtgctgacctcgccaaccttcgaagcctgtcacagggccgtctcccccctgccctatctgagaaactgtcgctacgatgtctgcagctgttccgacggacgggaatgcctgtgtggagcgctcgcatcgtacgcagcagcatgtgcaggccgcggtgtccgagtggcatggcgtgaacccggcagatgtgagctgaattgtcctaagggccaagtctacctgcaatgtggaactccctgtaatcttacttgtaggtccctttcctacccggacgaggaatgtaacgaggcatgtctggaaggatgtttttgtccaccgggtctttacatggatgaacgaggagactgtgtgccaaaggcccagtgcccatgttactacgacggtgagatctttcaaccagaagatatcttttcagatcatcacactatgtgttactgtgaagatggatttatgcattgtaccatgagcggagtgcctggctcactgctgcctgatgcagtcctgtcatccccgctgtcccataggtccaaaagatctcttagctgccgccctccaatggtcaaactggtgtgtcccgcggacaaccttagggcagaagggcttgaatgcactaaaacttgtcaaaactacgatctggaatgtatgtcaatgggttgtgtgtcggggtgtctctgtccacctggaatggtgcggcatgagaatcgatgtgtcgcactggagcgatgtccatgttttcatcaaggtaaggaatacgctccaggcgaaaccgtcaagattggatgcaacacctgcgtgtgccaagacagaaagtggaactgcactgaccacgtctgcgatgctacttgttcaacgataggaatggcacattacctgactttcgatggactgaagtatctgtttccgggcgaatgccagtacgtgcttgtgcaagattactgtgggtcgaatcccggaacctttaggatactggtgggtaacaagggctgttcccacccatcggtgaaatgcaaaaagagagtcactatccttgttgaaggtggtgaaatcgaactctttgacggtgaagtgaatgtgaagcggcctatgaaggacgagactcattttgaagtggtggagtccggtcggtacataattcttctcctgggtaaagccctgagcgtggtgtgggaccggcatctgagcattagcgtcgtcctcaagcagacctaccaagaaaaggtttgtggtctgtgcgggaattttgacggaattcaaaacaatgaccttacgtcatccaatctccaagtcgaagaagatccggtggactttggtaactcgtggaaggtgtcaagccaatgcgcggatacgcgcaaggtgcctctcgattcctcccctgccacctgtcataacaacatcatgaagcaaactatggtggattcctcgtgtagaatcctcaccagcgacgtgtttcaagactgtaataagctcgtggacccagaaccgtacctggacgtgtgtatctacgatacgtgtagctgcgagtccataggtgattgcgcatgtttttgtgacactattgccgcatacgctcatgtgtgtgcgcagcacggaaaggtggtgacctggcgtaccgcaaccttgtgtccacaaagctgtgaagaacggaaccttagagagaacggatacgagtgtgagtggcgttacaactcttgtgcacctgcatgtcaagtcacctgccaacatccggaacctctcgcatgtccagtccaatgcgttgaaggatgtcacgcccattgtccacccggcaagatactcgacgagctgcttcaaacttgtgtcgatccagaagattgtccagtttgcgaggtggcggggagaaggttcgcttcgggtaagaaggtgactctcaatccatcagatccagagcattgtcagatctgtcattgtgacgtggtgaatctgacttgtgaagcctgtcaggagcccggaggtctggtggtcccacctaccgatgcacctgtgtcaccaaccaccctgtacgtggaggatatttcggagccacctctgcatgacttctactgttcacggctgcttgatctcgtgtttttgctggatggttcgtcgcgcctttctgaagctgaatttgaagttctcaaagcatttgtggtggacatgatggagcggttgcgcatttcgcagaagtgggtgcgggtcgcggtggtggagtaccatgatggttcgcatgcatacattggattgaaggatagaaaaagaccatcggaactgcggaggatcgcgtcgcaggtgaagtacgccggatcccaagtggcatccacttccgaggtgctgaaatacacgctctttcagatattctcgaaaattgatcgcccggaagcgtcccgcattaccctgcttctcatggcatcccaagaaccccaaagaatgtcccggaatttcgtcagatacgtgcaagggttgaaaaagaagaaggtgatagtcattccagtgggaattggtccacacgcaaacctcaagcagatccggctcattgaaaagcaagccccagagaataaggcattcgtccttagctccgtggatgaacttgaacaacagcgggacgagattgtgtcgtacctctgcgatctcgctccagaagcacctcctcccactcttccacctgacatggcgcaagtgactgtgggtccaggccttttgggcgtgtcgactctcggaccaaagcgtaattcgatggtgcttgacgtcgctttcgtgctcgaaggctccgataagatcggcgaagcagacttcaatagatcaaaagagttcatggaagaggtgatacagcgcatggatgtgggtcaagattccattcatgtgactgtcctgcagtactcgtacatggtgactgtcgaatacccttttagcgaagcgcaatcaaaaggagacattcttcagagggtgagagaaattaggtaccaaggaggaaatcgaaccaacactggcctggccctccgctacctgtccgaccactcgtttctggtgtcgcagggagatagggaacaagcacccaaccttgtctacatggtcacgggtaatcccgcgagcgatgagatcaaacgtctgccaggcgacatccaggtggtcccgataggtgtcggcccaaacgcaaatgtccaagaacttgaaaggatcgggtggcctaacgcgccaatattgattcaagactttgagactcttccacgggaagccccagatcttgtgttgcaaagatgttgcagcggggaggggctccaaattcctacgctgtcccctgcacctgattgttcgcagcctcttgatgtgattctcttgcttgatggaagctcgtcctttccagcatcctactttgatgagatgaagagctttgcaaaggcgttcatctcaaaggctaatatcgggccaagactgactcaggtgtcggtccttcagtacggcagcatcaccactatcgacgtcccctggaacgtcgtcccggaaaaggcgcatcttctgtcactggtggacgtgatgcaaagggaaggtggccctagccagatcggggatgcactggggttcgcggtgcggtacctgacttccgaaatgcatggtgcgaggccaggagcgtccaaggcagtcgtcattcttgtgaccgatgtgtcagtggattcggtggatgctgcggccgatgccgcaagatctaatcgagtgaccgtgtttccaattggcatcggcgacagatacgatgcagcgcagctgaggattctggccggaccagccggggactctaatgtcgtgaaactgcaacgtatcgaagatctgcctactatggtgactctgggaaacagcttccttcacaaactttgctcgggattcgtgcggatctgcatggacgaagatggtaacgaaaaaagaccgggagatgtgtggacccttcctgatcaatgtcatactgtgacttgccaacctgacgggcagaccctgcttaagtcacaccgagtgaattgcgatagagggctcagacctagctgtcctaacagccagtcgccagttaaggtggaagaaacctgcggttgtcgctggacttgcccctgtgtgtgcacggggtcctccactagacatatcgtcacttttgatggccagaactttaagctcactggaagctgttcgtatgtgttgtttcaaaacaaggagcaagatttggaggtgattctgcacaatggggcatgctcccctggtgcacgccagggatgtatgaagtccattgaagtcaaacattccgctctgtctgtggaacttcacagcgatatggaggttaccgtgaacggacgcctggtcagcgtgccttacgtgggcggaaacatggaagtgaacgtctacggggctatcatgcacgaagtgcgattcaatcaccttggacatatctttactttcactcctcagaacaacgagtttcagctgcaactgtcccctaaaaccttcgcttcaaagacctatgggctgtgtggaatttgcgatgaaaacggcgccaacgatttcatgctgagagatggaactgtgactacggattggaaaacgcttgtccaggaatggaccgtccagcgaccaggacagacgtgccagccgattctggaagagcagtgtcttgtgcctgacagctcgcactgtcaagtgctgctcctccctctgtttgccgaatgtcacaaagtgcttgcaccagcgaccttctacgcaatctgtcaacaagactcctgtcatcaagaacaagtgtgtgaagtgatagcaagctacgctcatctttgtcggaccaatggagtgtgcgtggattggagaacccccgatttttgtgcgatgtcctgccctccttcgttggtgtataaccactgtgagcatggctgccctcgacactgtgatggcaatgtttcgtcgtgcggcgaccatcctagcgaagggtgcttctgtccaccagacaaggtgatgcttgaaggtagctgcgtgcccgaagaggcatgtactcagtgcatcggtgaggatggagtccaacatcaatttcttgaggcttgggtgccagaccatcagccatgccaaatctgtacttgcctttccggacgcaaggtcaactgtactactcagccttgccctaccgcaaaggcccccacgtgtggactgtgcgaagtcgcgagactcaggcaaaacgcagaccagtgttgcccagagtacgagtgtgtctgcgatccggtgtcatgtgacctccctcctgtgccgcactgtgaacggggacttcagccaaccctgactaatccgggagagtgtcgacccaacttcacttgtgcatgtagaaaggaggagtgtaagagggtgagccccccttcctgtccaccccatagattgcctacgctgcgcaagacccagtgttgtgacgaatacgagtgtgcatgcaattgtgttaactccaccgtgtcttgcccgctgggttacctggcatctactgcaaccaacgattgtggctgcaccaccactacctgtctgcctgacaaagtctgcgtccaccgctcgactatctaccctgtcggacaattctgggaagaaggatgtgatgtgtgcacttgcaccgacatggaagatgcagtgatgggactgagggtcgcacaatgctcacagaagccttgcgaagattcctgtcggagcgggtttacttatgtgcttcacgagggtgaatgctgtggcaggtgtctgcctagcgcatgtgaagtggtgaccggcagcccgcgtggtgatagccagtcgagctggaagtccgtgggttcacagtgggcttcgccggaaaacccatgtcttatcaacgaatgcgtccgtgtcaaagaggaagtgtttatccaacaacgcaatgtgtcgtgcccccagcttgaagtgcccgtgtgtccgagcggctttcagctgtcgtgcaagacctccgcctgctgtccttcatgtagatgtgaaagaatggaggcatgtatgctcaacggtactgttattggtcccggaaagacggtgatgatagatgtctgtaccacgtgccgatgtatggtccaagtcggggtgattagcggattcaagctggagtgccgtaaaaccacttgtaacccttgtccactcggatacaaggaggaaaacaacacgggagagtgttgtggtcgatgcctccctaccgcgtgcaccattcaacttagaggaggccagataatgacccttaagagggatgaaactctgcaagacggatgtgacactcatttttgtaaagtcaacgagaggggcgaatacttttgggagaagcgtgtgaccggatgtcctccattcgatgaacataagtgtctcgctgagggagggaagattatgaagatccctgggacttgttgtgatacgtgtgaagagcctgaatgcaacgatatcacggccagactccaatatgtcaaagtcggtagctgcaagtccgaagtggaagttgacattcactactgccaagggaaatgtgcatcgaaggctatgtactcaattgacattaatgatgtgcaggatcaatgttcgtgctgttcgcccactcggactgaacctatgcaagtggcactccattgcaccaacggatcagtggtgtaccatgaagtccttaatgcaatggaatgcaaatgtagcccacgaaaatgctcgaag

SEQ ID NO: 12489 - DNA, 8439 bp, Artificial Sequence
  derived and/or modified sequence
atgatcccggccagatttgctggagtgcttctcgcgctggcgctgatcctgccagggaccctctgcgcagaaggaacccggggccgaagtagcactgccagatgctccctgttcggttcggacttcgtcaatactttcgacggatcaatgtattcgttcgctggctactgttcctacctcctggccggaggatgccagaagcgctccttctcgatcataggagacttccagaacggaaagcgcgtgtcactgagcgtctacctgggggaattcttcgacattcacctcttcgtgaacggcaccgtgacgcaaggcgaccagagagtgagcatgccgtacgcttccaagggcttgtatcttgaaactgaggctggatactacaaactgtccggagaagcgtacggatttgtggcccgcatcgacggcagcggcaactttcaggtcttgctgtcggacagatacttcaataagacgtgcgggttgtgcggaaatttcaatatctttgccgaggatgactttatgactcaggagggcactctgacgtccgacccatacgatttcgcaaactcctgggccctctcctccggtgaacagtggtgcgagcgcgcatcacccccttcatcatcgtgcaatatctcgtccggagaaatgcaaaaggggctctgggagcagtgccagctgctgaaatcaacctcagtgttcgccaggtgccatcctttggtcgatcccgagccattcgtggccctgtgcgaaaaaacgctctgtgagtgtgctggaggactcgagtgtgcttgcccagccctccttgaatacgcccggacgtgtgcccaggagggaatggtgctttacggctggaccgaccactcagcctgcagccctgtgtgtccggccggcatggagtaccggcagtgtgtgtccccgtgtgctcgaacttgccagagcttgcatatcaatgagatgtgccaggaacgctgtgttgacggatgcagctgccccgaaggccagctgctggatgaaggcctctgcgtggaatccactgaatgtccttgcgtgcattcggggaaacgttatcctccaggcacgtctctgtcacgggattgtaacacgtgtatctgcagaaattcacaatggatctgctcaaatgaagaatgccctggagagtgtctggtgaccggtcagtcgcatttcaagagctttgacaatcggtacttcactttctcgggtatctgccagtacctcttggccagggactgtcaggaccattcgttctcgatcgtgatcgagacggtgcagtgcgcagacgacagggatgcagtgtgcacccggtcagtgactgtgcggcttccgggactgcacaatagcttggtcaagctcaagcacggagccggcgtggccatggacggccaagacgtccagctgcccctgctcaagggcgacctgcggatccaacacactgtgaccgcgtcagtccggctgagctacggcgaagatctgcaaatggactgggacgggaggggacggcttctggtgaaattgagtcctgtctacgcgggaaagacctgtgggctgtgcggcaattacaacgggaatcagggagacgacttcctcaccccgtccggactggcggaaccgcgggtggaagatttcggaaatgcttggaagctgcacggcgattgtcaagaccttcaaaagcaacacagcgacccctgcgcgctgaatccgagaatgacccggttttccgaagaagcctgtgctgtgctcaccagcccaaccttcgaagcatgtcatcgggcagtgtcgccgctgccttaccttagaaactgccgctacgatgtttgctcgtgcagcgacggtcgcgagtgcctgtgcggagccctggctagctacgcggcggcatgcgccggccggggggttcgcgtcgcttggcgggaaccgggccgctgcgagttgaactgcccgaaaggccaggtttacctgcaatgcgggactccttgtaaccttacctgccggtcactgtcgtacccagacgaagaatgcaatgaggcctgtctggaaggatgcttctgcccgccgggactgtacatggacgagagaggggattgcgtgccaaaagcccagtgcccatgttactatgacggagagatcttccaaccagaggacatcttttcagaccatcacaccatgtgttactgcgaggacggattcatgcattgcacgatgtccggagtgccgggatcgctgctcccagacgcggtcctgagcagccccctgtcgcatagatccaaacgctcgttgtcgtgccgcccacctatggtcaaactcgtctgcccagcggacaatctgagagcagaaggactggaatgcaccaagacctgccaaaactacgacctggagtgtatgtccatgggatgcgtctccggctgcctctgcccgcctggtatggtcaggcatgaaaataggtgcgtcgctttggaacgctgcccatgcttccatcagggcaaagaatatgcaccgggggagactgtgaagatcggatgtaatacctgcgtatgccaggatcgtaagtggaactgcactgatcacgtgtgcgatgcgacctgctcgactatcggaatggctcactacttgaccttcgatgggctcaagtacttgtttccaggagaatgtcaatacgtcttggtgcaggattactgtgggtccaatccgggcaccttccggatcctcgtgggaaacaagggctgtagccatccctcagtgaagtgcaagaagcgggtcaccattctggttgaaggcggagaaatcgagctgttcgatggggaagtgaacgtgaaaaggccgatgaaagatgaaactcactttgaagtggtggagtcgggaaggtacatcatcctgctcctgggcaaagccctctcggtcgtgtgggacagacacctcagcatcagcgtcgtgctcaaacaaacttaccaagaaaaggtctgcggcctgtgtggtaactttgacggaatccagaacaatgatctgacctcctccaacttgcaagtcgaagaggatcctgtggatttcggcaactcctggaaggttagcagccaatgcgcggacactagaaaggtgccgctcgactcgagcccggctacgtgtcataacaacatcatgaagcagactatggtcgactcctcatgccgcatcctcaccagcgacgtgtttcaggattgtaataagttggtggatccggagccgtacctggatgtgtgcatttacgacacctgctcatgcgaaagcatcggagactgcgcgtgcttctgcgacactatcgccgcatacgcccacgtgtgcgcgcagcacggaaaggtcgtgacctggagaaccgcgaccctctgtccccaatcctgcgaagagaggaacctgcgggaaaatggatatgagtgtgagtggaggtacaacagctgcgcacctgcctgccaagtgacgtgccagcatccggaaccgctggcatgcccagttcagtgcgtggaaggatgtcacgctcactgcccccctgggaagatcctggacgagctgctgcagacttgcgtggacccggaagattgccctgtctgtgaggtcgccggaaggcggtttgcctccgggaagaaagtgaccctgaacccatcggacccggaacactgtcagatctgccattgtgatgtcgtgaatctgacctgcgaagcctgtcaagaacctggaggtctggtcgtgccgccgacggacgcgcctgtgtcaccgacgaccttgtacgtggaggatatcagcgaaccgccgctgcacgacttctattgtagtcgactgctggatttggtgttcctgctggacgggtccagccgactttcagaagcggagttcgaggtcctgaaggccttcgtagtggatatgatggaacggctgcgtatcagccagaagtgggtgcgggtggcggtggtggagtaccatgacggatcgcacgcttacatcggattgaaggacagaaagcgtccttctgagctgagacggatcgcctcgcaggtgaaatatgccggaagccaagtggcgtccacttcagaagtgctcaagtacactctgttccaaatcttttcaaagatcgacagaccggaggcttctcggatcaccctgctgctgatggctagtcaggaaccacagagaatgtcgaggaatttcgtgagatacgtgcagggactcaaaaagaagaaggtcatcgtcatccccgtcggtattggacctcacgccaatttgaagcagatccgcctgatcgagaaacaagctcccgagaataaagcatttgtgctgagctcggtcgacgagctggagcagcagcgggacgaaattgtgtcatacctctgcgatctcgctccggaagcaccgccgcctaccctgcccccagatatggcacaggtgaccgtggggccaggactgctcggcgtcagcactttgggaccaaagcgcaacagcatggttctcgacgtcgcgttcgttctggaaggatccgataagataggagaggcagactttaacagatccaaggaattcatggaagaagtgattcagcgcatggacgtcggccaggattcgatacacgtgactgtgttgcagtacagctatatggtcacggtggaataccctttcagcgaagcccagtccaagggcgacatcctgcaacgcgtgcgcgaaatccgctaccaaggggggaaccgaactaacactggacttgcactgagatacctgtcggaccactcgttcctcgtctctcagggcgaccgggaacaagctcccaatttggtctatatggtaactggaaatcctgcaagcgatgaaatcaaacggctcccgggagatattcaagtcgtgccgatcggagtggggccaaacgcgaacgtccaggaactggaaaggatcggttggcctaacgcccctatcctgatccaggacttcgaaaccctgccacgcgaagcaccagacctggtgctccagcggtgctgctcaggagaaggactgcagatcccgacgctgtctcctgccccagactgtagccagccgctggacgtcatcctcctcctcgacggaagctcatccttcccagcgagctacttcgacgaaatgaagtcgtttgccaaggctttcatttccaaggcaaacatcggtccccggttgacccaagtctcggtgctgcaatacggatcaatcactaccattgacgtgccgtggaatgtggtgccagaaaaggcgcacctgctgtcactggtggatgtcatgcaacgggaagggggcccaagccagattggggatgctcttgggttcgcagtccgatacctgacttccgagatgcacggagctcgcccgggagccagcaaggcggttgtgattctggtgacggacgtgagcgtggatagcgtcgatgccgcggccgatgctgcacgctcgaaccgggtgaccgtgttcccgatcggtattggagatcgctacgacgcggcacaactcagaatcctggcgggaccggccggcgacagcaatgtcgtcaaactgcaacgcatcgaagatctgccaactatggtcaccttgggcaactccttcctccacaagctgtgctcgggcttcgtgaggatttgtatggacgaggacggaaacgagaagcggcccggggacgtctggacccttccagatcagtgccataccgtgacttgccagccggacggtcaaacccttctgaagtcgcaccgggttaactgcgacagaggcctgaggccttcctgtccaaactcacagtcgccggtgaaagtggaagaaacctgtggctgtagatggacttgtccatgcgtgtgcactggatcgtctacccgccatattgtgactttcgacggccaaaactttaagctcactggctcctgctcatacgtgctgttccaaaacaaagagcaagatctggaagtgatcctgcataacggtgcctgctccccaggggcaagacagggttgcatgaagtccattgaggtaaaacactccgcgctgagcgtggagctccatagcgacatggaagtgaccgtgaatggcagactcgtgtcggtgccgtacgtgggaggcaatatggaggtgaatgtgtacggtgccatcatgcacgaggtccggttcaaccacctgggacacatattcaccttcaccccgcagaataatgaatttcagctccagctctcaccaaagactttcgccagcaagacttacggtctgtgcggaatctgcgatgagaatggcgctaacgacttcatgctcagggatggtactgtcaccacggactggaaaaccctggtgcaggaatggactgtgcagcggccgggacaaacttgccagcccatccttgaggaacaatgcctcgtgccagactcctcacactgccaggtgctcctgctgccactgttcgcggagtgccataaggtgctcgccccggccacgttctacgccatctgccagcaggattcgtgccatcaagaacaggtatgcgaagtgatcgcgtcttatgcacacctctgccgcaccaacggcgtttgcgtcgactggcggacgccagacttctgcgcgatgtcttgcccgccgtcccttgtgtataatcattgcgagcacggatgcccacgccactgcgatggaaacgtctcgtcatgcggcgaccaccccagcgagggttgtttctgccccccggataaagttatgctcgagggaagctgcgtgccagaagaggcttgcactcaatgcataggggaagatggggtccaacaccagtttctcgaggcctgggtcccggatcaccagccatgccaaatctgcacttgtctgtcgggaaggaaggtcaattgcactacccagccgtgtccgactgcaaaggcacctacttgcggcctgtgcgaagtggcacggctgcgccagaatgccgaccagtgctgcccagaatatgagtgtgtctgtgacccggtgagctgtgatctgccgccagtgccgcactgcgaaagggggctccagcccactctcaccaacccgggcgagtgtaggcctaacttcacctgtgcttgccgcaaagaggagtgcaagcgcgtctcaccaccatcctgcccgccgcaccgattgccgaccctccggaaaacgcagtgttgcgacgaatacgagtgcgcatgtaactgtgttaattcaaccgtgtcgtgcccactgggatacctggccagcaccgcgaccaacgattgcggatgcactacgaccacctgcctcccagataaggtgtgtgttcaccgctcaacgatctaccccgtcggacaattctgggaagagggatgcgatgtgtgcacctgcaccgatatggaggatgccgtgatgggactgcgcgtcgcacagtgcagccaaaagccgtgcgaggactcatgtaggtcaggattcacttacgtgctccacgagggtgaatgctgcggacggtgcctgccaagcgcgtgcgaagtggtgactggatccccgaggggcgactcgcagtcgagctggaagtcggtggggagccagtgggcatccccagagaacccatgcttgatcaacgagtgtgttagagtcaaggaagaagtgttcattcaacagcgcaacgtgtcgtgtccacagctggaagtcccggtctgtccgtccggattccaactctcctgcaagacttcagcctgctgccctagctgtcggtgcgagagaatggaggcatgcatgctcaacggaacggtgatcggcccaggcaagactgtcatgatcgatgtgtgtaccacctgccggtgcatggtgcaggtgggagtgatttccggattcaagctcgagtgccgcaagaccacgtgcaacccatgcccgctgggatacaaagaggagaacaacactggtgagtgctgtggtcggtgcctgccgaccgcctgcaccatccagcttagaggcggccaaatcatgacgctcaaacgagacgagacgctccaggacggctgcgacacccacttttgtaaagtgaacgagcgcggcgaatacttctgggaaaagcgcgtgaccggctgtccgccgttcgatgagcataaatgcctggctgaaggaggtaagattatgaaaatcccgggaacctgctgcgatacctgcgaagagccggaatgcaacgacatcaccgcccgcctgcaatacgtcaaagtgggtagttgcaaaagcgaggtggaggtggacattcactactgccaggggaagtgcgcttccaaagctatgtacagcatcgacatcaatgatgtgcaagaccaatgcagctgctgctcgccgacgcgcaccgagccgatgcaggtggccctgcactgtactaatggatccgtggtgtaccatgaggtcctcaacgccatggagtgcaaatgttccccgcgcaaatgctcgaaa

SEQ ID NO: 12490 - DNA, 8439 bp, Artificial Sequence
  derived and/or modified sequence
atgatccccgcaaggttcgctggcgtgctcctggcgctagcactaatcctccccggaaccttgtgcgcggagggaactcgtggcaggagctccaccgcacgatgttcgctattcggatctgacttcgtcaacactttcgatggatctatgtattctttcgctggctactgctcgtacctccttgccggcggttgtcagaagcgctcattttcgattataggagattttcaaaacggtaagagagtgagcctgtctgtctatcttggggaatttttcgatatccacttgtttgtgaatggaaccgtgacccaaggtgatcagcgcgtaagcatgccctacgcgagtaaaggcctgtacttggagactgaagcgggctattacaaactatccggagaggcgtacggttttgtcgcacggattgatggctccggcaatttccaggtcttgttatcggatcggtacttcaataaaacgtgcggcctatgtggtaactttaacatcttcgccgaggatgatttcatgactcaggagggcacactaacgtctgatccttacgacttcgccaactcatgggcattgtcctcaggtgagcagtggtgtgagcgagctagccccccgagctcgtcgtgtaacattagttcgggcgagatgcagaagggcttgtgggagcagtgccagcttcttaaatcgacgtccgtgtttgcacgttgtcatcctttggtggatccggaaccgttcgtggctctgtgcgaaaagacgttgtgcgagtgtgcagggggtttggagtgcgcctgccctgcgctcttagaatacgcccgaacctgtgctcaagagggtatggtcttatacggatggactgaccactctgcatgctccccagtctgcccagcaggaatggaataccgccagtgcgtcagtccctgtgctcgaacctgtcagtccttgcatatcaacgaaatgtgtcaagaacggtgcgttgatggttgcagctgtccggagggccaattacttgatgaaggattgtgtgtcgaaagcacagaatgcccttgtgtccactccggcaagaggtatcctcctgggacttcactaagccgggattgtaacacctgtatctgtcgcaactcgcagtggatctgttctaacgaggagtgtcctggggaatgtctagtaaccggccagagtcacttcaaatccttcgacaatcgttactttactttctccggtatatgccaatatctcctagccagagattgtcaggaccatagcttttcgatcgtgatcgaaaccgttcagtgcgcagacgatcgcgacgcagtctgtacgagatcagttacagtccgtctgcctggcctgcataacagcctggttaagctgaagcacggagcaggtgtggcaatggatggccaggatgtccagttacctctcctgaagggagacctgcggattcagcacacagttacagcttcagtccgcctgtcgtatggagaggacctacagatggattgggatggtaggggcaggcttcttgtcaagctgagccctgtgtatgccggtaagacgtgtggcctttgcggaaattataacggcaaccagggagatgacttcctcaccccctctggccttgccgagccgcgtgtggaagatttcggtaacgcatggaagttgcacggcgactgccaagacctgcaaaagcagcatagtgacccttgcgctcttaatcctaggatgactcgtttctcggaggaggcctgtgctgttctaacctcgccaacatttgaagcatgtcaccgggcggtctctccgctaccatacttgcgtaattgcaggtatgatgtatgctcttgttcagatggccgggagtgcctgtgtggtgcccttgcctcctacgcagctgcttgcgctggacgcggcgtgcgagtggcctggagggagccgggaaggtgtgaactcaactgtcctaagggacaggtctacctccagtgcggcaccccatgtaatctgacgtgccggtccctgtcttatccagacgaagagtgcaacgaggcctgtctcgagggatgcttttgtcccccgggtctctatatggacgaacgcggtgactgcgtcccaaaagcccagtgtccctgctattatgatggtgaaattttccagccggaggacatcttctctgaccatcatacaatgtgctattgtgaggacggatttatgcattgtactatgtccggcgtaccgggatccttgctacctgatgcggtccttagtagccctttatcgcatcgtagcaagcgttctctttcttgtcgaccccctatggttaagctggtctgcccagcagacaacttacgagcggagggtttggagtgtaccaagacctgccagaactacgacttggaatgtatgtcaatgggctgtgtgagcggctgtctgtgcccgccgggaatggtccgacacgaaaataggtgtgtggccctggaacgttgtccctgttttcaccaaggtaaggagtatgcacctggcgaaaccgtgaagatcggatgtaatacgtgtgtgtgtcaagaccgtaagtggaactgcaccgaccacgtttgcgatgccacttgttccaccatcggcatggcgcactacctaacattcgacggacttaagtacctctttccgggggaatgccagtatgtcctggtgcaagattactgtgggtccaatccaggcacttttcggattctagtcggcaacaaggggtgctcgcatccgtctgtaaagtgcaagaagagagtaacgattctcgtcgaaggtggggaaattgaactgtttgatggtgaggtcaacgtcaaacgccccatgaaggatgagacccattttgaagtcgtcgaaagtggcaggtatatcatactattgctcgggaaggccctctccgttgtgtgggatcggcatctaagcatcagtgtcgttctaaagcaaacatatcaggaaaaagtgtgtggcttatgcgggaactttgacggtattcagaacaatgatctgacttcttcaaacctccaagtagaggaggacccagttgactttggcaactcttggaaggtatcgagtcaatgtgcggataccaggaaagtgcccctggatagttcccccgccacgtgccacaacaatattatgaagcagaccatggtggattctagctgcaggatcttgacctccgatgttttccaggattgcaacaagctggttgatccggagccgtacctggatgtgtgtatatacgatacctgctcctgcgagtctattggtgattgcgcttgcttctgtgatacgattgccgcttatgcccacgtgtgcgcccaacacggcaaggtcgtgacgtggcgaacagccacactttgcccgcagagctgtgaggagcgcaatttgcgcgagaacggctatgagtgcgaatggcgttataattcgtgcgctcccgcatgccaggtcacgtgccaacatccggaacctctcgcatgtcccgttcaatgtgtagagggttgccatgcacattgccctcctggtaagatcctggacgagcttctacagacatgcgttgacccagaggactgccccgtctgcgaagtagccggtcgcagattcgcgtccggcaaaaaggtcactctgaatcctagtgacccagaacactgccaaatctgtcactgtgatgtggttaatctgacttgcgaggcatgccaagaacctggcggactggtggtgccacctacagacgcgccagtgagtcccacaacgttatatgtagaagatatttcggagccccctttgcacgacttttactgttcccggttgctagatcttgtattcctccttgacggttccagtcgattaagtgaggccgagttcgaggttctgaaagccttcgtcgtggacatgatggaaaggttacgaatttcccagaagtgggtcagagttgcagtcgttgagtaccatgatggttctcacgcttacattgggttaaaagacaggaagaggccctccgaattaaggcgaatcgcatcccaagttaaatacgcgggcagccaggttgcttctacatcggaggtactgaagtataccctttttcaaatcttcagtaagattgacaggccggaggcaagtcgaattactctactgttgatggcaagccaggagccgcaaagaatgagtcgcaacttcgtccgttacgtccaggggcttaagaagaagaaagtcattgtgatacctgtgggcatcggtccacacgccaatctgaaacaaattcgcctgatcgaaaagcaggcaccggagaacaaggcatttgtgttatcatcggtggatgagctcgagcagcaaagagacgagatcgtctcatatctctgcgatctagccccagaagctcctccacctactcttccacctgatatggcgcaagttaccgtcggaccgggtcttctcggcgtgagcaccttgggaccgaagaggaacagtatggtattagatgtggcgttcgttctggagggctccgacaagatcggtgaggctgacttcaacagatcgaaggagtttatggaggaagttatccaaaggatggatgttggccaagactcgatccatgtcacggtgctgcagtactcctatatggtgacggttgagtaccccttctccgaagcccagagcaaaggcgatattctgcagcgcgtgcgtgagattaggtatcagggtgggaaccgtacaaatacggggttggccctccgctatttgtcggatcacagcttcctagtttcacaaggcgatcgtgagcaggctcctaacttggtgtacatggtcaccggcaacccggcttcggacgaaattaaaaggctgcctggtgatatacaagtggttccaatcggggtcggtccaaacgctaatgttcaggaacttgagcgcataggctggcccaacgcgcctattttgattcaggatttcgaaacacttccacgggaagcgccagacctggtcctgcagaggtgttgctcaggcgaaggattacagattccaacgctgtctccagcgcctgattgtagccaacctctagacgtaattctacttcttgacggaagttcgtcttttcccgccagctacttcgacgaaatgaagagcttcgcgaaggctttcatcagtaaggctaatatcggccccagactgacccaggtgtcggtacttcagtacggctcgattacaacaattgacgtcccttggaatgttgtccctgaaaaggcgcatttgctaagccttgttgatgtcatgcagcgggaagggggccctagtcaaatcggagacgcacttggatttgcggtgcgttacctaacctctgagatgcacggagcccggcccggagcctcaaaggctgtcgttattctcgttactgatgtgagtgttgactccgttgatgcggcagctgatgctgcccggtccaaccgagtcactgtgtttcccatcggaatcggcgaccgatacgatgccgcacaattgaggattttggctggaccagcgggagattcgaatgttgttaagctccaacggattgaggacttgcctactatggtgactctgggtaactcgtttttgcataaactgtgttcaggcttcgttaggatctgcatggatgaggacggaaatgagaagagaccgggagatgtatggacactaccggaccaatgccataccgttacgtgccagcctgatggacagacgttgctgaaaagccatcgggtgaactgtgataggggattgcgccccagttgccctaatagccaatccccggtgaaagttgaagaaacatgtgggtgccgatggacctgtccctgtgtctgcacggggagcagtactcgacacattgtaacctttgatggacagaattttaagctgaccggatcgtgctcttatgtcctatttcagaataaggagcaggatctggaggtgatcttgcataatggggcctgctcaccgggcgcgcgtcaggggtgcatgaagtcgatcgaagtcaaacatagtgcgttgagcgtagaattacactcggatatggaggtaacggtaaacgggagattggtgtcggtcccgtacgtgggtggtaacatggaggtcaatgtttacggcgcgattatgcatgaagtgcgatttaaccatttggggcacatctttacatttacccctcagaataatgagtttcaactacaactttcgcccaagacttttgcttcaaagacatatggtctgtgtggaatctgtgatgaaaatggggcaaacgatttcatgttgagggacggcactgtcactacagactggaagacgttagtgcaggagtggacagttcagcggccgggacaaacctgtcagcctatccttgaggaacagtgtctagtacccgattcatctcattgtcaagtgctactgttgcctttgttcgctgaatgccataaagttctggctccggccacgttctacgcaatctgccagcaggattcttgccaccaggaacaagtctgtgaagttattgcctcatatgctcacctctgtcgcacaaacggcgtttgtgttgactggcgcacccctgatttttgtgcgatgtcttgccccccaagccttgtttacaaccactgtgaacatgggtgtcctcggcactgcgacggtaacgtcagttcttgtggggaccacccctccgagggttgtttttgcccgcccgacaaggtaatgctcgaagggagttgcgtgccggaggaggcatgtacccaatgcattggagaggatggagtccaacatcaattcctggaagcatgggttcccgaccaccagccatgtcagatttgtacttgcctaagcggccgtaaagttaattgcacaacccaaccttgccctacggccaaggcccccacatgcgggctctgtgaggtcgcacgacttcgccagaacgctgatcagtgctgtcccgaatacgaatgtgtgtgcgaccctgtatcatgtgatcttccgcctgtcccacattgcgaacgcggtctgcaacctacgctaactaatcctggcgaatgtcggccaaattttacatgtgcttgccggaaggaagagtgcaagcgggtgtccccaccatcctgccctcctcatagactacccacactgcgtaagacgcagtgctgcgacgaatacgaatgtgcttgcaactgcgtcaatagtacggtgagctgcccccttggttacctcgcctccacagctacgaacgactgcggttgcactacaaccacatgtttgccggataaggtctgcgtgcatcggtcgactatttaccctgtgggtcaattttgggaagaggggtgcgacgtatgcacctgtacagacatggaagacgctgtaatgggccttagagtggcacaatgcagtcaaaaaccatgtgaggattcatgtcgaagcgggttcacatacgtgttgcatgaaggcgaatgctgtggacgctgcttgccctctgcctgtgaggtcgtcactggatcgccacgcggcgacagccagtctagctggaaatctgtcggatcgcaatgggcttcccccgaaaatccgtgtttaatcaacgaatgtgttagggtgaaggaggaggtattcattcagcagcgcaacgtgtcgtgtccacaactggaggttcctgtttgtcccagtggatttcagctttcgtgcaagacaagcgcatgctgtccatcatgtaggtgcgagcggatggaagcgtgtatgttgaatggtacagttattggccctggcaagaccgttatgatcgacgtctgtactacgtgccgttgcatggttcaagttggtgtcatttcgggatttaaattggagtgccgtaagacaacttgtaacccatgccccctgggttacaaggaggagaataatacaggtgagtgctgtggccgctgcctgcccacggcttgcaccattcagctacggggcggacaaatcatgaccttgaagagagacgaaacactccaggacggatgcgacacgcatttctgcaaagttaatgagcgaggggagtacttctgggagaagcgagtcactggctgtcccccattcgacgagcacaaatgcttagccgagggaggaaagataatgaagataccggggacctgctgtgacacctgcgaggaaccagaatgtaatgatataacagcccgtctacagtacgttaaggtgggctcgtgcaagtccgaggtggaagtcgacatccactactgccaggggaagtgcgcatctaaggctatgtacagcatagacataaacgatgtgcaagatcaatgttcatgttgctcaccaactcggactgaaccgatgcaagttgcgttgcattgtactaacggatccgtcgtgtaccatgaggtgttaaacgccatggaatgcaagtgcagtccgcgcaagtgttcaaag

SEQ ID NO: 12491 - DNA, 8439 bp, Artificial Sequence
  derived and/or modified sequence
atgattccggccaggtttgcaggcgtgctgctggcacttgcactcatcttgccaggaactctctgtgcagaggggaccaggggtcgatcctccactgcacggtgtagcctgttcgggtcagatttcgtgaacacttttgacggttcgatgtactcgttcgcaggatactgcagctatctgctcgctggcggatgccagaaacgctcgttttccataatcggagactttcagaatggtaaaagggtgtcgctgtcggtgtacctcggcgagttttttgatattcacttgttcgtgaacggtacggtcacccagggcgatcaacgtgtgagcatgccatatgcctccaaaggactgtatctcgaaaccgaggcggggtactacaaactttcgggggaagcatacggatttgtggcccgtatagacggttccggcaactttcaggtgctcctttcagaccgctactttaacaagacctgtggcctctgcggtaatttcaacatctttgctgaggacgactttatgacccaggaaggaaccttgacctctgatccttacgactttgcaaactcctgggcactctccagcggtgagcagtggtgcgaacgggcaagcccaccctcatcgtcgtgtaatatctcgtcgggtgaaatgcaaaaaggattgtgggagcaatgccagctccttaagtccacgtcggtgtttgcccgatgtcatcctcttgtggatcctgagcctttcgtggcactttgtgaaaagaccctgtgtgaatgcgccggagggctggaatgtgcctgcccggcgctcctcgaatacgcgcgtacctgcgcacaagaagggatggtcctgtacggatggaccgatcactccgcatgctcgcccgtgtgtcctgccggcatggagtaccgccagtgcgtctcaccctgcgcacgtacttgtcagtcgctgcacattaacgaaatgtgtcaagaacgctgtgtggatggatgtagctgtcctgaaggtcaactcctggatgagggtttgtgcgtggaatccacggaatgtccctgcgtccatagcggtaagcgctaccctccaggtactagcctgtcgagagattgcaacacctgtatctgtaggaattcgcaatggatttgttccaatgaggaatgccctggtgaatgcctggtgaccgggcagagccactttaagtcatttgataaccgatactttaccttctccggcatatgtcaataccttctggctagagactgtcaggatcactcattctccattgtgatcgagacggtgcaatgtgccgatgatcgggatgcagtttgtactcgctccgtcaccgtgagactccccggccttcataatagtctcgtgaagctgaagcatggagcgggagtcgcaatggatgggcaggatgtgcagctgcccctgctgaagggtgaccttcgaatccaacatactgtgacggcctcagtgcgactgagctacggcgaggatttgcaaatggattgggatggaagaggacggctgctggtcaaacttagcccagtgtacgcaggaaaaacctgtggactttgcggaaattacaacggcaaccaaggggatgatttcctcaccccaagcggccttgcagagccaagagtggaagatttcggtaacgcttggaagctccatggagattgccaagaccttcagaaacagcattccgacccatgcgcgctgaatccccggatgacccggtttagcgaagaagcctgtgcagtgctgacctccccaacgtttgaggcctgtcaccgtgctgtgagccctctcccctaccttcgcaattgtagatacgacgtttgtagctgctcggacggacgggagtgtctttgcggagcactggcgtcgtacgcagcagcctgtgccggcagaggagtgcgggtcgcgtggagagagcccggacgatgtgaactgaattgtccaaagggccaagtctacctgcagtgcggaacgccttgcaacctgacctgtagatccctgtcctaccctgacgaggaatgtaacgaggcatgtttggagggttgtttttgtcctccaggactctatatggacgaacgcggtgactgtgtgcccaaagctcaatgcccttgttactacgatggtgagatattccagccagaggacatcttttccgatcaccataccatgtgctactgtgaggacggttttatgcattgtaccatgtccggcgtgcctggctcccttctcccagacgcagttttgtcgtccccactctctcacaggagcaagagatcccttagttgccgtccccccatggtgaagctggtgtgccccgcggataacctgcgagccgaaggtcttgaatgtactaagacctgccagaactacgatctggagtgtatgtccatgggctgtgtgagcggatgcctgtgtcctcctggtatggtccggcatgagaatagatgcgtcgcacttgaaagatgtccgtgctttcatcagggtaaagaatatgctcctggagaaaccgttaagattggctgcaatacctgtgtgtgtcaagatagaaaatggaactgtactgatcacgtgtgtgatgcaacctgttccaccatcgggatggcacattacctgaccttcgatgggcttaagtacctcttccctggtgagtgtcaatacgtcctggtgcaggactattgtggatcaaacccaggtacttttcgtatccttgtgggaaataagggttgcagccatccatcagtaaaatgtaagaagagggtcaccatcctcgtggaaggaggagagattgagctgtttgatggggaagtcaacgtgaaaagacctatgaaggacgaaacgcactttgaagtggtggagtcgggtcggtacattatcttgcttctcgggaaggccctttccgtggtgtgggatcgacatctgagcatttccgtcgtccttaagcagacctatcaggaaaaagtgtgtggtttgtgcggcaacttcgatggtattcagaataacgatctgacctcgtctaatcttcaagtggaagaggacccagtggatttcggaaactcctggaaagtttcatcccagtgcgcagacacccggaaggtgccccttgatagcagcccagccacctgccacaacaacatcatgaagcagaccatggtggattcctcatgtagaattctgacctcggatgtgtttcaggattgtaataagctcgttgatcccgaaccttatcttgacgtttgcatctacgatacttgctcatgcgagtcgattggagattgtgcatgcttttgcgataccattgcagcatacgcacatgtgtgtgcgcaacatggcaaagtggtcacctggaggactgccactctctgccctcaatcgtgtgaagagagaaatctgcgcgaaaatggctacgaatgtgaatggcgatacaactcgtgcgcccctgcttgtcaggtcacctgtcaacaccctgagcctctggcatgtcccgtccagtgtgtggaagggtgtcatgcgcattgtccacctggtaagattctggatgagcttcttcaaacctgtgtggaccccgaagattgtcctgtgtgcgaggtggcaggacgccgatttgcatcgggaaagaaggtcactctgaacccatctgatcccgaacattgtcaaatctgtcattgtgatgtcgttaacctcacttgtgaagcctgtcaagaacctggtggtttggtggtgcctcctaccgatgctccagtgtcgccaactaccctctacgtggaggacatctcggaaccaccactccatgatttctactgttctcgcctcctcgacttggtgttcctcctggatggatcatctcggctgtcggaggccgaattcgaagtcctgaaagcatttgtggtggatatgatggagcggttgcgcatttcgcagaaatgggtgagggtggctgtggtcgaataccacgatggatcccatgcatacattgggcttaaggaccggaagcgcccgtccgaactgagaagaatcgcatcgcaagtgaagtacgccgggtcacaggtggcgagcactagcgaagtgcttaagtacaccctgtttcagatctttagcaagatagaccggcctgaagcatctcgcattactctcctgcttatggcctcacaagaaccacaaagaatgtcgagaaactttgtgcgatacgtgcagggccttaagaaaaagaaggtgattgtcattccagtgggtattggtcctcatgcaaacctcaagcaaattaggctgatcgaaaagcaagcaccagagaataaggccttcgtcctgtccagcgtggacgagctggaacaacagcgtgacgaaattgtctcctacctgtgcgacctggcacctgaagcgcctccgccaaccctccctcccgatatggcacaggtgacggtgggccctggactccttggggtgtcaactctgggtcctaagagaaactcgatggtgctggatgttgcatttgtcctggagggatcggacaagattggagaagctgactttaacagatccaaggaattcatggaggaggtgatccagcgaatggatgtggggcaagacagcatacatgtgaccgtgctgcaatactcgtatatggtcaccgtggaatacccattttcggaggcacaaagcaaaggagatattctgcagagagtgcgcgagattaggtaccaaggaggtaacaggactaataccggcctcgcactgaggtacctttccgaccacagcttccttgtgtcgcaaggagatagggagcaagcacctaacctggtctacatggttaccgggaaccctgcttctgatgagattaagagacttcccggcgacattcaagtggtgcctattggagtgggtccaaacgcgaatgtgcaggaacttgagcgcattggctggcctaatgcacccattctcatccaagatttcgaaacccttcctagggaggccccggatttggtccttcaaagatgttgctcgggagaaggactccaaatcccaactctctccccagcacccgactgttcccaaccgcttgatgtcattttgctgcttgacggcagctcatccttccctgccagctactttgatgaaatgaagagcttcgcgaaggcattcatatcgaaggccaacatcggtccacggctgacgcaggtgagcgtccttcagtacggttcaatcactactatcgatgtgccatggaacgtggtgcccgaaaaggcccatctcctctcgttggtcgatgtgatgcaacgggagggcggaccctcgcagatcggcgacgctttgggattcgccgtgagataccttacttcagagatgcatggagcacggccaggagcgtcgaaggccgtggtaattcttgtgactgatgtgtcggtggactccgttgatgcagcagcagatgccgcaaggtcaaatagagtgactgtgtttccaatcggaattggcgaccggtacgatgccgcgcagcttcgtatcctggcaggacctgccggagattcgaatgtggtcaaactccaacgtatagaggatctgcccaccatggtgaccctgggaaactcgtttcttcataagctctgctcgggattcgtcaggatttgtatggacgaggacggtaacgaaaaaagaccaggtgacgtgtggaccctccctgaccaatgtcacaccgtgacttgccaaccagatggacagaccttgctgaaatcccatcgcgtcaattgtgaccgcggtcttaggccatcatgtcctaattcgcaatcccctgtgaaggtggaggaaacttgcggttgcagatggacctgtccttgtgtgtgtactggtagctctacccgacatatcgtgactttcgatgggcagaactttaaacttacgggctcctgtagctacgtgctttttcaaaacaaggaacaggacttggaagtcattctgcataacggcgcatgttcaccaggagctagacaaggctgtatgaagagcatcgaagtgaaacacagcgcacttagcgtcgaacttcattcagatatggaagtcacggtcaatggtcggctcgtgagcgtgccctacgtgggtggaaacatggaagtgaatgtctacggagcaattatgcacgaagtccgctttaatcatcttggacatatcttcacctttacgccacaaaacaatgaatttcagcttcagctgtctcctaaaacttttgcatcaaagacgtacgggctgtgtggtatctgtgatgaaaacggggcaaacgactttatgctccgggatggtaccgtgaccaccgactggaaaacgctcgtccaggaatggactgtgcaaagacccggacaaacctgtcagccgattctcgaagagcaatgccttgtgccggattcctcccactgtcaggtccttctgctgcccctgtttgctgagtgccataaggtgctcgcgccagccactttctatgcgatttgtcaacaggactcatgccaccaggaacaggtctgtgaagtcatagcatcatacgcgcatctgtgtcgcaccaatggtgtgtgtgtcgattggcggacccctgatttctgtgctatgtcgtgtcctccctccctcgtgtacaaccattgcgaacatgggtgccccaggcattgtgacggaaatgtttcgtcctgtggggaccatccatccgaagggtgtttctgtccacctgacaaggtgatgctcgaaggatcctgcgttcctgaggaagcgtgcacccagtgtattggagaggacggggtgcaacatcaatttctggaagcgtgggtgcccgaccatcagccgtgtcaaatctgcacttgcctttccggtcgtaaagtgaactgtaccacccagccttgtcccaccgcaaaggcacctacttgtggactgtgtgaggttgcacgtctgaggcaaaacgccgaccagtgttgccctgagtatgaatgtgtctgtgatccagtgtcgtgtgatcttcctcctgtcccacattgtgagagaggacttcaacccaccctcacgaacccgggtgaatgtcgcccaaactttacctgtgcatgcaggaaagaagaatgtaagagagtgagccccccttcatgtccaccccacagacttcctaccctgcgcaagacccaatgctgcgacgagtatgagtgtgcatgcaattgcgtgaattcaactgtgtcctgccctctgggataccttgcttcaactgcaactaacgattgtggctgcactactaccacctgcctgcccgacaaggtttgtgtccatagatcaacgatttaccccgtgggccaattctgggaagaaggatgtgacgtgtgtacttgtacggatatggaggatgcagtcatgggtcttagagtcgcacaatgttcacagaagccttgtgaagattcatgtagatccggttttacttacgtcctgcatgagggagaatgctgtggaagatgtctcccatcagcttgtgaagtggtgactggctcacccagaggagacagccaatctagctggaagtcagttgggagtcagtgggcttcgcccgaaaacccctgtctgatcaacgaatgtgtgcgagttaaggaggaagtgtttattcaacagcggaatgtcagctgtccgcaattggaagtgccagtgtgtccatcgggcttccaactctcctgcaaaacttcggcctgttgccctagctgtcgctgtgaaagaatggaggcttgcatgctgaacggtaccgtcatcggacccggaaagaccgtgatgattgatgtgtgtacgacttgtcggtgtatggtccaggtgggggtgatttcggggtttaagttggagtgtcggaaaacgacttgtaatccatgcccactggggtacaaggaggagaacaataccggggagtgctgtggccgctgtctccctaccgcttgtaccattcagctgagaggtggtcagataatgacgctgaagcgcgatgaaactctgcaggatggatgcgacacccacttctgtaaggtgaatgagagaggcgagtacttttgggaaaagagagtaactggatgtcctccattcgacgaacataagtgtctggcggaaggtgggaagattatgaagatccctggcacctgttgtgatacctgtgaggaacctgaatgcaacgatatcacggccagactccagtacgtgaaagtcggatcgtgcaagtcggaagtggaggtcgatattcactactgccaaggaaagtgtgcctccaaggccatgtattccatcgacattaacgacgtgcaggatcagtgtagctgttgttcacctacccgcactgaaccaatgcaagtggcactccattgtaccaatggcagcgtggtgtaccacgaggtgttgaacgctatggaatgcaagtgcagccctcgaaaatgttccaaa

SEQ ID NO: 12492 - DNA, 8439 bp, Artificial Sequence
  derived and/or modified sequence
atgataccggcgcgatttgcgggtgttttactagcgttagcgttaatattaccgggtacgttatgtgcggaaggtacgcgaggtcgttcgtcgacggcgcgttgttcgttatttggttcggattttgttaatacgtttgatggttcgatgtattcgtttgcgggttattgttcgtatttactagcgggtggttgtcaaaaacgatcgttttcgataataggtgattttcaaaatggtaaacgtgtatcgctatcggtatatttaggtgaattttttgatatacatctatttgtaaatggtacggttacgcaaggtgatcaacgtgtatcgatgccgtatgcgtcgaaaggtttatatttagaaacggaagcgggttattataaattatcgggtgaagcgtatggttttgttgcgcgtatagatggttcgggtaattttcaagttttattatcggatcgatattttaataaaacgtgtggtttatgtggtaattttaatatatttgcggaagatgattttatgacgcaagaaggtacgctaacgtcggatccgtatgattttgcgaattcgtgggcgttatcgtcgggtgaacaatggtgtgaacgagcgtcgccgccgtcgtcgtcgtgtaatatatcgtcgggtgaaatgcaaaaaggtctatgggaacaatgtcaattactaaaatcgacgtcggtatttgcgcgatgtcatccgttagtagatccggaaccgtttgttgcgttatgtgaaaaaacgctatgtgaatgtgcgggtggtctagaatgtgcgtgtccggcgttattagaatatgcgcgtacgtgtgcgcaagaaggtatggttctatatggttggacggatcattcggcgtgttcgccggtttgtccggcgggtatggaatatcgtcaatgtgtatcgccgtgtgcgcgaacgtgtcaatcgctacatataaatgaaatgtgtcaagaacgatgtgttgatggttgttcgtgtccggaaggtcaattattagatgaaggtctatgtgttgaatcgacggaatgtccgtgtgtacattcgggtaaacgttatccgccgggtacgtcgttatcgcgagattgtaatacgtgtatatgtcgaaattcgcaatggatatgttcgaatgaagaatgtccgggtgaatgtttagtaacgggtcaatcgcattttaaatcgtttgataatcgttattttacgttttcgggtatatgtcaatatttactagcgcgtgattgtcaagatcattcgttttcgatagttatagaaacggttcaatgtgcggatgatcgagatgcggtatgtacgcgttcggtaacggtacgtttaccgggtctacataattcgctagttaaactaaaacatggtgcgggtgtagcgatggatggtcaagatgtacaactaccgctattaaaaggtgatttacgtatacaacatacggtaacggcgtcggttcgtctatcgtatggtgaagatctacaaatggattgggatggtcgtggtcgtctattagtaaaactatcgccggtatatgcgggtaaaacgtgtggtctatgtggtaattataatggtaatcaaggtgatgattttttaacgccgtcgggtttagcggaaccgcgtgttgaagattttggtaatgcgtggaaactacatggtgattgtcaagatttacaaaaacaacattcggatccgtgtgcgttaaatccgcgtatgacgcgattttcggaagaagcgtgtgcggtattaacgtcgccgacgtttgaagcgtgtcatcgtgcggtatcgccgttaccgtatctacgtaattgtcgttatgatgtatgttcgtgttcggatggtcgagaatgtttatgtggtgcgctagcgtcgtatgcggcggcgtgtgcgggtcgtggtgttcgagtagcgtggcgagaaccgggtcgatgtgaattaaattgtccgaaaggtcaagtttatctacaatgtggtacgccgtgtaatttaacgtgtcgatcgctatcgtatccggatgaagaatgtaatgaagcgtgtttagaaggttgtttttgtccgccgggtctatatatggatgaacgtggtgattgtgtaccgaaagcgcaatgtccgtgttattatgatggtgaaatatttcaaccggaagatatattttcggatcatcatacgatgtgttattgtgaagatggttttatgcattgtacgatgtcgggtgtaccgggttcgttactaccggatgcggttctatcgtcgccgctatcgcatcgatcgaaacgttcgttatcgtgtcgaccgccgatggttaaactagtttgtccggcggataatctacgagcggaaggtttagaatgtacgaaaacgtgtcaaaattatgatctagaatgtatgtcgatgggttgtgtatcgggttgtttatgtccgccgggtatggtacgacatgaaaatcgatgtgttgcgttagaacgttgtccgtgttttcatcaaggtaaagaatatgcgccgggtgaaacggtaaaaataggttgtaatacgtgtgtttgtcaagatcgaaaatggaattgtacggatcatgtatgtgatgcgacgtgttcgacgataggtatggcgcattatttaacgtttgatggtctaaaatatttatttccgggtgaatgtcaatatgttctagtacaagattattgtggttcgaatccgggtacgtttcgtatattagtaggtaataaaggttgttcgcatccgtcggtaaaatgtaaaaaacgtgttacgatattagtagaaggtggtgaaatagaattatttgatggtgaagttaatgtaaaacgtccgatgaaagatgaaacgcattttgaagttgtagaatcgggtcgatatataatattactactaggtaaagcgttatcggttgtatgggatcgtcatctatcgatatcggttgttttaaaacaaacgtatcaagaaaaagtttgtggtttatgtggtaattttgatggtatacaaaataatgatttaacgtcgtcgaatctacaagtagaagaagatccggtagattttggtaattcgtggaaagtatcgtcgcaatgtgcggatacgcgtaaagtaccgttagattcgtcgccggcgacgtgtcataataatataatgaaacaaacgatggtagattcgtcgtgtcgtatattaacgtcggatgtatttcaagattgtaataaattagtagatccggaaccgtatctagatgtatgtatatatgatacgtgttcgtgtgaatcgataggtgattgtgcgtgtttttgtgatacgatagcggcgtatgcgcatgtttgtgcgcaacatggtaaagttgttacgtggcgtacggcgacgctatgtccgcaatcgtgtgaagaacgaaatttacgagaaaatggttatgaatgtgaatggcgttataattcgtgtgcgccggcgtgtcaagttacgtgtcaacatccggaaccgttagcgtgtccggtacaatgtgttgaaggttgtcatgcgcattgtccgccgggtaaaatactagatgaactattacaaacgtgtgtagatccggaagattgtccggtttgtgaagtagcgggtcgtcgatttgcgtcgggtaaaaaagtaacgttaaatccgtcggatccggaacattgtcaaatatgtcattgtgatgtagtaaatttaacgtgtgaagcgtgtcaagaaccgggtggtctagtagttccgccgacggatgcgccggtatcgccgacgacgttatatgttgaagatatatcggaaccgccgttacatgatttttattgttcgcgtttactagatttagtatttctactagatggttcgtcgcgtttatcggaagcggaatttgaagttctaaaagcgtttgttgtagatatgatggaacgtctacgtatatcgcaaaaatgggtacgagtagcggtagtagaatatcatgatggttcgcatgcgtatataggtttaaaagatcgtaaacgaccgtcggaactacgtcgtatagcgtcgcaagtaaaatatgcgggttcgcaagtagcgtcgacgtcggaagtattaaaatatacgttatttcaaatattttcgaaaatagatcgtccggaagcgtcgcgtataacgctactactaatggcgtcgcaagaaccgcaacgtatgtcgcgaaattttgttcgatatgtacaaggtttaaaaaaaaaaaaagttatagtaataccggtaggtataggtccgcatgcgaatctaaaacaaatacgtctaatagaaaaacaagcgccggaaaataaagcgtttgtactatcgtcggtagatgaactagaacaacaacgtgatgaaatagtatcgtatctatgtgatttagcgccggaagcgccgccgccgacgctaccgccggatatggcgcaagtaacggtaggtccgggtttattaggtgtttcgacgctaggtccgaaacgaaattcgatggttttagatgtagcgtttgttttagaaggttcggataaaataggtgaagcggattttaatcgttcgaaagaatttatggaagaagtaatacaacgtatggatgttggtcaagattcgatacatgtaacggttttacaatattcgtatatggtaacggtagaatatccgttttcggaagcgcaatcgaaaggtgatatattacaacgtgttcgtgaaatacgatatcaaggtggtaatcgaacgaatacgggtttagcgctacgttatttatcggatcattcgtttttagtttcgcaaggtgatcgtgaacaagcgccgaatttagtatatatggtaacgggtaatccggcgtcggatgaaataaaacgtctaccgggtgatatacaagttgtaccgataggtgttggtccgaatgcgaatgtacaagaactagaacgtataggttggccgaatgcgccgatattaatacaagattttgaaacgttaccgcgtgaagcgccggatctagtactacaacgttgttgttcgggtgaaggtctacaaataccgacgctatcgccggcgccggattgttcgcaaccgttagatgtaatactattactagatggttcgtcgtcgtttccggcgtcgtattttgatgaaatgaaatcgtttgcgaaagcgtttatatcgaaagcgaatataggtccgcgtttaacgcaagtatcggtattacaatatggttcgataacgacgatagatgtaccgtggaatgttgtaccggaaaaagcgcatttattatcgttagtagatgttatgcaacgtgaaggtggtccgtcgcaaataggtgatgcgctaggttttgcggtacgttatctaacgtcggaaatgcatggtgcgcgtccgggtgcgtcgaaagcggttgtaatattagttacggatgtttcggtagattcggttgatgcggcggcggatgcggcgcgttcgaatcgagtaacggtatttccgataggtataggtgatcgttatgatgcggcgcaactacgtatattagcgggtccggcgggtgattcgaatgtagtaaaattacaacgtatagaagatttaccgacgatggttacgttaggtaattcgtttttacataaattatgttcgggttttgttcgaatatgtatggatgaagatggtaatgaaaaacgaccgggtgatgtatggacgttaccggatcaatgtcatacggttacgtgtcaaccggatggtcaaacgctattaaaatcgcatcgtgtaaattgtgatcgaggtttacgaccgtcgtgtccgaattcgcaatcgccggtaaaagtagaagaaacgtgtggttgtcgttggacgtgtccgtgtgtttgtacgggttcgtcgacgcgacatatagtaacgtttgatggtcaaaattttaaactaacgggttcgtgttcgtatgttttatttcaaaataaagaacaagatctagaagtaatactacataatggtgcgtgttcgccgggtgcgcgtcaaggttgtatgaaatcgatagaagtaaaacattcggcgctatcggtagaactacattcggatatggaagtaacggttaatggtcgtttagtatcggtaccgtatgtaggtggtaatatggaagtaaatgtttatggtgcgataatgcatgaagttcgatttaatcatttaggtcatatatttacgtttacgccgcaaaataatgaatttcaactacaactatcgccgaaaacgtttgcgtcgaaaacgtatggtctatgtggtatatgtgatgaaaatggtgcgaatgattttatgctacgtgatggtacggtaacgacggattggaaaacgttagttcaagaatggacggtacaacgaccgggtcaaacgtgtcaaccgatattagaagaacaatgtctagtaccggattcgtcgcattgtcaagtattactattaccgctatttgcggaatgtcataaagtactagcgccggcgacgttttatgcgatatgtcaacaagattcgtgtcatcaagaacaagtttgtgaagtaatagcgtcgtatgcgcatctatgtcgtacgaatggtgtatgtgtagattggcgtacgccggatttttgtgcgatgtcgtgtccgccgtcgttagtttataatcattgtgaacatggttgtccgcgacattgtgatggtaatgtatcgtcgtgtggtgatcatccgtcggaaggttgtttttgtccgccggataaagtaatgttagaaggttcgtgtgtaccggaagaagcgtgtacgcaatgtataggtgaagatggtgttcaacatcaatttttagaagcgtgggttccggatcatcaaccgtgtcaaatatgtacgtgtctatcgggtcgaaaagttaattgtacgacgcaaccgtgtccgacggcgaaagcgccgacgtgtggtctatgtgaagttgcgcgattacgacaaaatgcggatcaatgttgtccggaatatgaatgtgtatgtgatccggtatcgtgtgatctaccgccggtaccgcattgtgaacgaggtttacaaccgacgctaacgaatccgggtgaatgtcgaccgaattttacgtgtgcgtgtcgtaaagaagaatgtaaacgtgtttcgccgccgtcgtgtccgccgcatcgtctaccgacgctacgtaaaacgcaatgttgtgatgaatatgaatgtgcgtgtaattgtgttaattcgacggtatcgtgtccgctaggttatttagcgtcgacggcgacgaatgattgtggttgtacgacgacgacgtgtttaccggataaagtatgtgtacatcgatcgacgatatatccggtaggtcaattttgggaagaaggttgtgatgtatgtacgtgtacggatatggaagatgcggttatgggtttacgtgttgcgcaatgttcgcaaaaaccgtgtgaagattcgtgtcgttcgggttttacgtatgttctacatgaaggtgaatgttgtggtcgatgtctaccgtcggcgtgtgaagttgttacgggttcgccgcgaggtgattcgcaatcgtcgtggaaatcggtaggttcgcaatgggcgtcgccggaaaatccgtgtttaataaatgaatgtgtacgtgtaaaagaagaagtttttatacaacaacgtaatgtatcgtgtccgcaattagaagtaccggtatgtccgtcgggttttcaattatcgtgtaaaacgtcggcgtgttgtccgtcgtgtcgttgtgaacgaatggaagcgtgtatgttaaatggtacggtaataggtccgggtaaaacggttatgatagatgtttgtacgacgtgtcgttgtatggttcaagtaggtgttatatcgggttttaaattagaatgtcgaaaaacgacgtgtaatccgtgtccgttaggttataaagaagaaaataatacgggtgaatgttgtggtcgttgtttaccgacggcgtgtacgatacaattacgaggtggtcaaataatgacgctaaaacgagatgaaacgttacaagatggttgtgatacgcatttttgtaaagtaaatgaacgaggtgaatatttttgggaaaaacgtgttacgggttgtccgccgtttgatgaacataaatgtttagcggaaggtggtaaaataatgaaaataccgggtacgtgttgtgatacgtgtgaagaaccggaatgtaatgatataacggcgcgtttacaatatgtaaaagttggttcgtgtaaatcggaagttgaagtagatatacattattgtcaaggtaaatgtgcgtcgaaagcgatgtattcgatagatataaatgatgtacaagatcaatgttcgtgttgttcgccgacgcgtacggaaccgatgcaagtagcgttacattgtacgaatggttcggtagtatatcatgaagttttaaatgcgatggaatgtaaatgttcgccgcgtaaatgttcgaaa

SEQ ID NO: 12493 - DNA, 8439 bp, Artificial Sequence
  derived and/or modified sequence
atgatcccagctcggttcgcaggagtgctgcttgccctggcactcatcttgccagggacgctgtgcgcggaaggaacccgcggacgcagctcaacggccaggtgttcattgttcggatcagactttgtgaacaccttcgatgggtccatgtattcattcgccggctactgttcatacctgctcgccgggggatgccagaagagatccttttcaatcatcggcgacttccaaaatgggaaacgcgtgtcgctgtcagtgtacctcggtgaattctttgacattcatctcttcgtcaacggaaccgtgacccagggagatcaacgggtttcaatgccatacgcttccaagggcctttacctggagactgaggctggatactacaagctgagtggagaagcgtacgggttcgtcgcgcgcattgatggatcgggaaatttccaagtgctgctctcagaccgctatttcaataagacctgtggactgtgtggaaactttaacatcttcgccgaagacgatttcatgacgcaagagggaaccctcacttcagatccgtacgactttgccaactcctgggcactgagctcgggagaacaatggtgtgagcgggcaagcccgccttcgagctcgtgtaacatctcttcgggagaaatgcaaaagggcctctgggaacagtgtcaattgcttaagagcacttcggtcttcgcccgatgccatcctctcgtggatccggagccctttgtcgcgctgtgcgagaagacgttgtgtgaatgcgctggtggactggagtgtgcatgtcctgcgcttctggagtacgcccgtacttgcgctcaggaggggatggtgctctacggctggactgaccattcggcctgctcgccagtgtgtccggctggcatggaatatcgacagtgcgtcagcccgtgtgctcgcacgtgccaatcattgcacatcaacgagatgtgccaggagcggtgcgtcgacggatgctcctgtccagaaggacagctcctggatgaaggactgtgcgtggaatcaactgaatgcccatgtgtgcactcaggcaagcggtacccccctggaaccagcctctcgagagactgcaatacttgtatctgtcgcaactcgcagtggatttgttcgaatgaagaatgcccaggggagtgtcttgtcaccggacaatcgcatttcaagtccttcgataaccgctattttacgttctccggaatctgccagtacctcctggctcgcgactgtcaggatcactcattctccattgtgatcgaaaccgtgcaatgcgcggacgatcgggatgcagtgtgcaccaggtcagtgactgtgcgacttcccggcctgcataactcgctggtgaagctgaaacatggtgcgggcgtggcaatggacggacaggatgtgcagctgccactcctgaagggggaccttcgcatccaacataccgtgaccgcatccgtccgcctctcctacggcgaagacctccagatggactgggatggaagaggacgcttgttggtgaagctgtcgccggtgtacgccggcaagacttgtggattgtgcggtaactacaacggcaatcagggggatgattttctcaccccgagcgggctcgcggagccgcgggtcgaggactttggaaatgcatggaaactccacggagactgtcaagatcttcagaagcagcatagcgatccgtgcgccctgaaccctcgaatgaccaggttctccgaagaggcctgcgccgtcctgacttccccgaccttcgaagcctgtcaccgtgccgtctccccgctgccttacctgagaaattgcagatatgatgtctgttcttgctccgatggccgcgaatgcctgtgcggcgccctggctagctacgcggctgcgtgcgcgggacgcggagtgcgggtagcctggcgcgagcccggtcgatgcgagctgaactgcccgaaggggcaggtgtacctgcagtgcggaactccttgtaatctgacctgtcggtcactctcataccccgatgaggagtgcaatgaggcatgccttgaggggtgcttttgcccgccgggcctctacatggacgaacgcggagactgcgtgccaaaagcccagtgcccgtgctactacgacggtgagattttccagccagaggacatcttctcggaccaccacaccatgtgctactgtgaggatggattcatgcactgcactatgtcgggggtgccaggatcgttgctgccggatgcggtcttgtcatccccgctgtcccaccggagcaagagatcgctgtcttgtcggcctcccatggtgaagttggtctgcccagcggataacctgcgggccgaaggactcgaatgcaccaagacctgccaaaactacgacctggaatgcatgtcaatgggatgcgtcagcggctgcctgtgtccccctggaatggtgcgccatgaaaatcgctgcgtggcactcgagcggtgcccatgcttccatcagggaaaagaatacgcgccaggagaaaccgtgaaaatcggctgtaatacctgtgtgtgccaggatagaaaatggaattgcaccgaccacgtgtgcgacgcgacgtgctcgaccattggaatggcccattacctgactttcgacggactgaaataccttttccccggtgagtgccagtatgtcctcgtccaagactactgcggctcaaatccgggcaccttcaggatcctggtcggaaacaagggatgctcccacccgtccgtcaaatgcaagaagcgcgtcaccatactggtggaaggcggtgagatcgaactcttcgatggggaggtgaacgtgaagcggcctatgaaggacgaaacccacttcgaagttgtggagagcggacgttatatcatcctgctgctgggaaaggcgctgtcagtggtgtgggaccgccacctgtccatcagcgtggtcctgaagcagacttaccaggaaaaagtgtgtggactgtgcggcaacttcgacggaatccaaaacaacgatcttacttcttcgaacttgcaagtggaggaagaccctgtggactttggcaattcgtggaaggtgtccagtcaatgcgcagacactaggaaagtcccgttggacagctcgcctgcaacctgtcacaacaacatcatgaagcagaccatggtggactcgtcctgtcggatacttacctcggatgtctttcaggattgcaacaagctggtggacccagaaccatacctcgacgtgtgtatttacgacacctgctcatgtgagtcgatcggagattgtgcttgtttctgcgacactatcgcggcctacgcccacgtgtgcgctcaacacggaaaggtcgtcacttggaggactgccaccctgtgccctcaaagctgcgaggaacgtaacttgcgcgagaacggatacgaatgcgaatggcggtacaacagctgtgccccggcgtgccaggtgacctgtcagcaccctgaacctctcgcctgccccgtgcagtgcgtggaaggatgccacgcccactgcccgcccggaaaaatcctggacgaattgctccagacgtgcgtcgacccagaagattgcccggtctgtgaagtggctggaaggagattcgcctccggtaagaaggtgactctgaacccatccgacccagagcactgccagatctgccactgtgacgtcgtgaacttgacctgtgaggcctgccaggaaccggggggcttggtggttccgccgactgatgcgccggtgtcaccaactactctgtacgtggaggatatcagcgaaccaccactccatgatttttactgttcccggctgttggatctcgtctttctgcttgatgggagctcccggctctctgaagctgaatttgaggtgttgaaagcattcgtggtcgacatgatggagcgcctgcggattagccaaaaatgggtccgggtcgccgtcgtcgagtatcacgatggaagccatgcttacataggcctgaaagatcggaagcgtccatccgaactgagacggatcgcctcgcaagtgaagtacgctggctcgcaagttgcctccacgagcgaggttctcaagtacactctttttcagattttttctaaaattgatcgcccggaggcttcgagaatcaccctcctgctgatggcctcccaggagccacagcggatgagcaggaacttcgtgcgctacgtgcaggggctgaagaaaaagaaagttatcgtgatccctgtgggaatcggtccgcatgcgaaccttaagcaaatcagactcatcgaaaagcaggcgccggagaataaggcttttgtgctttcgtccgtcgacgagctggaacaacagagagatgaaatcgtgtcgtacctgtgcgacctggcgccagaagccccaccgcctactctgcctccggacatggcacaggttactgtgggaccaggactgctgggagtgagcaccctcggaccgaagaggaattccatggtgttggacgtcgccttcgtgctggaaggttcggacaagatcggagaagctgacttcaatagatcaaaggagttcatggaggaggtcatccagcgcatggacgtgggacaagactccatccatgtgaccgtgctgcagtactcctatatggtgacggtggaataccccttctcagaggcacagtcaaagggagacattctgcagcgggtgcgcgagatccgataccagggaggcaaccgcactaatactgggctggcactccggtacctcagcgaccactcgttcctggtgtcacagggcgatcgggagcaggcgccaaacctcgtttacatggtcaccggcaacccggccagcgatgagattaagagactgcccggtgacatccaagtcgtgccaatcggagtcggaccgaacgctaacgtccaggaattggaacgcataggatggccaaacgctccaatcttgatccaggattttgaaactctcccacgagaagcacctgacctcgtgctccagcgctgctgcagcggagagggactccagattccgaccctgagcccggcccctgactgctctcagcctctcgacgtcatcttgctgctcgatggctcatccagttttccagcgtcctactttgatgaaatgaaatccttcgcaaaggcctttatctcgaaggccaatattggtccgagactgacccaggtgtccgtgctccagtatggatcgatcaccaccatcgatgtgccttggaatgtggttcctgagaaggctcatctcctgagtctggtcgacgtgatgcagcgcgagggtggaccgtcacaaatcggagacgcgcttggtttcgctgtccgctacttgacttcagaaatgcacggtgcacgcccgggcgcatcgaaggcggtcgttattctggtgaccgacgtttcagtggactcggtcgatgctgccgccgatgcggcgagaagcaatcgcgtgactgtgttcccgatcggaatcggggatagatacgacgccgctcagctgagaatcctcgctggacctgccggcgattcaaacgtcgtgaagctgcaacgaatcgaagacctgccgactatggtcactctgggaaactccttcctgcacaagctgtgctcaggtttcgtgcgcatctgcatggatgaagacggaaatgaaaagcggccgggcgatgtgtggaccctgccggatcagtgtcacactgtcacgtgccagcctgacggtcaaactttgctcaaatcgcatcgggtaaattgcgatcggggtctgcggccgtcctgcccgaactcccagagcccggtgaaagtggaagaaacctgcggctgccgctggacgtgtccgtgcgtttgcactggctcatctactcggcacatcgtgaccttcgatggtcaaaatttcaagctcactggaagctgctcgtacgtgctgttccagaacaaagaacaggacctggaagtgatcctccacaacggtgcttgctcacctggtgcccgccagggctgcatgaagtcgatcgaggtcaaacatagtgcactctcagtcgaactgcattctgatatggaagtgaccgtcaacggacggctggtgtccgtgccatacgtgggaggcaacatggaggtgaatgtgtacggggctatcatgcacgaagtcaggttcaatcaccttggacatattttcacgttcactcctcagaacaatgaattccagctgcagctctcgcctaagacttttgcgtcgaaaacttacggcctctgcggaatctgcgatgaaaacggagcgaacgactttatgcttcgggacggtactgtgaccactgactggaagacgctggtccaggaatggaccgtccagcgcccggggcagacctgccaacccatccttgaagagcaatgtctggtgccagactcttcacactgccaagtcctcctgctcccgctcttcgccgagtgccataaggtcttggcgccggctactttctacgctatctgccagcaggattcgtgtcaccaggagcaagtgtgcgaggtgatcgcctcatacgctcatctgtgccgcaccaacggagtgtgcgtggactggcggactcctgacttctgcgcgatgagctgccctccgtctcttgtttacaatcactgcgaacacgggtgcccgagacattgcgacggcaatgtgtcatcgtgcggcgatcacccgtcagaggggtgtttctgccctccagataaggttatgctcgaaggctcatgcgtcccagaggaagcctgcactcaatgcatcggcgaggacggagtgcaacaccagttcttggaagcctgggtcccggaccaccaaccgtgccaaatctgcacgtgtctcagcggacgcaaggtcaactgcactacccagccgtgcccgactgccaaagcccctacctgcgggctgtgcgaggttgcaagactgaggcaaaacgcggatcagtgctgcccggaatacgaatgtgtgtgtgatcccgtgagctgcgacctgccgcctgtcccgcactgcgagcgcggtctgcaaccgactttgaccaatccgggtgagtgtcgacctaatttcacctgcgcgtgcaggaaagaagaatgtaaaagggtgtcgccgccatcgtgcccaccacacaggctgccgactctgcggaagacccaatgctgcgacgaatacgagtgcgcctgtaactgcgtgaactccacggtttcgtgccctctgggatacttggcgagcactgcaaccaacgattgcggatgcaccactactacttgcctgccggacaaggtgtgcgtgcacagatcaactatctatcctgtgggccaattttgggaggaaggatgcgatgtgtgcacctgtactgacatggaggatgcagtgatgggactgcgggtcgctcagtgctctcaaaagccgtgtgaggactcctgcaggtcggggttcacctacgtgcttcatgagggggaatgttgcggcaggtgtttgccatcagcttgcgaagtggtcacgggctcgccgcggggtgacagccaatcatcttggaagtccgtcggttcccagtgggcctcccctgaaaatccatgtctcatcaatgaatgtgtccgggtcaaggaagaagtgtttatccagcagagaaacgtgtcctgtccccaacttgaggtcccggtttgcccaagcggattccaactctcgtgcaaaaccagcgcctgctgcccatcctgtcgctgcgagagaatggaggcctgtatgctgaatggtactgtgattggtccaggaaaaaccgtgatgatagacgtgtgcaccacgtgtcggtgcatggtacaggtcggtgtgatctcggggttcaaacttgagtgccgcaagaccacctgcaacccctgcccgctgggatacaaagaagagaataataccggggagtgctgcggcagatgcttgccaacggcgtgcaccatccagctgcgcggcggccaaatcatgacgctgaagcgggacgagactttgcaggacggatgcgacactcacttctgcaaggtgaacgaacggggtgagtacttctgggaaaagagggtcactggatgtccgcccttcgacgaacataagtgcttggctgaaggcggaaagataatgaaaattcctggcacctgctgcgacacttgcgaagaaccggagtgcaacgacatcactgctcggctccagtacgtgaaggtcggaagctgtaaatctgaagtcgaagtggacatccattactgccaaggcaagtgcgcttccaaggccatgtactccatcgacatcaacgacgtgcaagatcagtgctcatgctgtagccctactcggactgaacctatgcaggtggcactgcattgcactaacggatcggtggtttaccatgaagttctgaacgccatggagtgcaaatgcagcccgaggaagtgctctaag

SEQ ID NO: 12494 - DNA, 8439 bp, Artificial Sequence
  derived and/or modified sequence
atgatcccggccaggttcgcgggggtgctgctggctctggccctcattctgcctggaaccctctgcgctgaaggcacccgaggcagatcatctacggctagatgttctcttttcggcagcgatttcgttaatacattcgatgggtccatgtactcttttgctggatattgttcgtacctgctagccgggggctgccagaagcgcagtttttccatcataggcgatttccagaatggaaaaagagtctcactctcagtatatctaggggagttctttgatatccacctattcgtcaacggcacagtcacccaaggtgaccagagggttagtatgccctacgcatcaaagggtctgtaccttgagacagaggccggatactacaaattgtctggggaggcgtatggcttcgtggcacggattgacggaagcggaaatttccaggtgctcttgagcgaccggtattttaataagacgtgcggactgtgcggaaacttcaacatttttgcagaagatgactttatgacacaggagggcacgttaacgtcagatccgtacgacttcgctaactcctgggcgctgtccagcggggaacaatggtgtgagcgggccagccccccaagctcttcctgcaacatttcaagtggagagatgcagaaaggcctctgggagcagtgccagctcttgaagtcaacatctgtctttgcccggtgccacccattagtggaccccgagccgttcgtggctctctgtgaaaagacattatgtgagtgtgcaggtggtctcgagtgcgcctgtccagccctcttggaatacgcgagaacatgcgcacaggaaggtatggttctctacggctggacagatcacagtgcctgtagccccgtgtgccctgctggaatggagtaccgacagtgcgtctcgccctgtgccaggacgtgtcagtccctgcatataaatgaaatgtgccaagaacggtgtgtcgatggctgctcatgccctgagggccagctgttagatgagggattgtgcgtcgaaagcacagagtgtccctgtgtgcacagtggcaagagatatccaccaggaacctccctttctagagattgtaacacttgcatttgccggaatagccagtggatatgttctaacgaggaatgccccggggagtgccttgtgactggacagagccatttcaaatcctttgataatcggtacttcacgttctccggaatatgtcagtacttactggcgagagactgccaggatcatagcttttcgattgtcatagaaaccgtgcagtgtgcagatgatagggacgcggtttgtactaggagtgtaactgttcgtctgcctggattacacaactccctggttaagctgaaacacggggccggagttgccatggatgggcaggatgtgcagttaccactccttaagggggacctgcggattcagcacacggtgacggcaagcgtacgcttgagttacggtgaagatctccaaatggactgggatggcaggggcagacttctggtcaaattatccccagtgtacgcaggcaagacatgtggactatgcggcaattacaatggaaatcagggcgatgactttctgacgccctccggactggctgagcctcgagttgaggactttggcaatgcttggaagctgcacggtgactgccaggatttgcagaagcagcatagtgacccatgcgctcttaacccccggatgacacgcttttccgaggaagcgtgtgcggtgctgacgtcacccacatttgaggcttgccaccgggcagtgagcccattgccctatctgcgtaactgcaggtacgatgtttgctcctgcagcgacgggcgcgagtgcctttgtggcgctctcgcctcctacgccgctgcatgtgctggccgtggagtgagggtggcttggagagagccaggccgctgtgagttaaactgcccgaaaggacaggtttatcttcagtgtggaaccccatgtaacctgacttgtcgatcactgtcctacccggatgaggagtgcaacgaggcttgtctggagggatgtttctgtcctccaggactgtacatggacgaacggggcgactgcgttcccaaagcacagtgcccatgttactacgacggcgagattttccagccggaggatatctttagcgatcatcacaccatgtgttactgcgaggacggatttatgcactgcacaatgtccggggtgcctggttccttgcttccggacgcagtgctttcatctccactctcccatcggtctaaacgatccctctcctgccgtccacctatggtgaagctagtgtgcccagctgacaatttaagggccgaaggcttggaatgtaccaagacgtgccagaactacgatctggaatgtatgtctatgggctgcgtgtccggctgtctgtgtcctccaggcatggtgcggcacgagaaccggtgcgtggcattagaacgctgcccctgtttccaccagggcaaggagtatgctcccggcgaaaccgtcaagattggttgcaatacctgtgtctgtcaagaccgcaaatggaattgcaccgaccacgtatgtgatgccacctgttctaccatcggtatggcccactacctcactttcgatggcctgaaatatttgtttcctggggaatgccagtacgtgctggtgcaggattattgtggatcaaatccaggtacctttcgaatcctggtagggaataagggctgcagccaccccagcgttaaatgcaagaaaagggtgacgatcttagtcgagggcggggaaatcgagctctttgacggcgaagtcaacgtgaaacgacccatgaaggatgagacacacttcgaagtggtcgaaagtggaagatacatcatcttgctgctgggcaaagcactgagcgtggtttgggaccgccacctgtcaataagtgtggttctcaaacagacataccaggaaaaagtttgtggtctgtgtggcaattttgatgggattcagaacaacgatttgactagctctaacctgcaagtggaggaagatcccgttgactttggcaactcctggaaagtgagtagtcagtgtgcggatacccgtaaagtgcccctggactccagccccgcaacctgccataataacatcatgaagcagacaatggtggatagctcgtgtcgtatcctcacgagcgacgtgtttcaggattgcaataaactggttgatcccgagccatacctggatgtctgcatatacgacacatgctcttgtgagtcgatcggagattgcgcctgtttttgtgatactattgcggcttatgctcacgtctgcgcgcagcatggcaaagttgtcacttggcggacagccacgctgtgcccccagagctgcgaggaaaggaacctcagagagaatgggtacgaatgtgagtggaggtacaactcatgtgccccagcctgccaggtgacatgtcagcatcctgagcccctcgcttgccctgtgcagtgtgtcgaggggtgtcatgcccattgtccgcccggcaagattctcgatgagctgctccagacttgcgtcgatcctgaggactgccccgtgtgtgaggtagcaggaaggcggtttgctagcggtaagaaagtaaccttgaacccttcagaccctgaacactgccagatctgtcactgtgatgttgtcaacctgacttgtgaagcttgccaagagcctgggggcctcgtggttcctccaacagacgcccccgtatctccgacaactctgtacgtcgaagatattagtgaaccccccctgcacgatttctattgttcacgccttttggatctggtgtttttgttggacgggagtagccgattgtctgaagccgagtttgaagtcttgaaggcgtttgtggtggacatgatggagaggttgagaatcagccaaaagtgggttagagtcgccgtagtggagtatcatgatggctctcacgcctatattgggctcaaggacagaaaacgccccagcgagcttcgacgcatcgcctcacaggtgaaatacgcaggatcccaggtcgcgagcacttccgaggtgctcaaatatactttattccagattttctcaaaaatcgatcgccccgaagcttcccggatcacactgctgctcatggccagccaggagcctcaaaggatgtctcggaactttgtgaggtacgtgcaaggactgaaaaagaaaaaggttattgtgatccctgtcgggattggaccccacgcgaatcttaagcagattcggttgatcgagaagcaagcaccggagaacaaggcctttgtcctttcttcagtggacgagctggaacaacagcgcgacgagatagtgtcttacctgtgcgacttggcacccgaggcaccgccccctactttgcctccagacatggcccaggtgacggttggccccggtctgttgggcgtttcaactctcgggccaaaacgcaattcaatggtcctggatgtagcttttgtactcgagggctccgacaagatcggggaggctgatttcaacaggtcaaaagagttcatggaagaggttatccagcggatggatgttggacaggacagtatacacgtcaccgtgttgcaatattcatatatggtcacggtggagtaccccttctcggaagcccagagtaaaggggatatactgcagcgcgtacgggaaatccgctatcagggcggcaatcggactaataccggcttagcgctgagatacctgtcagatcacagcttccttgtgagccagggcgaccgggagcaggcgccaaacctcgtgtacatggtgacaggaaacccggcctctgacgagattaaacgcctgcctggtgatatccaggtggtacctataggagtgggcccaaacgccaacgtccaggagttagagcggatcggctggccgaacgcacccatattaatccaagacttcgaaactctacctcgcgaggcccccgatcttgtgttgcagcgctgctgtagcggggagggtttacagattcccaccctgagccctgccccagattgctcacaaccactggatgtcatcttgctcttagacggctcatcaagcttcccagcatcttatttcgacgagatgaaatccttcgccaaagcctttatcagcaaggcgaatatcggcccacgccttacccaggtgagcgtcctgcaatatgggagtataactaccatcgacgtgccctggaacgtggttccggaaaaggctcatctgctgtctcttgtcgatgtgatgcagagagagggtgggcccagtcagattggcgacgctctaggttttgctgtcagatacctgacgtccgagatgcatggggcccgacccggtgcctccaaagcagtggtgattctggtgaccgatgtgtccgtcgattcagtggacgccgcggccgatgctgctaggagcaaccgagtgacagtatttccgattgggataggagatcgttatgatgctgcccaattgaggatcctggctggcccagcaggggacagcaacgtcgtgaagctccagcgtatagaagatctcccaacaatggtgacgctggggaattcgttcttgcacaagctttgttcaggctttgttagaatttgcatggatgaagatggcaacgaaaaaaggccaggggatgtgtggacactccctgaccaatgtcacactgtgacgtgccagcccgacggccagaccctgttaaaatcgcaccgcgtgaattgcgataggggattgagacccagttgtcccaactcgcagagtccagttaaagtcgaggagacctgtggttgtagatggacctgcccctgcgtgtgtaccggctccagtaccaggcatatagtcacattcgacgggcagaatttcaaacttacaggaagctgttcatatgtactgttccagaacaaagaacaggatctggaagtgattcttcacaatggggcttgctcgcccggcgctagacaaggttgcatgaaaagtatagaagtgaagcacagcgccttgtccgttgaactgcacagcgatatggaagtgactgtcaacggaaggctggtctcggttccctacgtggggggtaatatggaagtaaacgtgtatggagcaatcatgcatgaggtaaggttcaatcacctgggtcatatatttacctttactccacagaataacgaattccagctacagttgagtcctaaaacgttcgcctcaaaaacatatggattatgtggaatctgcgacgagaacggtgccaacgactttatgctgcgcgatgggacagtgaccaccgactggaagactttagtccaggagtggaccgtgcagcggcccggacagacatgccaaccaatcctcgaagagcagtgcttagtgcccgattcatcccactgccaagtgctccttctccccttgttcgcagagtgtcataaggtcctggcccctgctacattctatgcaatctgccagcaagactcctgtcaccaagagcaggtgtgcgaggtgatagcttcttacgctcatctgtgcagaaccaacggcgtgtgtgtcgattggcgtactccagacttctgtgctatgagttgccccccaagtttggtgtataaccactgtgaacacggttgcccccgtcactgcgacgggaatgttagtagctgtggtgaccatccctcagagggctgcttttgtcccccagataaagtgatgttggagggcagctgtgttcctgaggaggcctgcacacagtgcattggcgaggatggcgtacagcatcagtttctcgaagcctgggtgcctgaccatcagccatgtcagatctgtacttgtttatctgggagaaaagtgaactgcactacacaaccttgccccaccgccaaagcccccacttgtggcctgtgcgaggtggccaggctgagacagaacgcggaccagtgctgtccggaatacgagtgcgtgtgcgacccagtgagctgcgacctaccaccagtgccccactgtgagcgggggttgcaaccaaccctgacaaaccccggggaatgcagaccaaacttcacatgcgcttgccgcaaggaggagtgtaaacgcgtcagccctcccagttgcccccctcatagactgcccaccctcaggaagacacagtgttgcgacgaatatgaatgcgcctgcaactgcgtgaatagtacggtgtcttgccctcttggatatctggcaagtaccgcgactaacgactgcgggtgcactaccacaacgtgtctgcctgacaaggtgtgtgtacaccgctctactatctatcccgtgggtcagttctgggaggagggatgtgacgtctgtacatgtacggatatggaagatgccgttatgggacttagggtggcgcagtgctctcagaagccttgcgaagactcctgtaggtcaggctttacatacgttctgcatgaaggcgaatgttgtgggcgctgtctgccaagcgcttgcgaagtggttaccggctctcccagaggcgacagccagagctcctggaaaagcgttggcagccagtgggctagccccgagaacccctgcctgattaacgagtgtgtgcgggtgaaggaggaagttttcatccagcaacgaaatgtgagctgcccacagttggaggtgcccgtgtgtcctagtggcttccagctgtcctgtaaaacttcagcgtgctgtccatcctgccggtgcgaacgcatggaggcgtgcatgctgaacggcactgtaatcgggccagggaagaccgtcatgattgatgtctgtaccacgtgtaggtgtatggtccaagtaggagtaatttcgggtttcaagctcgaatgcagaaagaccacatgtaacccttgcccacttggttacaaggaagaaaataacaccggggaatgctgcgggcgatgtctacccacagcatgcacaatacagctgcgcggaggacagatcatgacgcttaagagagatgagacactgcaggacggctgtgatacccacttttgcaaggtgaacgagaggggggagtacttctgggagaaacgggtgactgggtgccctccctttgacgaacataaatgccttgccgagggaggaaagatcatgaagatccccggaacatgttgtgacacttgtgaggagccagaatgtaatgacattacagcacggttacaatatgtaaaagtcgggagctgcaagagtgaagtggaagtggacatccattattgccagggcaagtgcgcctctaaagctatgtattccatcgatataaatgatgtgcaggaccagtgttcttgctgttctcctacgagaacggaacccatgcaggtggcgttgcactgcaccaatggatcagtggtttatcatgaggtgcttaacgcaatggagtgcaagtgttcgcctcgcaaatgtagtaag

SEQ ID NO: 12495 - DNA, 8439 bp, Artificial Sequence
  derived and/or modified sequence
atgattcccgccagattcgccggagtgctgttggcacttgcactgatcttgccgggcacgctctgtgctgaaggtaccagaggacgctcctccaccgctcggtgctcgctgttcgggtcagactttgtgaacacttttgacggatcaatgtactcgtttgctggatactgctcatacctcctggccgggggatgtcaaaagcggtcattctcgatcatcggagattttcaaaacggaaagagagtcagcctcagcgtgtacctgggagagttctttgacatccatctgttcgtgaatggaaccgtcactcagggcgaccagagagtgagcatgccttacgccagcaaaggattgtacctcgaaaccgaggcaggctactacaaacttagcggtgaagcctacggattcgtggctcggatcgatggcagcggtaactttcaagtcctgctgtcggatcggtatttcaacaagacttgcggcctgtgcggaaacttcaacatcttcgcggaagatgacttcatgacccaggagggcactctgacttccgacccatacgatttcgccaactcgtgggccctgtcatcaggcgaacaatggtgtgaaagggcgtcacccccatcgtcatcatgcaacatcagctctggtgaaatgcagaagggcctgtgggagcagtgccagctcttgaagtcgacctccgtgtttgcaagatgtcacccgctggtagatccagaaccgttcgtggctctgtgcgaaaagaccctctgtgaatgcgcaggcggccttgagtgcgcttgcccggccctgctcgagtacgctcggacttgcgcacaagagggaatggtgctgtacggatggactgaccattcagcctgctccccggtgtgtcctgcaggaatggaatacagacagtgtgtctcaccgtgcgccagaacgtgccagtcgctccacatcaatgagatgtgccaagaacgctgcgtggatggctgctcatgcccagagggccagctcctcgacgaggggctgtgcgttgagtccaccgagtgcccgtgtgtgcattccggcaagagatacccgcctgggaccagcctcagcagggattgcaacacgtgtatttgccgcaactcacagtggatctgctcgaacgaagaatgcccgggagagtgcctggtcacgggacagagccatttcaaatcattcgacaacaggtatttcacgttctcaggaatctgccagtacttgctggccagggattgccaggaccattcctttagcatcgtgatcgaaaccgtgcagtgcgctgatgaccgggacgcggtgtgtactagatcagtcaccgtgaggctgccaggactccataactccctcgtgaagttgaagcatggcgcgggcgtggcaatggatgggcaggacgtgcagctccctctcctgaaaggagatctgcgcattcagcatacggttaccgcgagcgtccgcctgtcctacggcgaggacctgcaaatggactgggatggacgcggaaggctgctcgtcaaactgtcgccagtctacgccggaaagacctgcggactgtgcgggaactacaacggaaatcaaggcgacgatttcctgacgccttcaggattggccgaaccgcgagtggaagattttgggaacgcgtggaagctccacggagattgccaggatctgcaaaagcagcattccgatccgtgcgcactcaatccccgcatgaccagattctccgaggaagcatgtgccgtgcttacgtcaccgacctttgaggcttgtcatagagccgtctcaccgctgccttacctgcggaattgccgctacgacgtgtgctcctgttctgacggacgtgaatgcctgtgtggcgcgctggcctcctacgccgctgcttgtgctggccggggagtgagagtggcgtggcgggaacccggccgatgcgaactgaactgcccgaagggccaggtctacctccagtgtggaactccttgtaatcttacttgcagatcactgtcgtacccggatgaggagtgtaatgaggcgtgcctggagggttgcttttgccctccaggactctatatggacgagcgcggtgactgcgtgccaaaggcgcagtgcccatgctactacgatggggagattttccagccggaagatatctttagcgatcatcacactatgtgctactgcgaagatggcttcatgcactgcaccatgtcaggagtgccagggagccttctccccgacgccgtgctttcatcgccgctctcacaccggtcgaaacgcagcctctcatgccggccgccgatggtgaaacttgtgtgcccagccgacaacttgcgcgcggagggcctggaatgcaccaagacttgccagaattacgacctggaatgcatgtcaatgggatgcgtgagcggatgcctgtgtcccccggggatggtccggcacgaaaatcggtgcgtggcactcgaacgctgtccatgctttcaccaggggaaggaatacgcgccgggtgaaaccgtcaagatcggttgtaatacttgcgtgtgccaggatagaaagtggaattgcaccgaccacgtgtgcgacgccacgtgcagcaccatcggcatggcccactacctgacttttgacggccttaagtatctctttccgggagaatgccagtacgtgctggtgcaggattattgcggttcaaacccaggaaccttcagaatccttgtgggaaacaagggatgctcccatccatccgtcaaatgtaagaaaagagtgaccatcctcgtggagggaggcgaaatcgaactgttcgacggagaggtgaacgtcaagcgccccatgaaagacgaaactcacttcgaggtggtggaatccggaaggtatatcatcctcctcctgggaaaagcactctccgtggtgtgggaccggcacctctcaatctccgtcgtgcttaagcagacctaccaggaaaaggtgtgcgggttgtgtggcaatttcgacggcatccagaacaacgacctcacctctagcaatctgcaggtggaggaggacccagtcgacttcggtaactcatggaaagtgtcaagccagtgcgcggacacgaggaaagtgcctctggacagctcccccgccacctgccataacaatatcatgaagcaaaccatggtcgactcatcgtgccgcattcttacctccgatgtgttccaggattgcaacaagctggtggatccagagccttaccttgacgtgtgcatctacgacacctgcagctgcgaatcgatcggagattgcgcttgcttctgtgacactatcgcagcctacgctcatgtgtgcgcccagcatggaaaggtggtgacctggcgcaccgccaccctgtgccctcagtcatgcgaggagcgcaatcttcgcgaaaacggatatgaatgtgaatggcgatacaacagctgcgctccagcttgccaagtgacctgccaacatccagagccgctggcatgtcctgtccagtgtgtggaaggatgtcacgcccactgcccaccgggaaagattcttgacgagctccttcaaacttgcgtggatcccgaggactgtcctgtgtgcgaagttgccgggcgcagattcgcctccggtaagaaagtgaccctgaacccaagcgacccggagcactgccagatttgtcactgcgacgtcgttaacctcacctgcgaagcctgccaagaacctggcggactcgtggtgccgccaaccgacgcgcctgtcagcccgaccactctgtatgtcgaagatatctcggagccacctctgcacgacttctactgctcgagactcttggatctggtgttcctgctcgacggatcgtcgaggctctcggaggcggaattcgaggtgctgaaggcttttgtggtggatatgatggagcgcctccgcataagccaaaagtgggtccgcgtcgcagtcgtggaataccacgatggctcccatgcttacatcggactgaaagaccgcaagcgcccgtccgagctgcggagaatcgcttcacaggtgaagtacgcgggttcccaagtggcatccactagcgaagtcttgaagtacaccctctttcagatcttctcaaagatcgacaggccagaggcgtcgcgcatcaccctgctgctgatggcgtcgcaagaacctcagagaatgtcccggaacttcgtccggtacgtgcagggcttgaaaaagaagaaggttatcgtgattccagtcggtatcggcccacacgctaatctcaagcagatccgcctcatcgagaaacaagccccagagaataaggcctttgtcctctccagcgtcgacgagttggagcaacagcgcgatgagatcgtctcctatctgtgtgatttggcacccgaggccccaccgccaactctgccaccagatatggcgcaggtgactgtgggcccgggtctgctgggtgtgtcgacgcttgggccgaaaaggaactcaatggtgctggacgtggccttcgtgcttgagggatcagacaaaattggagaggcagatttcaaccgcagcaaggaattcatggaagaagtgatccagaggatggacgtgggtcaggactcaattcacgtgaccgtacttcaatactcgtacatggtcacggtggaataccccttctccgaagctcaaagcaaaggtgatatcctgcagcgcgtgcgggaaatccggtaccagggcggaaatcgcaccaataccggactggcactccggtacctgtccgaccactcgtttctggtgtcacaaggcgaccgggaacaagcccctaatctggtgtacatggtgactgggaacccagccagcgatgagatcaagaggctgcctggagatatccaagtggtgccaatcggagtgggccctaatgccaacgtccaggagctcgaacggatcggatggccgaatgccccgatcctgatccaggacttcgaaacgctccctcgagaggcaccagacttggtgctgcaacggtgctgctccggggaaggactccagatcccaactctctcgccagcaccggattgttcgcaaccgctggatgtgatcctgctgctggacggatcctcctcattccctgcctcgtacttcgatgaaatgaagagttttgccaaagcatttatctccaaagcgaatatcggaccgcggttgacgcaggtgtccgtgctccaatatggatcgattaccacgatcgatgtgccttggaacgtggtgcctgaaaaggcccaccttctgagcctggtcgacgtcatgcagagggagggaggaccatcccagatcggagacgcgctggggttcgccgtccgctacctgacttcagagatgcacggagcccgccccggagcctccaaagccgtggtgatcctggtcaccgacgtgagcgtggattcggtggatgcggcggccgatgctgctcggtcgaacagggtcactgtctttccgatcgggataggagacaggtacgacgccgctcagcttcggatcctggcgggtccggcgggggactcaaatgtcgtgaagctgcagcgcatcgaagatctcccgaccatggtgactctcggtaattcgttcctgcataagttgtgtagcggtttcgtgaggatctgcatggacgaggacgggaacgagaagcggccaggagacgtgtggactttgccagaccagtgccacactgtcacctgccaacccgatggacagactttgctcaagtcacatagagtgaactgcgaccgcggactccgcccttcctgccccaactcgcagtcgccggtcaaggtcgaagaaacctgcggatgtagatggacctgcccctgtgtctgcactggatcgtctaccagacacatcgtcaccttcgacggacagaacttcaagctcaccggcagctgtagctacgtgctgttccagaataaggagcaggaccttgaggtgattctccacaacggcgcttgcagcccgggagcaagacagggatgcatgaagtcaatcgaggtgaaacattccgccctgtctgttgaattgcattccgacatggaagtgactgtgaatggtaggctcgtgtcagtcccttacgttggcggtaatatggaagtgaacgtctacggagctatcatgcacgaggtccggttcaatcacttgggccacatctttaccttcactcctcagaacaacgagtttcagctgcaactgtctccaaaaacgttcgccagcaagacctatggactgtgtggcatctgtgatgaaaacggcgccaacgactttatgctgcgggacggcaccgtgactactgactggaaaactctggtccaagaatggaccgtccaaagaccggggcaaacctgtcagccgattctggaggagcagtgcctggtgccggacagctcgcactgtcaagttctgctgctccctctgttcgctgagtgccacaaagtccttgccccagctaccttctacgcgatctgccagcaagacagctgccaccaagaacaagtgtgcgaagtgatcgctagctacgcacacctgtgccgcacgaacggggtgtgtgtggactggcggaccccggatttctgcgctatgtcgtgcccaccgtcgctggtctacaaccactgcgagcatggctgcccgcgccattgcgacggaaacgtgagctcgtgcggagatcatcctagcgaaggctgcttctgcccgcccgataaagtgatgctggaaggatcatgcgttccggaggaggcatgcactcagtgtatcggtgaggatggggtccagcaccagttcctggaggcttgggtaccggaccatcagccttgccaaatctgcacctgtctgtcaggacgcaaggtgaattgcaccacccaaccgtgtccgactgcgaaggcaccgacttgcggactgtgtgaagtggctcgcttgagacagaatgccgatcagtgctgcccagaatatgaatgcgtgtgcgacccggtgtcctgtgacctgccaccggtccctcattgcgaaaggggactgcaaccgactcttactaaccccggcgaatgccgcccgaatttcacttgcgcctgtcgcaaggaagaatgcaagcgggtcagccctccgtcctgcccgccgcacagactcccgaccctccgcaagacgcagtgttgcgatgaatacgaatgcgcatgtaattgcgtgaatagcactgtgagctgcccactgggataccttgcgagcactgcgactaatgattgcggttgcactaccacgacctgcctgccagacaaggtttgcgtccacagatccactatttaccctgtgggacaattttgggaagagggctgcgacgtgtgcacttgtacggatatggaggatgccgtcatgggtctgcgggtggcacagtgctcgcagaagccttgcgaggactcatgtagatcaggcttcacctacgtgctccacgaaggtgaatgctgcgggcggtgcctcccaagcgcatgcgaagtcgtgactggcagcccaaggggagactcacagtcatcatggaagtcggtgggtagccagtgggcatcaccggagaatccttgcctgattaatgaatgcgtccgcgtcaaagaggaggtgtttatccagcagcgcaatgtgtcctgcccacagctggaggtgccagtgtgtccgtcaggcttccagcttagctgtaagacttccgcgtgctgcccgtcatgccgctgcgagcgcatggaggcttgcatgctgaatggaactgtgatcgggccgggaaagactgtgatgatcgatgtgtgcacgacctgcagatgcatggtccaggtgggcgtgatttcgggattcaaactggaatgtagaaagaccacttgcaacccatgcccactgggctacaaggaggaaaacaataccggagagtgctgcggtcgctgcctcccaactgcttgtaccatccagctcagaggaggacagatcatgaccctgaagcgggatgaaaccttgcaggatgggtgtgacacccacttctgcaaggtgaacgaacggggagagtacttttgggaaaaacgagtgactggctgccccccttttgacgaacataaatgcctcgccgaaggcgggaagatcatgaagatccccggcacctgttgtgatacttgcgaggaaccggagtgtaacgacattacggcccgcctgcagtacgtgaaagtggggtcatgcaagtcagaagtcgaagtcgacatccattactgccagggcaaatgtgcttccaaggccatgtactccatcgatatcaacgatgtgcaggaccaatgctcgtgttgcagtccgacccgcactgagccgatgcaagtggcgctccactgcactaatggttcggtggtttaccacgaagtgttgaatgctatggagtgcaaatgtagcccccgcaagtgcagcaag

SEQ ID NO: 12496 - DNA, 8439 bp, Artificial Sequence
  derived and/or modified sequence
atgatcccggcaaggttcgctggtgtgctgctcgcactggccttgatcctccctggaaccttgtgcgcggaaggcactcgcggacgttcctcaactgcgcggtgctccctgtttggatccgacttcgtgaacaccttcgacggcagcatgtacagcttcgcgggatactgctcgtacctgctggcgggaggatgtcagaagaggtcattctcaatcatcggcgatttccagaacggaaagcgcgtgagtctgtcagtgtacctgggagagttctttgacatccatctgttcgtgaacggcactgtaacccaaggagatcagcgcgtctccatgccgtacgcttccaagggcctgtacctcgaaaccgaagccggctactacaagctgtccggcgaggcctacgggttcgtcgctaggattgatggctccggaaacttccaggtgcttctgtccgacagatacttcaataagacctgcggactctgtggcaacttcaatatcttcgccgaggacgattttatgactcaggagggaaccctgacctcagacccatacgacttcgccaacagctgggccctttcttcgggagagcaatggtgcgaaagagcttccccgccctcatcgtcgtgcaatattagttcgggggagatgcaaaaaggactgtgggaacaatgccaactgcttaagtcgacctcagtgttcgcacggtgccatccgctggtcgatccggaaccatttgtcgcactgtgcgaaaagactctgtgtgagtgcgcaggaggactggaatgtgcgtgcccggctctgctcgaatatgcccgaacctgcgcccaagaaggaatggtgctttacggatggaccgaccattccgcttgctcgccagtttgcccagcagggatggaataccgccaatgcgtgagcccttgcgccagaacctgtcaatccctgcatatcaatgaaatgtgccaggagcggtgcgtggacggatgctcctgcccagaaggccagctcctggacgagggcctgtgtgttgaatcgactgagtgcccatgcgttcactccggcaagagatacccacccgggacctcgctgtccagggactgcaacacttgcatttgccggaattcccagtggatctgcagcaacgaagagtgcccaggggaatgtctcgtgaccggacagtcacacttcaagagcttcgataatagatactttacttttagtggaatttgccagtacctgctcgcgagagattgtcaggaccattcgttctcgatcgtgatcgagactgtgcagtgcgcggacgacagggacgcagtgtgcacccggagcgtgaccgtcagacttcccgggctgcataactccctcgtgaagctgaagcacggagctggcgtggctatggatggccaggacgtgcagcttccgctcctgaaaggagatctgcgcatccaacacaccgtcaccgcctccgtgagactgagctacggggaggatcttcagatggactgggacggacggggccggctgctcgttaaactctccccagtgtacgccggaaagacctgtggattgtgtggaaattacaatggaaaccaaggagacgattttctcactccatccgggctggcagagccgagggtcgaggacttcggtaacgcgtggaaactgcacggtgattgccaggacttgcaaaagcagcatagtgatccgtgcgcactgaacccccggatgacccgcttctccgaagaggcttgtgccgtgctcacctcgcccactttcgaagcgtgccaccgcgctgtgagcccgctgccgtacctccgcaattgccggtacgatgtatgctcgtgttccgacggtcgggaatgcctgtgtggtgccctggccagctacgcggcggcgtgcgccggaaggggcgtgcgggtggcctggcgcgagcccggacggtgcgaactgaactgcccgaagggacaggtgtaccttcagtgcggaaccccttgcaatctcacttgtcgctcgctctcctatccggatgaggagtgcaatgaagcctgtctggaggggtgtttttgtcctccgggtctgtacatggatgagcgcggagattgcgtgccgaaggcccaatgtccctgctactacgacggtgaaatctttcaaccggaagatattttctcagatcaccacaccatgtgctattgcgaggatggattcatgcactgtactatgtcaggagtgccaggatcccttctccctgacgccgttctgtcgtcgccgctgtcgcacagatcaaagcgctccctttcatgccgaccaccgatggtgaagctcgtctgtccggccgacaatctgcgcgccgaggggctggaatgtactaagacttgccaaaactacgacctggaatgcatgtctatgggctgcgtgtccggatgcctttgccccccagggatggtgcgccatgaaaaccgctgcgtggccctggaaagatgcccatgttttcaccaggggaaggagtacgccccgggggaaactgtgaagatcggatgtaacacctgtgtatgccaggacagaaagtggaactgcaccgatcacgtttgtgacgccacgtgctcgactatcggaatggcccactacctgacgttcgacggtttgaaatatttgttcccaggagaatgccaatacgtgctggtgcaggactactgcggatcaaaccctggaacttttagaatacttgtcggaaacaaaggatgctcccacccctcggtgaagtgcaagaaacgcgtgactatcttggtggaaggaggcgaaattgaactgttcgacggagaagtcaatgtgaagaggccaatgaaggacgagactcactttgaagtggttgaaagcggtcggtacatcatactgctccttggcaaggcgctgagcgtggtgtgggatcgccatctgtccatctccgttgtgctcaagcagacttaccaggagaaggtgtgcgggttgtgtggtaacttcgacggtatccaaaacaatgatcttacctcctctaacttgcaggtcgaggaagatccagtcgacttcgggaacagctggaaggtgtcgagccagtgcgccgacacgagaaaagtccctcttgattcgtcgccagctacctgccataacaacatcatgaaacagactatggtcgactcatcgtgtcggatcctgactagtgacgtgttccaagattgcaacaagctggtcgaccccgaaccttacctcgacgtgtgcatctatgacacttgcagctgcgaatcaatcggggattgtgcatgcttctgcgacaccatcgcggcgtacgcacatgtctgcgcccagcacgggaaggtcgtcacctggaggacggccactctctgcccccagagttgtgaggaaagaaatctgcgggagaatgggtatgagtgcgagtggcggtacaactcgtgcgccccggcgtgtcaggtcacctgccagcaccctgaacctctcgcatgcccagtgcaatgcgtcgaaggatgccatgctcattgcccgccgggtaagatcctggatgagctgctgcaaacttgcgtggacccggaagattgccccgtgtgcgaagtggctggacggcgctttgcttcaggtaaaaaggtgaccctcaacccgtccgaccccgagcactgtcaaatttgccattgcgacgtcgtgaacttgacttgtgaggcatgtcaggaaccaggcggcctggtggtgccgccgaccgacgcgccggtgtcaccgaccaccctctacgtggaggacatctccgaaccacctctccacgatttctactgttcccgcctcttggacctggtgttcttgctggatggatcgtcgcgactgtcagaggccgaatttgaggtgctcaaagcattcgtggtggatatgatggaacggctgagaataagccagaagtgggtccgggtcgcagtcgtggagtaccacgacggatcgcatgcctacatcggtcttaaggaccggaagcgcccaagcgaattgaggcgcattgcaagccaagtcaaatacgctggatcccaggtggcaagcacctcggaggtgttgaaatataccctcttccagatcttttccaaaatcgaccgaccagaagctagccgcatcaccctcctgctgatggcgagccaggaaccgcagagaatgagccgcaacttcgtgaggtacgtgcagggactcaagaagaagaaggtgattgtcatcccggtgggaatcggtcctcacgcaaatctgaagcagatcagactcatcgagaagcaggcaccggaaaacaaggccttcgtcctgtcgagcgtggatgaactggagcagcaacgggatgagattgtgtcatacctttgtgacctcgctccggaggctccgcctccgaccctcccgcctgatatggcccaagtgaccgtcggccctggactgctgggcgtcagcaccctcggaccgaagagaaactcgatggtgctggatgtcgccttcgtactggaaggctcagacaagatcggagaggccgactttaaccgctctaaagagtttatggaggaagtgatccaaaggatggatgtgggacaagactcgatccatgttaccgtgctgcaatactcgtacatggtgaccgtggaatacccgttctcggaggcccagtcgaagggcgatatcctccagcgggtgcgggagattagataccaaggaggaaaccggacgaacaccggtctggctttgcggtacctgtctgaccacagctttctcgtgagccaaggcgaccgagaacaggccccaaatctggtgtacatggtcactggaaacccggcctcagatgaaatcaagcgcctgcctggagacatccaagtcgtccccatcggcgtggggccaaacgcaaacgtgcaggagctcgaacgcattgggtggccaaatgctccgatcctgattcaggacttcgagactctccctcgggaagcaccggatttggtcctgcagcggtgttgctccggcgaaggactccagatccctaccctgtcaccagccccggattgctctcagcctctcgacgtgatcctcctgctcgatggaagctccagcttcccagcctcatacttcgacgaaatgaaatcattcgcgaaagccttcatcagcaaagccaatatcggcccacggctcacccaagtgtccgtccttcaatacggctcgatcactaccatcgatgttccgtggaacgtggtccctgagaaggctcacctcctctcgctggtggatgtgatgcagcgcgaagggggaccatcacagatcggcgacgctctgggatttgccgtgcgctacctgacttcggaaatgcacggtgcacggccgggggcctcgaaggcggtcgtgatcttggtcaccgacgtctcggtggactcagtggatgcggccgccgatgcggcgaggtccaaccgcgtcacggtgttcccaatcggtatcggagacagatatgacgccgcccaactgcgcattctggccggacccgccggagactcgaacgtggtgaaactgcagcgcatcgaggacctgccgacgatggtgactttgggcaattccttcctgcacaagctctgcagcggattcgtccggatctgtatggacgaggatggcaatgaaaaacggccgggagacgtctggaccctgccggaccaatgccacacggtgacgtgtcaaccggacggtcagaccctgctgaagagccacagggtcaactgtgaccggggactccgcccctcttgcccgaactcccaaagccctgtgaaggtcgaagaaacgtgtggatgccgctggacctgcccttgtgtgtgtaccggttcctccactcgtcacatcgtgactttcgacggccagaacttcaagctcaccgggtcatgctcatacgtgttgttccagaataaggagcaggatctcgaagtgatcttgcataacggggcgtgcagccctggagcacgccaaggatgtatgaaatcgatcgaagtgaaacatagcgcgctgtctgtggaacttcacagcgatatggaggtcaccgtcaatggcagactcgtgtccgtgccttacgtcggaggcaacatggaggtgaatgtgtacggagcgatcatgcacgaagtcagattcaatcatctcggacatatcttcaccttcaccccacagaacaacgaattccaattgcagctgtcgccgaaaactttcgcatcaaaaacgtacggactttgcggcatttgcgacgaaaacggcgctaatgacttcatgctccgggacggaaccgtcactactgattggaaaacgctcgtgcaggaatggaccgtgcagcggccggggcagacgtgtcagcccatcctggaggaacagtgtctcgtgccggatagcagccactgccaggtcctcttgctgccacttttcgccgaatgtcacaaggtgctggctccagcgactttttacgctatctgccagcaagattcctgccaccaggaacaagtgtgcgaggtgatcgcatcatacgcacacctgtgccgcacgaatggtgtgtgcgttgattggcggacgccggacttctgcgccatgtcgtgccctccaagtctggtctacaaccattgcgagcacggatgtccacggcactgcgatggtaacgtgtcgtcctgcggggatcatccgtcggaggggtgcttttgtccgccggacaaggtaatgctggaaggatcctgcgtgcctgaagaagcgtgcactcagtgcatcggcgaggacggcgtgcaacatcaattcctcgaagcctgggtgccggatcaccagccgtgtcagatctgtacttgcctgtcgggacgtaaggtgaattgcactacccagccgtgcccgactgccaaagcgcctacctgtggcctctgtgaagtcgccagactgagacagaacgcggaccagtgttgcccggagtacgaatgtgtctgcgatcctgtgtcctgcgacttgccgccggtgccgcactgcgaaagggggctccaacccacgcttactaacccaggcgagtgccgccctaatttcacttgcgcctgccggaaggaagagtgcaagcgtgttagccctccatcctgtccgccgcaccgcctgcccaccctgaggaaaactcaatgctgcgacgaatacgaatgcgcatgtaattgcgtcaattcgactgtctcatgcccgctgggctacttggcctcgaccgctacgaacgactgcggatgtaccactaccacttgcctcccagacaaggtctgcgtccataggtcaaccatctaccccgtgggccaattttgggaggagggttgcgatgtctgtacctgcaccgacatggaggatgcggtgatgggactgcgcgtggcacagtgcagccagaaaccatgtgaggactcatgtcgctcgggatttacttacgtgctgcacgaaggtgaatgctgcggtcgctgcctgcctagcgcatgcgaggtcgtgactggttcaccgcggggagactcccagagctcatggaagagcgtgggaagccaatgggcatccccagagaacccctgcttgatcaacgaatgcgtgcgcgtcaaggaggaggtttttattcagcagagaaacgtgagctgcccgcaacttgaggtgccggtctgcccgagcggtttccaactctcctgcaaaacctcggcgtgctgcccatcatgccgctgcgagcggatggaggcgtgcatgctcaacggcaccgtgatcggcccgggcaagaccgtgatgatcgacgtctgcaccacgtgccggtgcatggtccaggttggagtgatctcgggcttcaagttggaatgccgtaagaccacctgcaatccatgcccactggggtataaagaagagaataacactggagagtgctgcggaagatgccttccaactgcctgcactatccagctgagaggagggcagatcatgactctgaagcgcgatgagactctgcaagacggatgcgacactcatttttgcaaagtgaacgagcgaggagaatacttctgggaaaagcgagtcaccggatgccctcctttcgacgaacataagtgcctggccgagggcggcaagattatgaagattcccggaacttgctgtgatacctgtgaagaacccgaatgtaatgacatcacggcccgcctgcagtacgtcaaagtgggatcctgtaaatcggaagttgaggttgatattcactactgccagggaaaatgcgcgagcaaggcgatgtactcgatcgatatcaacgacgtgcaagaccagtgctcgtgctgtagccctactcgcactgagccgatgcaagtcgcgctccactgcactaatggctcggtggtgtaccatgaagtgctgaacgcaatggaatgtaagtgctccccgagaaagtgctcgaag

SEQ ID NO: 12497 - DNA, 8439 bp, Artificial Sequence
  derived and/or modified sequence
atgataccagcaaggtttgccggggtgctgctagcactggccctcatcctgcctggcaccttgtgtgcagagggtacaagagggcgttcatcaacagcacggtgctcgctgttcggctcagacttcgtaaacactttcgatggatccatgtatagctttgccggatactgctcttatctgctagcaggaggttgtcagaaaagatctttttctattatcggtgatttccaaaacggaaaaagggtctctctctcggtgtatctgggtgaattcttcgacatacatctgttcgttaacggcaccgtgacccagggggatcagcgcgtgtccatgccctatgcatccaaggggctgtatctcgagaccgaggctggatactacaaactgagcggcgaggcctatggctttgtggcacgtattgatggctcagggaactttcaagtgctgctgagtgataggtatttcaataaaacatgtgggttgtgtgggaattttaatatttttgccgaggacgacttcatgacccaggagggaaccctgacctcggacccttatgactttgcaaattcctgggctctgagcagcggggagcagtggtgcgagcgggccagtcccccgtcctcaagctgcaatatttcttctggcgagatgcagaagggactatgggagcagtgtcaacttctgaaatctaccagcgtcttcgcgcggtgtcatccacttgtagacccggaacccttcgtagctctgtgtgaaaaaacactgtgcgaatgcgccggtggactggagtgcgcctgcccagccctcctggaatatgctcgaacatgtgctcaggagggaatggttctttacggctggaccgaccacagtgcctgtagtccggtatgccctgccggaatggagtataggcagtgcgtgtccccatgtgcacgaacttgtcaatctctccatatcaatgagatgtgccaggagaggtgcgtcgatggatgttcatgccccgaaggtcagctgctggacgagggcctctgtgttgaatcgaccgagtgcccttgtgtccatagtggcaagaggtatccacctggcacaagtctgtcacgagattgtaatacctgcatctgtagaaactctcagtggatctgctccaacgaagaatgccctggcgaatgcctcgtgacaggacagtcacactttaagtcctttgataatagatattttaccttcagcggaatctgccagtatctgctcgctagagattgccaggaccatagcttctctattgtgattgagactgttcagtgtgctgatgatagggacgccgtgtgcactaggtcagtgaccgtaagactacctggcctgcacaatagcctggtgaaactgaagcatggtgcaggcgtggccatggatggacaggacgtgcagctcccactgctcaagggagacttacggattcagcataccgtgaccgcctcggtacggttatcttatggtgaggacctacaaatggactgggatggtaggggcaggctgctggtaaagctttcccctgtctacgcggggaagacctgtggattgtgcggaaattataacggcaaccaaggggacgactttctgacccctagcggcctggctgaaccaagagtagaggatttcgggaacgcctggaagctgcacggagactgccaagatctgcagaagcagcattctgacccatgtgctctgaaccctcgaatgacaaggtttagtgaggaggcgtgcgctgtgcttactagccctacttttgaggcatgccatcgagccgtttcgccgttgccatatctcaggaactgtcgctacgacgtatgtagctgctcagacgggagagagtgcctctgcggtgctttggcttcttacgctgcagcatgcgcaggaagaggagtgcgcgtagcatggagggagcccggcaggtgcgagctgaattgccctaaagggcaagtttatctgcaatgtggtaccccctgcaacttgacctgtcgatccttgagctacccagacgaggagtgcaatgaggcctgtctggaaggttgtttctgcccccccggcctctatatggatgaaaggggagactgtgtcccaaaggcgcagtgtccctgttactatgacggagaaatatttcagccagaggacattttttctgatcaccataccatgtgttactgtgaggatggatttatgcactgtacaatgtcgggcgtaccgggctcacttctccctgatgctgtgctatccagtcccctgagtcacaggagcaagaggagcttgtcctgtagaccgcctatggtgaaactggtctgtccggctgacaatcttcgagccgagggcctggagtgcaccaaaacttgtcaaaactatgacctggaatgcatgagtatggggtgtgtttccggctgtctctgccctccaggcatggtcaggcacgaaaatcggtgtgtggccctggagcggtgcccttgtttccaccaggggaaagagtacgcccctggggagactgtgaaaatagggtgcaacacatgcgtgtgccaggacagaaaatggaattgtacagaccatgtgtgcgatgctacgtgtagcaccatcggaatggctcattatttaacctttgatggtctgaaatacctattccctggtgaatgccagtatgtcttagtgcaagattactgtggtagcaacccaggtactttcaggatcctcgtgggcaacaagggttgcagccacccctccgtcaaatgcaagaaaagggtgaccatcctagtggagggcggagagattgagctgttcgacggagaagtcaatgtgaaacgcccaatgaaagatgagacccactttgaagtggtggagagcgggagatacatcattctgttgctgggaaaagcattgagcgtagtgtgggatcgccacctctctatttcagtggtactgaagcagacataccaggaaaaggtctgcggcctctgtggtaattttgatggaatccagaataacgaccttacatcatctaacctccaggtggaagaagatcccgtagactttgggaacagctggaaggtttccagccagtgcgccgacacccgcaaagttccacttgacagctcgccagccacctgccacaataatatcatgaagcaaacgatggtggattcttcttgtaggatcctgacatcagacgtctttcaggattgcaataagctagtggacccagaaccctacctggatgtttgtatatatgacacctgctcctgtgagtcaatcggagactgcgcctgtttctgtgatacaattgcggcatatgctcacgtgtgtgcgcagcacggcaaggttgtcacttggcgcactgccaccttatgtccccaatcatgtgaggagcgtaatttgcgtgaaaatggatacgagtgcgaatggagatataattcatgtgccccggcttgtcaggtgacctgccaacatcctgagcctctggcatgtcccgtgcaatgtgtggagggctgtcatgctcactgtccacctgggaagattctggacgagcttctccagacatgtgtggacccggaggactgtcccgtttgcgaggtggccgggagacgttttgcatcgggcaagaaggtcactttgaatccatccgatccagaacattgtcagatctgccattgcgatgtggtcaacctgacttgtgaagcatgtcaggaaccaggcggattagtggtaccgcctacagatgcccccgtctctcccaccaccctgtatgttgaggatatctccgagccacccctccatgatttctattgctcacgcctgctagacttagtgttcctgctggatggaagtagtcggttgtccgaggcagagttcgaagtgctgaaggccttcgttgtggacatgatggaacgtttacggatatctcagaagtgggttagagtggctgttgttgaatatcacgacggctcccacgcatacattgggcttaaggatcggaagcgaccctccgagctgcgacggattgcgagccaggttaagtatgctggtagtcaggtggcatcaacttccgaggttctgaaatacacactctttcagatcttcagcaaaattgatcggcccgaggcttcaagaattaccctgttactgatggcaagccaagagccacagcggatgtctcgcaactttgtgcgctatgtgcagggcttgaagaaaaagaaagtgattgtgattcctgtcggaatcggacctcatgccaacctgaaacagatcaggctgatagaaaaacaggctccagaaaataaagcattcgttctttcatctgtggatgagcttgagcagcagagggacgagatagtttcatatctgtgtgacttggcacctgaagccccccctccgacgcttcccccggatatggcacaggtgacagtgggacctggcttgctgggcgtgagcaccctgggccccaagcggaactctatggttctcgacgttgcattcgtcctcgagggttcggataagattggtgaggctgactttaacagatctaaagagttcatggaagaggttatccaaaggatggatgtgggacaggattccattcacgtgaccgtgctccagtactcttatatggtgacagtcgagtacccgttttctgaagcacagtctaaaggggatatcctgcaaagagtcagggagattagataccaaggtgggaacagaactaataccgggctggccctgcgttatctatctgatcactcctttctagtgtcacagggcgatcgcgaacaggcgcccaatctggtttacatggtgacgggaaatcctgctagtgatgagattaagagactgcccggcgatatccaggtcgtacccatcggagtgggccccaacgccaacgtccaagagctggagcgaattggatggcccaacgcacccattctgatccaggatttcgagacccttcccagagaggcacccgacttggtgctgcagagatgctgctccggggagggcctgcagatcccgaccttgtcacctgctccggactgttcgcagccactcgacgtcattctcctgctagatggctcatcatccttccccgcgtcctacttcgacgaaatgaaatccttcgcaaaagcttttatctcaaaggccaacattggtcccagactgacacaggtatctgtgttgcagtacggctccatcaccacaattgatgtgccctggaacgttgtgccagaaaaggcccacttattatcacttgtggacgtcatgcaacgggaggggggcccttcccaaattggggatgccctggggttcgctgttcggtacttgacatccgaaatgcacggagcccgccctggagcgtctaaagctgtggtaatcttagtcactgacgtttcggtggatagtgtggacgcagcggccgatgcagcccggagcaaccgggttactgttttccctattggcattggcgacaggtacgatgctgcccaactcagaatccttgctggacctgccggtgattcaaacgttgtgaaactgcaaagaatcgaggatctgccaacgatggtgacccttggtaattcgttcctgcataaattgtgttctggtttcgtgcggatatgcatggacgaagacggtaatgagaaaaggccgggagacgtgtggacactgcctgatcagtgccacacggtcacctgccagcctgatggccaaacactcctgaaatcccacagggtcaattgcgatagaggacttagaccgtcctgccctaattctcagtctcccgtgaaggtcgaggagacctgcggctgtcgatggacatgtccttgtgtctgtaccggctcgtccacacgtcacatagtgacttttgacggacaaaactttaagctcaccgggtcatgtagctacgtactgtttcagaacaaagaacaagacctggaggttatcctgcataatggcgcttgtagtcctggagcaaggcaagggtgtatgaagtcaatagaggtgaagcactcagctctgtcagttgaactccacagtgacatggaggtgaccgtgaacgggaggctggtgtcagtgccctacgtgggcggaaatatggaggtgaatgtgtatggcgccatcatgcatgaggttcggtttaatcacttggggcatattttcacatttacccctcaaaacaacgagttccagctgcagctcagtccaaagaccttcgcttccaaaacttatggactgtgtggcatctgtgatgagaacggggcaaacgatttcatgctgcgggatggcacagtcacaacagattggaagactctggtccaggagtggacggttcagcggcctggccagacctgtcagccaatcctggaagagcagtgtctggttcccgactcctctcactgtcaggttctgctgctaccactattcgctgaatgccataaggtgctagcccctgccacgttctatgcaatctgccagcaggattcctgtcaccaggagcaggtgtgtgaagtaattgcctcctatgctcacttgtgtcgaactaacggggtctgcgtggattggcggacccccgatttttgcgccatgagctgccccccatctctggtctataaccattgcgaacacggctgcccccgacactgcgacggtaacgtcagctcgtgcggtgaccatccaagtgagggctgcttttgtcctcccgacaaagtcatgctcgaggggtcatgcgtgcccgaggaggcctgtactcagtgcattggtgaggacggtgtacagcaccaatttcttgaggcttgggtgcctgaccaccagccatgtcagatttgtacttgcctgtctggacgtaaagtgaattgcacaactcagccctgtccaacagccaaggcccccacatgcggactctgcgaagtcgcccgcctacgacaaaatgcagatcagtgctgccctgagtatgaatgtgtgtgtgatccagtcagttgcgatctgccccctgttcctcattgtgaaagaggcttacaacccacactaacgaaccctggggaatgccgacccaactttacctgtgcctgccggaaggaggaatgcaaaagagtgagcccaccctcatgccccccccatcgtttgccaacacttcggaaaacccagtgttgtgacgagtacgaatgtgcttgcaactgcgtcaattccactgtgtcctgccctctggggtacctagcatctaccgctacaaacgattgtggatgtacgactactacgtgccttcctgacaaagtgtgtgtccacaggtccacaatataccctgttggtcagttttgggaggagggctgtgacgtgtgtacttgcaccgacatggaagacgcagtcatggggctgagggtggcccagtgcagccagaaaccgtgcgaagattcttgtagatcaggtttcacttacgtgcttcatgaaggcgaatgttgtggccgctgcctcccctctgcctgcgaagtcgtgactggttctcctcgcggggactcccaaagttcctggaagagcgtaggatcccagtgggcatcccccgaaaatccctgcctgataaatgagtgtgtccgtgtaaaagaggaggtttttattcagcagcggaacgtttcctgcccacagttggaggtaccggtgtgccccagcggatttcagctatcttgtaagacatccgcctgttgtcccagctgccgatgtgagaggatggaagcctgtatgttgaatgggaccgtgatcggtccaggcaagacagtgatgatcgacgtttgtactacatgccgatgtatggttcaggtgggcgtgattagtggctttaaactggagtgtagaaagaccacctgtaatccttgtcccctcggctacaaggaggagaataacacaggagagtgctgcggtagatgcctgccgactgcgtgtactatccagctccggggggggcagatcatgacactgaagcgggacgaaaccctacaagacggctgcgatacacatttctgcaaggtgaacgaacggggcgagtacttctgggaaaaaagagttaccggctgccccccttttgatgagcataaatgtctcgccgagggcggaaaaattatgaagatacccggaacttgctgcgatacctgtgaggaaccggagtgtaacgacatcaccgcccggctgcagtacgttaaagtcggaagctgcaaatccgaggtggaagtggacatccactactgtcagggaaaatgcgcaagtaaggctatgtactcaatagacattaatgacgtgcaggaccagtgcagctgttgttccccgacacggacagaaccgatgcaggtggctcttcattgtactaatggctccgtggtataccacgaggtgctgaacgctatggagtgcaagtgctctccacgcaagtgtagcaag

SEQ ID NO: 12498 - DNA, 8439 bp, Artificial Sequence
  derived and/or modified sequence
atgattcctgcaagattcgctggggtcctcctggctctcgcgctcatcttgccaggaaccctttgcgcggaaggaacgcgcgggaggagctccaccgcgaggtgctcactgttcggcagcgacttcgtgaatacattcgacggctctatgtacagctttgcaggatattgcagttacctgctggctggaggctgccagaaaagatcctttagtattatcggagactttcaaaacgggaaaagagtgagcctgtctgtgtacctcggagagttctttgacatacatttgttcgtgaacggtaccgtgacacagggcgatcagcgcgtgtcaatgccatacgctagcaaaggcctctacttggagacagaagccggctactataaactctccggcgaagcatacgggtttgttgctaggatcgatggctcaggtaattttcaggtcctcttgtcagatcggtactttaacaaaacatgcggactgtgcggaaatttcaacatcttcgctgaagacgatttcatgacacaggaaggaaccttaacaagcgatccatacgacttcgcaaattcatgggcattatcaagcggagaacagtggtgcgaaagggcctctcccccctctagttcttgtaacatttcctctggtgagatgcaaaaggggctgtgggaacagtgccaactgctgaagtctacctctgtgtttgcacgatgccatccactggtggaccctgagccctttgtcgctctgtgtgagaaaaccctgtgcgagtgtgcaggagggttggaatgcgcctgccccgcactgctcgagtacgcacgtacctgcgcgcaggaaggcatggtcttgtatgggtggaccgatcatagtgcttgcagccctgtgtgccccgccgggatggaataccgccagtgcgtctctccctgcgctaggacctgccagtctctgcacattaacgagatgtgccaggagagatgcgtggacggctgctcatgccccgaagggcagctgcttgacgaaggactttgtgtggaaagcacagaatgcccatgcgtccatagcggcaaacgatacccacccggaacctcactttcgagagattgcaacacctgtatctgcagaaactctcagtggatttgttctaacgaagagtgtcccggggagtgcctggtgacaggccaaagtcattttaaaagcttcgacaacaggtattttacgttcagcggcatctgccagtaccttctggcaagagactgtcaggaccactctttctcgatcgtcatcgagaccgttcagtgcgcagatgatagggatgcggtttgcacaaggagtgtgacggtccgcctgccaggccttcacaactccttggtgaagctgaaacatggtgcgggcgtcgcaatggacggccaagacgttcagcttccgctgctgaagggagacctgcgcatccagcacacggtgacggcctccgttcggctttcctacggagaagatctgcaaatggattgggatgggaggggccgtctcttagtgaaactgtcccctgtttacgccggaaaaacctgtggcctgtgtggaaactataacggaaaccaaggcgatgactttctgaccccttctggtctggctgagcctcgggtggaggactttggaaacgcatggaaactgcatggagactgtcaagatctgcagaaacagcattctgatccatgcgcactcaacccacgcatgacacgtttttcagaggaagcatgcgcagtgctgaccagcccaacttttgaggcgtgccatagagcggtcagccccttgccttatctgaggaactgcaggtacgatgtctgtagctgctcggacggaagggagtgcctgtgtggagcactggcctcatacgcagccgcctgtgctggacgtggagttcgcgtggcttggcgggagccagggaggtgcgaattaaactgtcccaaggggcaagtatacttgcagtgtggcacaccttgcaatctcacatgccggagtctgagctatccagacgaggaatgcaatgaggcatgcttggagggatgcttttgtccccctggcctgtacatggacgagcgtggcgattgcgtgcccaaagctcagtgtccgtgctattacgatggagagatttttcagccagaagatatattctctgatcaccacaccatgtgctactgcgaagacggatttatgcactgcacaatgtctggagttcctgggtccctgctccctgacgctgtcttgagttccccattgtcccataggtctaagagatccttgtcttgtagaccaccaatggtcaaacttgtgtgcccagctgacaatctccgtgcagagggactggaatgtactaaaacgtgccaaaactacgatctggaatgcatgagtatgggctgcgtgtccggttgtctgtgtcctccaggaatggtcagacacgaaaaccgctgcgtggctcttgagaggtgcccttgctttcaccagggtaaagagtacgctcctggagaaaccgtcaagattggctgtaatacttgcgtctgtcaggatagaaaatggaattgcaccgatcacgtctgtgacgctacttgctcgactataggaatggcgcattaccttacatttgacggtctgaagtatctcttcccgggtgagtgccagtatgttctcgtgcaagattactgcggatctaaccccggaacctttagaattctggtgggaaacaaaggctgtagccatccttctgtcaaatgcaagaagagggttactatcctggttgaagggggcgaaatcgagctgttcgacggcgaagtgaatgtgaagaggccgatgaaggacgagacccactttgaagtggttgaaagcggaaggtacatcatcttgctcttgggaaaagctttatccgtagtgtgggacagacacttgtctatcagcgtcgtcctgaagcagacataccaagagaaagtatgcggcctctgtggcaattttgatggtatacaaaacaacgacctcaccagtagcaacctgcaagtcgaggaagacccggtggacttcggaaacagttggaaggtcagttctcaatgcgctgatactaggaaggtccctcttgattcctctccagctacctgccacaacaacatcatgaagcaaaccatggtggactccagctgtcggatcctgacaagcgacgtcttccaggattgtaacaaactcgtggacccagaaccgtacctggatgtttgcatctatgacacttgcagctgcgaaagcatcggggactgtgcctgcttctgtgatacaatcgccgcatatgcacacgtctgtgcacagcacgggaaagtggtgacctggagaactgctactttgtgcccacagagctgcgaggaacgtaaccttcgcgagaacggatatgagtgcgaatggaggtacaactcttgcgctccagcttgccaagtgacgtgtcaacacccagagccactggcgtgtccggtgcaatgcgtagaagggtgccacgctcactgcccgccggggaagatattagatgagttactccagacatgcgtcgacccagaggactgccctgtgtgcgaagtggcaggaagaaggtttgcaagcggaaagaaggtgacactcaaccccagcgacccggaacactgccagatttgccattgcgatgtcgtcaacctgacatgcgaggcatgtcaagagcctggagggctggtcgtcccaccaaccgacgcacctgtatctcctactacattgtatgtggaagatatctctgagcctccattgcatgatttctattgctcaaggctgctggatttagtcttcctgctagacggatcctcgcgacttagcgaagctgagttcgaggtccttaaagcattcgttgtggatatgatggaaagacttcgcattagccaaaaatgggtgagagtcgctgtggtcgaatatcacgacgggagccatgcctacattggcttgaaggaccggaaacggccaagcgagctgagaaggatcgcttctcaagttaaatacgctggctcacaggtcgccagcacgagcgaggtccttaagtacaccctgtttcaaatctttagcaagattgatcgcccggaagccagtaggatcaccctgctgctgatggcctcacaggagcctcagaggatgtcccgcaattttgttagatacgtacagggactcaaaaaaaaaaaggtgatcgtgatacccgtcggcattggcccccacgcaaacctgaaacagattagacttatcgaaaagcaggcaccagaaaacaaggcttttgtgcttagctccgtggatgagcttgaacaacaaagggacgagatcgttagttacctctgcgatctggcgcctgaggctccccccccgacactgcctccagatatggctcaagtcaccgtcggtcccggactgctgggagtcagcacattgggacccaaaagaaactcaatggttctggatgtcgcattcgtgttggagggaagcgacaaaatcggagaagccgattttaataggagcaaggagttcatggaagaagtcatccagaggatggatgtcggccaagactctatccatgtcaccgtgttacagtatagttacatggtcaccgtcgaataccccttttctgaagcacagagtaaaggcgacatactgcagcgcgttagggaaatcaggtatcaagggggaaatagaacgaacaccggacttgccttgagatacctatccgaccacagcttcctggtaagccaaggcgacagagagcaagcaccgaacttggtttatatggttaccggaaaccctgctagcgacgaaatcaaaaggctcccgggcgacatccaagtggtgcctatcggcgtaggcccaaatgcgaatgtgcaagaactcgaacgcatcgggtggcctaatgcaccaatcttgatccaagatttcgaaaccctcccacgggaagcccctgatctggtgctgcagaggtgctgctccggcgaaggccttcagattccaactctgagccccgcccctgattgcagccagcctttagatgttatcctgctgttggatggcagctcctcatttcccgctagttacttcgacgaaatgaaaagctttgccaaggctttcatttccaaggctaacatcggacccaggttgactcaagtatccgttttgcaatatgggagcatcaccactattgatgtgccatggaacgtagtccccgaaaaagcacaccttctgtccctggtcgatgtgatgcagagggagggaggtccttcccagattggtgatgcactgggctttgctgttaggtatttaacgagtgagatgcatggggctaggccaggagctagtaaggctgtggtgatcctcgtgaccgacgtgtctgtggacagtgtggatgcagccgctgatgctgctcgctctaaccgtgtcaccgtatttcctatcggaatcggagataggtacgatgctgcccagctccgaattctggccggccccgcgggcgattcaaacgtggtgaaactgcagcgaattgaggatctcccaaccatggtaactctggggaattcctttttgcacaaactgtgcagcggcttcgtcagaatctgcatggatgaggatggcaatgaaaaacgccccggcgatgtctggaccctgccagatcaatgccacaccgtgacgtgtcagcctgacgggcaaacgctgctgaagtcacatagagttaactgcgatcgcggtctccgcccctcctgccctaactcccaaagtccggtaaaggtggaagaaacatgtggttgcagatggacgtgcccatgcgtctgcaccgggtcttctactaggcacatcgttaccttcgatggacaaaacttcaagctgactgggagttgcagctacgtgttgtttcaaaataaagaacaagacctggaagtcattcttcataatggtgcatgcagtccaggcgctagacaagggtgtatgaaatcgattgaagtcaagcacagcgcactgtcagtggagctgcacagcgatatggaggtgaccgtgaatggcaggctggtgtccgtgccctatgtgggcggtaacatggaagtgaacgtgtacggtgcaatcatgcatgaagttcggttcaaccacctgggacacatcttcactttcaccccccagaacaacgagttccagctgcagctgagtcctaagacctttgctagcaagacgtacggcctgtgtggaatctgtgacgaaaacggcgcaaacgactttatgctgagggacggaacagtgacgaccgattggaaaacactcgtacaggagtggactgtccagaggcccggacagacctgccaacctatcctagaggaacagtgcctggtgcccgattcctcccattgccaagtactgttgttaccactcttcgctgagtgtcacaaagtgctggcccctgccacgttctatgcaatatgccagcaggattcctgccaccaggagcaggtgtgcgaggtcatcgctagctacgcccacctctgcagaaccaacggagtgtgcgtagattggaggacacctgacttctgtgccatgagctgcccgcctagcctggtctataaccactgtgaacatggatgccctcgacactgcgatgggaacgtgagttcctgcggcgatcatccatctgaaggctgcttctgccctcccgacaaggtgatgctcgagggctcctgcgtgcccgaggaggcttgcacacaatgtatcggagaagacggagtccagcatcagttcctggaggcttgggtgcccgatcatcagccgtgtcaaatttgcacctgcctgtctgggagaaaggttaattgcaccactcaaccttgccccacagcaaaagcccccacctgcggattgtgtgaagtggccaggctcaggcagaacgcagatcaatgttgccccgagtatgagtgtgtctgcgacccagtatcatgcgatctgccccccgtccctcattgcgagagggggcttcaaccaacactcaccaaccctggcgaatgcagacctaatttcacatgcgcatgcagaaaggaggagtgcaaaagagtgagcccaccgagctgcccgccccatagactgcctacactcaggaagactcagtgctgtgatgaatatgagtgcgcatgtaattgcgttaatagtaccgttagctgcccactcggttatctggccagtacagccaccaacgactgcggatgcaccacaacaacctgcctccccgacaaggtatgcgtgcacagatcaaccatctatcctgtggggcaattttgggaagagggttgtgacgtctgcacctgtacggatatggaggatgctgtcatgggacttcgcgtggctcaatgctcccagaagccatgtgaagattcctgccgcagcggattcacatatgtgttgcacgaaggcgaatgctgcggccggtgtctgccctcagcgtgtgaggttgttactggctctcccaggggagacagccagtcttcgtggaaatctgtgggctcccagtgggcatcccccgaaaatccttgtttaataaacgagtgcgttcgcgtgaaggaggaagtctttatccaacaaagaaacgtcagttgcccacagctggaagtcccagtttgtccatctggattccaactgtcctgcaaaacatccgcctgctgtccaagctgcaggtgcgaacgcatggaagcatgcatgctcaacggcacagtcatcgggcccggtaagactgtgatgatcgacgtttgtactacttgccgctgcatggtgcaagttggcgtcatcagcggcttcaaactcgagtgtcgcaaaacaacctgcaacccatgtcctcttgggtacaaggaggaaaacaacacaggagagtgttgtggccggtgcctacccaccgcatgtacaattcagttgcgaggcggtcaaatcatgaccttaaagcgcgatgaaactctgcaagacggttgcgacacccacttctgcaaagtcaacgagcgcggcgagtatttttgggaaaagagggtgactggttgtcccccgttcgatgagcacaagtgtttggctgaggggggcaagataatgaagatcccaggcacttgttgcgatacttgtgaagagcctgagtgcaatgacattaccgcgaggctgcagtacgttaaagtggggtcttgtaagagtgaagtagaggtcgatatccattactgccagggcaagtgcgcgtcgaaagccatgtatagcattgacattaacgatgttcaggatcaatgtagctgctgctctcctaccaggactgagcctatgcaggtggcactccactgtactaacggcagcgtagtgtatcatgaagtgctcaatgccatggaatgcaagtgttcaccccgcaaatgttcaaag

SEQ ID NO: 12499 - DNA, 8439 bp, Artificial Sequence
  derived and/or modified sequence
atgatcccagctaggttcgctggagtcctgctggcactggcattgatcctccctggtaccctctgtgccgaaggtactcgcggaaggagttccacggcaaggtgttctctctttggatccgattttgtgaacacatttgacggcagcatgtactcctttgctggatattgcagttaccttctggctggtggctgtcagaagcgctctttctcaatcataggagactttcagaatggtaagcgcgtttcactttccgtctatcttggagaattcttcgatatccacttgtttgtgaacggcaccgtcacccagggcgatcagcgcgtctctatgccttacgctagtaagggcctctacttggagactgaggcaggctattacaaactgagcggcgaagcctacggctttgtcgcaaggatcgacggtagcggaaatttccaggtccttttgtctgaccgctactttaataagacctgcggcctgtgtggtaacttcaatatcttcgcggaggacgacttcatgactcaagagggcactctgacaagtgacccctacgacttcgccaactcctgggctctgagttccggtgagcagtggtgcgagagagcctcacccccttcttcctcttgcaacattagttctggagagatgcaaaagggcctgtgggaacaatgccagctgctcaaaagcacctcagtgttcgctcgctgtcatccactcgtagatccagaaccttttgttgcgctgtgtgagaaaaccctgtgcgaatgtgctggcggcctggaatgtgcctgtcccgccctcctggaatacgctcgcacctgcgctcaagagggcatggttctttacggctggaccgatcacagcgcatgcagccccgtgtgccctgccggaatggaatacagacagtgtgtctctccatgcgctaggacttgccagagcctgcatatcaatgagatgtgccaggaacgctgcgttgacggatgctcttgcccagagggtcagctccttgacgaaggtctctgcgttgagtccaccgaatgcccatgtgtccactcaggtaagagataccctccaggtaccagcctgagccgcgattgtaacacatgcatctgtcgcaacagccagtggatctgcagtaatgaggagtgccccggagaatgccttgtgacaggacagagccattttaagagtttcgacaaccgctatttcaccttctccggaatctgccagtacctgcttgctagagactgtcaggaccactcttttagtatcgtgatcgaaaccgtgcaatgcgccgacgacagggacgccgtgtgtacccgctccgtcacagtgaggctgccgggtcttcacaacagcctggtgaagctgaagcatggagcaggcgtggccatggacggccaagacgtgcagcttccgctcctgaagggtgacctgcgcatccagcacactgtgacagcatctgttaggttgtcctatggagaggatttgcagatggattgggacggaagaggcaggcttctcgtgaagctgtctcccgtttacgctggcaagacctgcggattgtgcggcaactacaacggcaaccagggtgacgatttcctgacaccttcaggactcgcagaaccaagggtcgaagacttcggaaacgcctggaaacttcacggagattgccaggacctgcagaagcaacactcagatccttgtgctctgaatccaagaatgacgaggtttagtgaggaggcctgtgccgtactgacaagccccacgttcgaagcctgtcaccgcgcggtgagcccccttccgtacctcaggaattgccgctacgatgtgtgttcatgttctgatggtagggagtgcctgtgtggcgctctggcatcctacgcggcggcctgcgccggtcgcggcgtgcgcgttgcttggagggagccaggtaggtgcgagctcaattgtcctaagggtcaggtgtacctccagtgtggaaccccgtgtaacttgacttgccgctctctctcatatccagacgaagagtgcaatgaagcttgcctggagggatgcttttgccctcctggattgtacatggatgaacgcggtgattgcgtgcctaaagcacagtgcccctgctattacgatggagaaatcttccagccggaggacatcttttcagatcaccacaccatgtgctactgtgaggatggcttcatgcactgtacgatgtccggagtgcccggctcattgctgccagatgctgtcctgagttcacccctcagtcaccgctcaaagaggtcactgtcctgcagaccccctatggtcaaactggtatgcccggccgataaccttagggcagagggactcgagtgcaccaagacttgccagaattacgacttggaatgcatgagcatgggctgcgtttctggttgcctctgcccccccggtatggtgaggcacgaaaacagatgcgtcgcgcttgaacgctgtccatgcttccatcagggcaaggagtatgcccccggcgagactgtcaagatcggctgtaatacttgcgtatgtcaggaccgcaagtggaactgtacagatcacgtgtgcgacgctacctgcagtactataggaatggcccattatctcacattcgatggcctgaagtacctgtttccgggcgagtgccaatacgtgctggttcaggactactgtggttctaaccctggaacttttaggatcttggtgggtaacaagggatgtagtcacccaagtgtaaagtgtaaaaaaagagtcaccatcctcgtagaaggaggagagatcgaactcttcgacggtgaagtgaatgtgaagcgccccatgaaggacgagacacacttcgaagtcgttgaatccggccgctacatcattctgctcctgggaaaggcactgagcgtcgtttgggatagacacctgtctatctctgtggtgcttaagcaaacataccaggagaaagtgtgtggtctgtgcggcaatttcgacggcatccaaaacaacgatttgacctcttcaaatttgcaggtggaagaggacccagttgatttcggcaacagctggaaagtaagtagtcagtgtgccgacacccgcaaagttcccctcgactcttcccctgcaacatgccacaacaatatcatgaaacagaccatggtggactcatcttgcagaattctcacttctgacgtgttccaggattgcaataaactggttgaccccgagccctacctcgatgtatgcatctacgatacttgttcctgcgaatccatcggcgattgtgcatgcttctgcgacacaatcgccgcctatgcccacgtctgcgcacagcacggcaaggttgtgacatggaggaccgccactctctgccctcagtcctgcgaagaacgcaacttgcgcgagaacggttacgaatgcgaatggaggtataactcatgtgcgcccgcgtgtcaagtcacatgccagcaccccgagcctttggcgtgccctgtgcaatgtgtcgagggctgccacgctcattgcccgcccggcaagatcctcgacgagttgctgcagacatgcgtcgacccggaggattgccctgtgtgcgaggtagccggtagaagatttgcttctggtaagaaggtcactctgaacccatcagaccctgaacactgtcagatctgccactgcgacgttgtgaacctgacctgtgaggcatgccaagaaccaggaggccttgtagtcccgcctaccgatgcaccagtatctcctaccacgctttacgtggaggatataagcgagccaccactccatgacttctactgcagcagacttctggacttggtattcctcctggacggaagttctaggctgagcgaggcagagtttgaggtcttgaaggctttcgtggttgatatgatggagaggcttaggatctcacaaaaatgggtccgcgtggctgtggtggaataccatgatggcagccacgcctacattggactgaaagaccgcaaaagaccatccgagcttaggaggattgcctcccaagtcaaatacgccggatcccaggtagcatcaacgtccgaagtgctgaagtacaccctgttccagatcttcagcaaaatcgatagaccggaagcgtctcgcatcaccctccttttgatggcctctcaggagcctcagcgcatgagcagaaatttcgtcagatacgtgcagggactgaagaagaaaaaggtgatcgtgattcccgtgggaattggaccgcacgctaacctgaaacagattaggctgatcgagaagcaggctccagagaataaagccttcgtgttgtcttctgtggacgaacttgagcaacaacgcgacgaaattgtgtcatacctgtgcgatctggctcctgaggcaccaccacctactttgcctcccgacatggcacaagtgacagtgggccctggactgctcggcgtttcaaccctgggcccaaagcgcaatagtatggttctggacgtggctttcgttctcgagggctctgataagataggtgaggcagatttcaataggtctaaggaattcatggaagaggtgatccagaggatggacgtcggccaggacagcattcatgtcaccgtgctgcaatactcctacatggtgacagtcgagtaccccttttccgaggctcagagcaagggcgatatcctgcaacgcgtgagagagatcagataccaaggtggcaacagaaccaatacgggactggctctgcgctacttgtccgatcattccttcttggtgtcccagggagacagagagcaggctcctaatctcgtgtatatggtcactggcaatccagcctcagacgaaataaaacgcttgccaggtgatatccaagtggttccaatcggtgtgggtcctaacgctaacgttcaggaactcgagagaatcggttggccgaacgcgcccatcctcattcaggatttcgagactctccccagagaagcccccgacctcgtattgcagcgctgctgcagtggcgaaggactgcaaatccccactctgagtccagctcccgactgcagccagccgttggatgtaattcttttgctggacggtagtagctctttcccagcctcctactttgatgagatgaaatccttcgccaaggcgttcatttccaaggctaacatcggaccaaggttgacacaggttagcgtactgcaatatggttcaataactacgattgatgtcccatggaatgtcgtccccgagaaagcacacctgctgagccttgtggatgtcatgcagagggaaggaggccctagtcaaattggcgacgcactcggcttcgctgtgcgctatctgacctccgagatgcatggtgctcgccccggcgcaagtaaagcggtcgtgatcctggtcactgatgtttccgttgactctgtcgacgccgctgctgatgctgcccgcagtaaccgcgttacagtgtttcccatcggtattggagaccgctacgacgcagcccagctgaggatcctggctggtccagctggagatagcaatgttgttaagctgcagcgcatcgaggatctgccgaccatggtaactctgggaaactctttcctccacaagctttgttccggattcgtaagaatttgcatggacgaggatggaaacgagaagaggccgggtgacgtgtggacactgccagatcagtgtcacacggtcacttgtcagccagacggacaaactctgctgaagtcccacagagtgaactgcgaccgcggattgcgcccttcttgccccaactctcaaagccctgtgaaagtagaggagacttgcggatgtcgctggacctgcccttgtgtgtgcacgggcagttctacccgccacatagtcacctttgatggtcaaaattttaaacttactggtagctgttcatacgttttgttccagaacaaagagcaggacctcgaggtgatattgcataatggagcttgctcacctggtgcaaggcaaggatgcatgaagagtatcgaggtgaaacactctgcattgagcgttgagttgcacagcgacatggaagtcacagtgaacggacgcctggtgtccgtgccgtatgttggcggtaacatggaagtgaatgtgtatggcgccatcatgcacgaggtccgctttaaccacctcggacatattttcaccttcaccccccagaacaacgagttccaattgcagttgtccccaaagaccttcgcctccaagacttacggcctctgcggtatctgcgacgaaaatggcgccaacgacttcatgcttagggatggaacagttaccactgactggaagactctggtccaggaatggacggtccagaggcctggacaaacctgccaacccattcttgaagagcaatgtctggtgcctgattcctctcactgccaagtgctgctgctgccactgtttgcggagtgccataaagttctggcgcctgcgaccttttacgccatttgtcaacaagacagctgccaccaagaacaggtgtgcgaagtgattgctagttacgctcatttgtgcagaactaacggagtctgcgtcgattggaggacgccagacttttgcgccatgtcctgccccccgtcactcgtgtataaccactgcgagcacggttgccctcgccactgcgacggaaatgtctcctcctgcggtgaccacccttccgagggatgcttttgcccacctgacaaggtgatgctcgaaggttcttgtgttccagaggaagcttgtacacagtgcataggtgaggatggtgttcagcaccaatttctggaagcatgggtgcccgaccatcaaccttgccaaatttgtacttgtttgtctggaaggaaggtaaattgcaccactcagccatgcccgactgcgaaggctcctacatgtggcctctgcgaagttgctcgcttgaggcaaaacgctgaccagtgctgcccagagtacgagtgtgtttgtgatccagtaagctgcgacttgcctcccgtcccgcattgcgagagaggcctgcagcctaccctgacaaatcccggcgagtgccgcccgaatttcacttgcgcttgcaggaaagaggaatgcaagcgcgtctccccaccaagctgcccaccacacagactgccgactctcaggaaaacccagtgttgtgacgagtatgaatgcgcttgtaactgtgtgaacagcacagtttcatgtccccttggttacctggcctcaaccgctaccaacgactgcggatgtactacgacaacatgcctcccggataaagtgtgtgtgcaccgctctactatatatcccgtgggacagttttgggaggagggctgtgacgtgtgtacttgtactgacatggaagatgcggtcatgggcctcagagtcgcacagtgctcccaaaaaccgtgcgaagactcttgcaggagtggctttacatacgtcttgcacgaaggcgagtgctgcggtcgctgccttccctccgcatgcgaagtcgtgaccggctcacccaggggcgactctcagtcaagctggaagtcagtcggctcccaatgggcgagtcctgagaatccatgcctgatcaacgagtgcgttagggtgaaggaagaggtgtttatccaacagaggaacgtctcctgcccgcagttggaggtccccgtctgcccaagcggattccagttgtcatgtaagacaagcgcatgctgcccctcttgtaggtgcgagaggatggaggcctgcatgctcaacggtacggtgatcggtccaggcaagaccgtcatgatcgacgtgtgcaccacatgcaggtgtatggttcaggtgggcgtgatctctggtttcaagcttgagtgtaggaagaccacatgcaatccttgtcctttgggttataaagaggagaataatacgggcgaatgctgcggaaggtgcctgcccacggcctgtacaatccagctcaggggcggccagatcatgacactgaagcgcgacgaaaccctccaagacggatgcgatactcacttctgtaaggtgaacgaaagaggtgagtatttttgggaaaaacgcgtgaccggttgtccaccgttcgacgagcacaagtgtttggccgaaggtggtaaaataatgaagattcctggtacctgctgcgacacatgcgaggaacccgagtgtaacgacatcacagccagacttcaatacgtgaaggtgggctcttgcaagtccgaagtggaagtcgacatccactactgtcagggtaagtgtgcttccaaggctatgtattccatcgacatcaacgacgtccaggaccaatgttcctgttgctcccctacccgcacggaacctatgcaggttgcactgcactgcacaaacggaagcgttgtttatcacgaggtcctgaatgcgatggaatgtaagtgctctccaaggaagtgtagcaaa

SEQ ID NO: 12500 - DNA, 8439 bp, Artificial Sequence
  derived and/or modified sequence
atgattccagctagattcgccggtgtcctcctggccctcgctctgatcctacccgggacgctctgcgctgaggggacacgggggcggtcatccacagctcggtgtagtctgttcggttcagacttcgtcaatacattcgacggctccatgtacagtttcgctggctactgttcttatctgctcgccgggggctgtcagaaacggagctttagcattattggggacttccagaacgggaagcgagttagtctttctgtgtaccttggtgaattcttcgacatacaccttttcgtgaacggcacagtgacacagggggaccagcgggtgtctatgccctatgcttcaaaaggcctgtatttggaaactgaagccggttactacaaactttccggggaggcttacggctttgttgccaggatagacgggagcggcaacttccaggtactcttgagcgatcggtacttcaataagacttgcgggctctgtggcaacttcaacatcttcgctgaagacgactttatgacccaagagggcactctaacgagtgatccatacgacttcgctaatagttgggcactgtcctcaggcgagcagtggtgcgagcgggctagtccgccaagtagctcttgcaatattagttctggggagatgcaaaaggggttatgggaacagtgtcagctgttgaaatccacatccgtgtttgccaggtgccatcccctggttgatccagagccatttgtcgctctgtgcgagaaaacgctatgcgagtgcgccggaggccttgagtgcgcctgccccgccttgctggagtacgctaggacttgtgcccaagagggcatggttctgtacggctggactgaccattctgcctgctctcctgtctgtccggccggcatggaatatcgccagtgcgtatcaccgtgtgctaggacctgtcagtcccttcacatcaacgagatgtgtcaagaaagatgtgtggatggttgttcctgccctgaggggcaattgttggacgaaggactgtgcgtcgaatcaacagaatgcccatgcgtccactccggaaagcgctaccccccaggcacatccttaagtcgagattgcaatacgtgtatctgtaggaatagtcaatggatatgcagcaatgaagaatgtccaggtgaatgccttgtgactgggcagagccactttaaaagtttcgacaatcgctatttcacattctctgggatctgccagtatctcttagcacgcgattgtcaggaccatagcttcagcatagttatcgagacagtgcaatgcgccgacgaccgagatgctgtctgtaccagatctgtcacggtaaggctgcctggacttcacaattctttggttaaactcaaacacggcgctggggttgccatggacggtcaggacgtacagctacccctgcttaagggggatcttcgaatacaacacacggtgaccgcttcagtgcgcttgagctacggggaggatctgcagatggattgggatggaagaggccgccttcttgtaaagctgtcaccagtgtacgcgggtaagacttgcgggctttgtggcaattataacggtaatcagggagacgactttctcactccttccggcttggccgaaccacgtgtcgaggattttggaaacgcttggaagctgcacggtgattgccaagacttgcagaagcagcactctgatccctgcgcgctgaatccccgaatgacccgttttagtgaggaggcctgtgctgttctgacttcaccaacctttgaagcctgccaccgcgctgtatctccattgccttacctgaggaactgcagatacgatgtttgctcatgtagcgacggtagggaatgcctgtgtggcgccctggccagttatgcagccgcttgtgcaggccgtggagttagggtggcctggcgagagcctgggcggtgtgagcttaattgtccaaaaggccaggtttatctgcagtgtgggacaccttgcaacctgacatgccgcagtctgagctatccagatgaggagtgcaacgaggcctgcttggaaggttgtttttgtcctccagggctgtacatggacgaacggggggattgtgtccctaaggcccaatgcccctgctattacgacggcgaaatctttcagccagaggatatcttcagtgaccaccataccatgtgctattgcgaggacgggtttatgcactgcaccatgagtggggtgccaggatccttgctccctgacgctgttctatccagcccactttcacataggtcaaagagatccctaagttgtagaccaccgatggtgaaactggtgtgccccgccgacaacctgagagctgagggactggagtgcacaaaaacgtgtcagaactacgacttagagtgtatgtctatgggatgtgtcagcggatgcctctgccctccaggaatggttcgccacgaaaatcgatgtgtggctcttgaacggtgtccgtgcttccaccaaggaaaagagtatgcgcccggcgaaaccgtgaagataggctgcaacacttgcgtgtgccaggaccgcaagtggaattgcactgatcacgtgtgtgacgctacctgttcaactattgggatggcgcactacctgactttcgacgggttgaaatacttattccccggggagtgccagtatgtgcttgtacaggactattgcggttccaaccctgggacctttaggatcctggtcgggaacaagggctgtagtcacccctccgtcaaatgtaagaaacgcgttactatactggtggaaggtggggaaattgagctgttcgacggggaggtgaatgttaagcggcccatgaaggacgagactcactttgaggtggttgagagcggccgctacattatcctgcttctcggcaaggctctgtccgtggtgtgggaccgacacctgagcatctctgtggtgctaaaacagacataccaggaaaaagtgtgtggactgtgcggcaactttgacggaatccaaaataacgacctgacgtcatccaatctccaggttgaggaagatcccgtagatttcgggaactcttggaaggtttcctcccagtgcgccgatactcgcaaagtccctctcgatagttcccccgctacatgccataacaacattatgaagcagacaatggtagactcatcttgtcggatcttgacctcagacgtgttccaggactgcaataaacttgtggatccagagccctatctggacgtgtgcatttacgatacgtgctcctgtgagtctattggcgactgtgcctgcttctgtgacaccatcgctgcttacgctcacgtttgtgcccagcatggcaaggttgtaacttggcgcactgccactctatgccctcaatcatgcgaggaacgcaacctgcgggagaacggttatgagtgtgaatggagatacaattcctgcgcccctgcctgtcaagttacatgccagcatcctgaacccctggcatgtccagtccaatgcgttgaaggatgccacgcgcactgtccacctggcaaaatactcgacgaactcctccaaacttgcgttgatcctgaagattgcccagtgtgtgaggtcgcaggacgaagatttgcgtcaggtaagaaagtcaccctgaatcccagtgatcctgagcactgccagatttgccactgcgacgtcgtgaacctgacatgcgaagcttgtcaggagcccggggggctggtagttcctcctacagacgcaccagtgtcccctactaccttgtacgtggaagacatttccgagccacccctccatgatttctactgttccaggctccttgatctagtgtttctattggacgggtctagccgactctcggaagctgaattcgaagtgctgaaggcatttgttgtagatatgatggagcgattacgcatcagccagaagtgggtccgggtggcagtggtggagtaccacgacggctcccacgcttacataggcttgaaggaccggaagcgcccctcagagttacgccggatcgccagccaagttaagtacgctggctctcaagtagccagtactagcgaagtgctaaagtacacactatttcagattttttcaaaaatcgataggcccgaagctagtcggatcacactcttgttaatggcctcccaggagccccagaggatgtctcggaatttcgtgagatacgtgcagggactaaaaaagaaaaaggttatcgtgatacccgtcgggattggcccacacgcaaacctgaagcagatacgcttaatagagaagcaggcccccgagaataaggccttcgtgttaagttcagtggacgaactggaacagcagagggacgagattgtctcctacttatgcgatttggcgcccgaggcacctccacctacccttcctcccgatatggcccaggtgaccgtggggcccggactcctgggcgtgagcacactgggcccaaaaaggaacagtatggtcctcgatgtggccttcgttttggaaggcagcgacaagatcggcgaggccgactttaataggtccaaggagttcatggaggaggtgatccagaggatggatgtcggacaggattccattcacgtcaccgtcttgcagtacagttatatggtgacagtggaataccctttcagtgaggctcagagtaagggggatattctgcaacgcgtgcgggagatcagataccaggggggcaatcgcacgaatacgggcctggcccttcggtacctgtcggaccactcatttttggtttcccagggcgatcgcgaacaagcccccaacctagtttatatggtcactggtaacccagccagcgatgaaataaaaaggctccctggggatatccaagttgtgccaataggtgttggcccgaacgcaaatgtccaggagctggagaggatcggctggccgaacgcgccgatcctgatacaggactttgaaaccctaccccgtgaggcccctgacttggtgttacaaagatgctgtagcggtgaagggctgcaaattcctacgctgtctcctgcacctgattgttcacagcccctcgatgttatcttgctgctggacggctcctcctctttccccgcttcctattttgacgagatgaagtctttcgccaaggcctttatctctaaggccaatattggcccgcgcctgacacaggtgagcgttctccagtacggctcaataactaccatagacgtgccttggaatgtggtgcccgaaaaggctcaccttctctccctggtggatgtcatgcaaagagaagggggtcctagccagataggggacgctctgggattcgcagtccgatacctgacaagcgagatgcacggcgctcgacccggagcctctaaggcagtagttattctcgttacggacgtatcagtggatagcgttgacgccgccgcggatgccgcaagaagcaaccgggttaccgtcttcccaatcggaatcggggatcgttacgacgccgcgcagcttcggattctggccggtcctgccggagacagtaacgtagtcaaactccagaggatagaggatttgcccaccatggtgaccctcggtaactcttttctacataagttatgttcaggatttgtgaggatctgtatggatgaggacggtaacgagaaacggcctggggatgtgtggaccctgccagaccagtgccataccgtgacctgtcagccagatggccagaccttgcttaaatcacaccgggtcaactgtgaccgaggactgaggccaagttgtccgaacagccagtctccggtgaaggtggaggagacgtgcggctgcaggtggacgtgtccctgtgtgtgtaccgggtcttcaaccaggcatattgttacgtttgacgggcagaactttaagctgaccgggtcatgtagttatgtcctgtttcaaaacaaggaacaagacctcgaagtaatccttcacaacggtgcatgcagccccggcgccaggcaggggtgcatgaaaagtatcgaggtcaaacactccgcattgtcagtagagctccacagtgacatggaagtgaccgtgaacggccgtttggtgtccgttccctacgtcggaggcaacatggaggttaatgtctacggtgccatcatgcacgaagtccggttcaaccacctggggcatatttttacatttacacctcagaacaacgagttccagctccaactaagtcccaagacgtttgcgagtaaaacatatggactttgtggaatctgcgatgaaaatggggcgaacgacttcatgctccgagacgggacagttactaccgactggaagactctggtgcaagaatggactgttcaacgacctggacagacttgtcagcctatcctagaggagcagtgtctggtacctgactcctctcactgccaggtgctcctgcttcccttgtttgctgagtgccacaaggtgttggcaccggccactttttatgcaatctgccaacaagatagctgccatcaggagcaggtatgcgaggttatcgcttcttatgcacatttatgccgaactaacggtgtgtgtgtggattggagaactccggacttctgtgcaatgtcttgtccccccagcctggtgtacaatcattgcgagcacggatgcccccgccactgtgatggaaacgtcagtagctgcggcgatcacccaagcgaggggtgtttctgcccacccgataaggttatgctagagggtagctgtgtgccggaggaagcatgtacccaatgcattggcgaggacggcgtccaacatcagtttctcgaggcctgggtgccggatcaccaaccgtgtcagatttgcacgtgcctttcagggcggaaggtgaattgcactacgcagccctgccccacagctaaggccccaacttgcggcctgtgcgaggttgccagattgcgacagaatgccgatcaatgctgccctgaatacgagtgtgtctgcgatcctgtatcttgcgatctgccgccagtaccacattgtgagagaggattgcaacccaccttgacaaaccctggcgagtgccgtccaaattttacctgcgcttgccgaaaggaggaatgtaagcgggtgtccccgccaagctgtcccccccatcgcctgcctactttacgaaagacccaatgttgcgatgagtacgaatgcgcttgcaattgcgtcaactccaccgttagctgtccactaggttacctcgcctctaccgctaccaacgactgcggatgcacaaccactacatgcctacccgacaaagtttgcgtgcacaggtccactatttatccggtgggacagttctgggaagaagggtgtgatgtgtgcacttgtacagacatggaagatgccgtgatgggcctccgggtggcccaatgcagccagaaaccatgtgaggatagctgtaggtccggtttcacgtatgtcttgcacgaaggtgagtgttgtgggagatgtctgccgtccgcttgtgaggtcgttaccggcagccctcgtggtgatagccagtccagttggaagtccgtggggtcccaatgggcctccccagaaaacccatgtctaatcaacgagtgtgtcagggtgaaggaggaggtgttcatacagcagcgtaatgtctcctgtcctcagctcgaggtgcccgtttgccccagtggctttcagctctcctgcaagacctcagcctgctgtcccagctgccgctgcgaacgcatggaggcctgcatgttgaatggtacggtgatcggtccaggtaagactgtgatgatagatgtgtgtactacctgccgatgtatggtgcaggtgggagttatcagtggttttaagcttgagtgccggaagaccacatgtaacccctgccctctgggttacaaggaggaaaataacactggcgagtgctgtggccgatgcctgcctacggcgtgcactatccagttacgcgggggccagatcatgactcttaaacgcgatgagactctgcaggatggctgtgatactcatttctgcaaggtgaatgaacgcggcgaatacttctgggagaagcgggttacagggtgtccaccattcgacgagcataagtgtctggccgagggcggcaaaatcatgaaaattcctggaacctgctgcgacacatgtgaagaaccagaatgtaacgacatcaccgcgcggctgcagtatgtgaaagtcggaagctgtaaatccgaggtcgaggtcgacattcattactgccagggcaagtgtgctagcaaagcaatgtatagcatcgacatcaatgatgtgcaggaccaatgttcatgctgcagcccgaccagaacagagccgatgcaagttgcattgcactgtaccaacggctctgtagtgtaccacgaggttctgaacgccatggagtgtaagtgctccccacgcaagtgttcaaaa

SEQ ID NO: 12501 - DNA, 8439 bp, Artificial Sequence
  derived and/or modified sequence
atgatcccagcaagatttgcaggcgtgctccttgctcttgcacttatcttgccaggaactctctgtgcagaaggtactaggggtcggagttcgaccgcacgttgctccctgtttggatccgactttgtgaacacctttgatggatctatgtactcgttcgcgggatactgttcgtatcttcttgcaggaggatgtcagaagcggagcttttccattatcggtgatttccagaatggaaaaagggtgagcctctcggtctacttgggcgagttttttgacattcatctgttcgtgaacgggaccgtcacccagggggatcagcgggtgagcatgccttacgcgagcaagggactgtatctggagactgaagcaggctactacaagctgagcggtgaggcttatggatttgtggcaagaatagatggatcaggaaatttccaggtgctgctttccgaccgctactttaacaagacctgcggcctctgcggcaatttcaatatctttgcggaggacgactttatgacccaggaaggaaccctcacgtcggacccttacgatttcgcaaacagttgggccctttcgtccggggagcagtggtgcgaacgcgcatcgccaccatcttcgtcgtgtaacatttcgtctggtgaaatgcaaaagggactctgggagcagtgtcaattgctgaagtcaacttcggtgttcgcccgatgccatccgcttgttgatcctgagccctttgtggcactctgtgaaaagactctgtgtgaatgcgctggcggcctcgaatgtgcgtgccctgcacttctggaatatgcacggacctgcgcccaagaggggatggttctgtatggttggacggaccatagcgcctgttcgcccgtgtgtcctgcgggaatggaatatcgccaatgtgtgtcaccgtgcgcccggacctgtcaatcgttgcatatcaacgaaatgtgtcaagagagatgcgtggatggttgttcctgcccggaagggcaactgctcgacgaggggctttgcgtggaatccactgaatgtccgtgtgttcactccggaaagagatacccaccgggaacctcactctcaagagattgtaacacttgtatctgcagaaacagccaatggatctgttcaaatgaagaatgcccgggagaatgtcttgtgactggtcagagccacttcaagtcctttgataatagatacttcaccttttcgggcatttgtcaatacctgctggccagggactgccaagatcattcatttagcatagtcatcgaaactgtgcaatgcgcagatgaccgcgatgctgtgtgcactaggagcgttaccgtgcggcttccaggactgcataattcgctcgtgaaactcaagcatggggcaggcgtggcaatggatggacaagatgtgcagcttccacttctgaagggtgatctgagaatccaacacactgtgacggcttccgtgcgcctttcgtacggtgaggaccttcagatggattgggacggaagagggagactgcttgtgaagctgtccccggtctacgcaggaaagacctgtggactgtgcggaaactacaacggaaatcagggagacgactttttgacgccctcaggtcttgccgagccgagagtggaagatttcgggaacgcttggaaacttcacggtgattgtcaagatctgcaaaagcagcatagcgacccatgtgcactgaatcctcgcatgactaggttttccgaggaggcatgtgcagtcctgacttctcccacctttgaagcatgccaccgcgccgtgtcacctctcccttacctgcgaaactgtcgatatgacgtgtgttcatgttcagatggccgggagtgcctgtgcggagcacttgccagctacgctgcagcttgtgccgggcgcggtgtgagggtggcatggcgggagccaggcaggtgtgaactcaactgtccgaagggacaagtctaccttcagtgtggcacgccctgtaacctgacttgtcggtcactgtcgtacccagatgaagaatgtaatgaagcctgtctggaggggtgcttttgtcctcctggactgtacatggatgagcggggagattgtgtgcctaaggcacagtgcccctgttactacgacggtgaaatcttccagccagaggacattttcagcgaccatcatactatgtgctactgcgaagatggatttatgcactgcaccatgagcggcgtccccgggagcctccttcctgatgctgtcctgtcgtcgccacttagccaccgtagcaaaagaagcctgtcatgccggcctccaatggtgaagctggtgtgtccagccgacaacctccgggcagaggggctggagtgtaccaagacctgccagaactacgatcttgagtgtatgtcgatgggctgcgtgtcgggttgtctgtgccctccaggaatggtgagacatgaaaatagatgtgtcgcactggagcggtgtccatgttttcatcaggggaaagagtacgcccccggtgaaaccgtgaagatcggatgcaacacttgcgtttgtcaggacagaaaatggaactgcactgatcacgtctgcgatgcaacgtgtagcactatcggtatggcacactaccttacctttgatggtcttaagtacctgtttccaggtgaatgtcagtacgtccttgtgcaagactactgtgggtcaaatcctggtacctttaggattctcgtggggaacaaaggatgcagccatccgtccgtcaagtgtaagaagcgtgtcaccattctggtggagggtggagaaattgaactcttcgatggcgaagtgaacgttaagcgcccaatgaaggatgaaacccattttgaggtggtcgaaagtggacgctacattatcttgcttctgggaaaagcgttgtcagtggtgtgggatagacatctgtcaatatcggtggtgcttaagcaaacctaccaggaaaaggtctgcggattgtgtgggaactttgatggaattcagaacaatgatctgactagttcgaatcttcaagtggaagaggaccctgtggattttgggaacagctggaaggtgagctcccagtgtgcggatacccgaaaggtgccacttgattcgtccccagcaacttgtcacaataacattatgaagcaaaccatggtggattcaagctgtagaattttgacctccgatgtgtttcaagattgtaacaaactggtagatcctgaaccataccttgatgtctgcatctacgacacctgtagctgcgaatcgattggtgattgtgcatgtttctgtgacacgattgctgcatacgcacatgtctgcgcccaacatggaaaagtggttacttggcgaaccgcgacgctgtgtcctcagtcctgcgaagaaagaaatctccgtgaaaatggctacgaatgtgagtggagatacaactcgtgtgcacctgcgtgtcaggtgacgtgtcagcatcctgaacctcttgcctgcccagtgcagtgcgtcgagggttgccatgcccactgcccacctggtaagatactggatgaactgctccaaacttgcgtggacccagaagattgccctgtctgcgaggtcgcaggccggaggtttgcgtccggaaaaaaggtgactctgaaccctagcgatccagaacattgccaaatatgccactgcgatgtggtcaacttgacctgtgaggcatgccaagagcctggaggactggtcgtgccaccaaccgatgcgccggtgtcccctaccaccctctatgtggaggacattagcgaaccaccactgcatgacttttactgttctcggctgcttgacctggtctttctcctggacggatcatcgcggctgtccgaagccgaattcgaagtcctcaaggcttttgtcgtggacatgatggaacgcttgaggatttcacaaaaatgggttcgtgtcgcagtggtggaataccacgatgggtcacacgcatacattggactcaaggatcggaagcgaccttcggagctccgcaggattgcctcgcaagtcaagtacgccggatctcaagtcgcatcaacttccgaggttcttaagtataccctgtttcaaatcttctccaagattgatcgaccagaggcatcacggattactctcctcctgatggcgtcccaggagccacaacggatgtcacgaaactttgtcagatacgtgcaaggccttaagaagaagaaggtgatcgtcatccctgtaggaataggacctcatgcaaatctcaaacaaattcgacttattgaaaaacaagcgcctgagaacaaggcattcgtgctgtccagcgtggatgaactggagcagcaaagagacgagattgtgtcgtacctctgtgacttggcccctgaagcaccacccccaactcttccacctgacatggcccaagtgaccgttggaccgggacttctcggtgtgtcgactctgggaccaaaacggaactcaatggtgctggatgtcgcgttcgttctggaaggctccgacaagatcggagaggcggatttcaacaggtcaaaggagtttatggaagaggtgattcagagaatggatgtcggacaagactcaatccatgttactgtgcttcagtactcgtacatggtgaccgtcgaatacccgttttccgaagcacaatccaagggagatattctgcagcgagtcagagagatccgttaccagggaggtaatcggaccaatactgggcttgcactccggtacctgtccgatcattcctttcttgtcagccaaggagatagagaacaggcacccaacctggtctacatggtcaccggtaaccctgccagcgatgaaatcaaacgactcccaggagacatccaagtggtgccaattggtgtgggacctaacgccaacgtccaagaacttgaacgaataggttggccaaacgctccaattctgatccaagattttgaaaccctgcctcgggaggcacccgatctggtgctgcagagatgctgttccggagagggacttcagatcccgaccctttcccctgccccggactgttcccaacccctcgacgtgattctgctgctcgatggatcatcgtcatttcctgcaagctactttgacgaaatgaaatcgtttgcgaaagcgttcatctccaaagccaatattggtccgcgtctcacccaggtgtctgtgctccaatacggaagcattaccaccatcgacgtcccttggaatgtggtcccggagaaggcacatcttctctcattggtggatgtcatgcaacgtgaaggaggtccttcgcaaataggggacgcactgggattcgcagttaggtacctgaccagcgaaatgcatggagcacgtcccggagcatcaaaggcggtcgtcattctggtgactgacgtgtccgtggattccgtggacgcagccgcagacgctgcgagatcgaaccgggtgaccgtgtttccaattggtataggagacagatatgatgcggcacagctccgcattctggctgggcctgccggagatagcaacgtggtgaaactccagcgaatcgaagatctgccaaccatggtaactttggggaactcattcctgcataagctctgctcggggttcgtcagaatttgcatggatgaagatggtaacgaaaagcgtcctggagatgtgtggactctgccagaccaatgtcataccgtgacgtgtcaacccgatgggcaaactcttctgaagtcacatagagtgaattgtgacagaggtcttagaccttcatgtcccaacagccagtcgcccgtgaaagtggaagaaacctgtggatgccggtggacttgtccctgtgtgtgtactggaagcagcacgagacatatcgtgactttcgatgggcagaactttaagctcactggctcgtgttcgtacgtgctgttccagaataaagagcaagacttggaagtcattctgcacaacggagcatgttcccccggcgcgagacaaggttgcatgaagagcattgaggttaagcattcagcactgtcggtggaacttcactccgatatggaagtgacggtgaacggtcgccttgtgtcagttccatacgtgggaggaaacatggaggtgaatgtttacggcgcgatcatgcatgaagtcaggttcaaccatctcggacatatcttcaccttcaccccccagaacaatgaatttcagcttcagcttagccctaagacttttgcaagcaagacttacggactgtgtggtatatgtgatgaaaacggagctaacgactttatgcttcgcgatggcaccgtgaccacggattggaaaacgctggtgcaagaatggaccgtgcagcgcccaggtcaaacctgccaacccatacttgaagaacaatgtctcgtccctgatagcagccattgtcaagtgctccttcttcctctttttgcagaatgccataaagtgctggccccagccaccttctacgcaatttgccagcaagattcgtgtcatcaggaacaagtgtgtgaggtgattgcatcctacgcgcatctttgtagaaccaatggtgtgtgcgtagattggcggactcccgatttctgtgcaatgtcatgtccgccatcgctcgtgtacaatcattgtgaacatggttgtcctcggcattgcgatggtaacgtcagctcatgtggtgatcacccgtcagaaggctgtttctgtcctccggataaagtcatgcttgaaggatcctgtgtgcccgaagaagcgtgcacccaatgcatcggagaggacggagtacagcaccaatttctggaggcatgggtgccagaccaccagccatgtcagatctgtacctgcttgtctggtcgtaaagtcaattgtactacccaaccgtgtccaactgcgaaggcgcctacgtgtggcctgtgcgaagtggctaggcttaggcaaaatgccgaccaatgttgtcctgagtatgagtgtgtgtgcgatccagtgtcctgtgatctgcctccagttccgcactgtgagagagggcttcagcccacgttgaccaaccctggagaatgccggccgaactttacctgcgcttgccggaaggaagaatgcaagcgagtgtcacccccaagctgccccccgcacaggctgcccactttgcgcaagacccaatgctgtgatgagtacgaatgtgcatgtaattgcgtgaactccactgtcagctgtcctctgggttacctcgccagcaccgcaacgaacgactgtggctgcaccactaccacttgtttgccagacaaagtgtgcgtccaccgatccacgatttacccagtgggccaattctgggaggagggttgtgatgtatgtacttgtactgatatggaggacgcagtcatgggtctgcgtgtggcacaatgtagccaaaaaccatgtgaggattcgtgccgctcaggtttcacttacgtgctgcatgaaggcgaatgttgcggtcgctgccttccttcagcgtgtgaagtggtcacgggatccccaaggggagactcacagtcctcctggaagagcgtgggctcccaatgggcatcacccgagaacccatgtctgattaacgaatgtgtgagagtgaaggaagaagtctttatacagcaacggaatgtgtcgtgcccgcagctggaggtgcctgtgtgccctagtggtttccagctctcctgtaaaactagtgcctgttgtccgtcctgcaggtgcgaacgcatggaagcctgtatgctcaatgggactgttattggaccaggcaagaccgtcatgattgatgtgtgcactacttgtaggtgcatggttcaggtaggagtgatcagcgggtttaaacttgaatgtcgaaaaactacctgtaatccctgcccccttggctacaaggaggaaaacaataccggggaatgttgtggccgttgtctgccaactgcctgtactattcagctgcggggcggtcagattatgactctgaaaagagacgaaactctgcaagatggatgcgacacccacttttgtaaagtgaacgagcggggggagtacttctgggagaagagagtgacgggttgtcctccttttgatgaacacaagtgtcttgcggaaggaggcaagattatgaagattcccgggacttgttgtgatacttgtgaggaaccagaatgcaatgacatcacggcacgactgcaatacgtgaaggtggggtcctgtaaatccgaagttgaggtggacatccactactgtcagggaaagtgtgcttccaaagcgatgtacagcatcgatatcaatgatgtgcaagatcagtgttcgtgttgttcgcctacccgtaccgaacctatgcaggtggccctgcactgcacgaacggttctgtcgtctaccatgaagtcctcaacgcaatggaatgcaagtgtagcccccggaagtgctccaag

SEQ ID NO: 12502 - DNA, 8439 bp, Artificial Sequence
  derived and/or modified sequence
atgatcccggcacggttcgcaggagtcctccttgcactggcccttatccttccgggtacgctgtgcgccgaaggtactcgggggagatcctccactgcacgctgttcgttgtttggaagcgatttcgtgaataccttcgatggatcgatgtacagcttcgcaggttactgttcctacctgcttgcaggaggatgccagaagcgttcattttcaatcattggcgactttcaaaacggtaagcgcgtgtcactgtcagtgtacctgggcgagttttttgacattcatctctttgtgaacggaaccgtgacccaaggagatcaaagagtctcgatgccttacgcatccaagggactctacctggaaactgaagcagggtactacaaactttcgggagaagcctatggctttgtggcaagaatcgatggatctgggaactttcaagtgttgctgtcagataggtatttcaacaagacgtgtggtctttgcggaaatttcaacatttttgcagaggatgactttatgacccaggagggtactctgacttccgatccttatgactttgcaaactcgtgggcactgtccagcggagaacaatggtgtgaaagagcgtccccaccctcgtcgtcctgcaacattagctccggcgaaatgcaaaaaggactttgggagcagtgccagctcctgaagtcgaccagcgtctttgcgcgatgtcaccctcttgtggatcccgagccattcgtggcgctttgtgaaaaaactctttgtgagtgcgcaggtggccttgaatgtgcatgtccagctcttctggaatatgcaagaacgtgtgcccaggaaggtatggtcctctacggatggaccgaccattcagcatgttcgcctgtttgcccagcaggcatggagtaccgtcagtgcgtcagcccctgtgcacgaacttgtcagtcgctgcacattaacgaaatgtgtcaggagcggtgtgtggatgggtgttcgtgtcctgaaggtcagctccttgacgaaggactgtgtgtggaaagcaccgagtgtccctgcgtccattcgggtaagcggtatccaccaggtacttccctctcccgggactgcaacacttgcatctgtcgtaactcccagtggatctgtagcaatgaagaatgcccgggggagtgcttggtgaccggacagagccatttcaaatcatttgataatcggtactttacttttagcgggatttgtcaatacctccttgccagggactgccaagaccattccttttcaatcgtgatcgaaactgtccaatgcgcggatgaccgagacgccgtgtgcaccaggagcgtaactgtgaggctgcccggtttgcacaactcgttggtcaaacttaaacatggcgcaggcgtggcgatggacggacaagatgtgcaactccctctgttgaaaggagacttgagaattcaacatactgtgacggcaagcgtgagactttcctacggagaagatctgcagatggactgggatggacgtggccgactgttggtaaaactgtctcctgtgtacgcaggaaagacttgtggtctttgtggtaactacaatgggaaccagggagatgattttcttacccctagcggtcttgcagaaccacgcgttgaggactttggaaatgcctggaaactccatggcgattgtcaggatctgcaaaagcagcactcggatccttgtgcactgaacccccggatgactaggttttcagaagaggcctgtgcagtcctgaccagcccaacttttgaagcatgccatagagcagtgtcgcctcttccataccttcggaactgccggtacgacgtgtgcagctgctcagacggtagagaatgtctctgtggggccctcgcatcatatgcagcagcgtgtgcaggacgcggggtgagggtggcatggcgtgaaccaggacggtgtgaattgaactgcccaaagggtcaggtgtacctgcaatgtggaaccccatgcaatcttacctgtcggtcgctttcataccctgatgaggagtgtaacgaagcatgcctcgagggttgtttttgtccaccaggcctttacatggatgaaagaggagactgtgtgcccaaggcacaatgtccttgttactacgacggcgagatttttcagccggaggatatcttcagcgatcaccataccatgtgttactgcgaagatggatttatgcattgcactatgtcaggcgtgcccggttccttgttgcccgatgcagtgctttcttcacctctttcgcatcgttcaaagcgatccctcagctgtaggccacccatggtgaagttggtgtgcccggcagataaccttcgcgcagaaggactcgaatgtaccaaaacctgtcagaactacgatcttgaatgtatgtcgatgggatgtgtgtcgggctgcctctgcccacctggaatggtgcgacatgaaaatagatgtgtcgcactggagagatgcccgtgtttccaccaaggcaaggagtacgcgcctggtgagacggtgaaaataggctgtaacacctgcgtgtgtcaagatcgcaaatggaactgtaccgatcatgtgtgtgacgctacttgctccaccatcgggatggcgcattacctcactttcgatggtctgaagtacctgttccctggagagtgccaatacgtactggtgcaagattactgcggttcgaatcccggtacgttcaggatccttgtgggcaacaagggatgctcacaccctagcgtgaagtgtaaaaagcgggtgactatactcgtggaaggcggagagattgagctctttgacggtgaggtgaacgtgaaaagacctatgaaggatgaaacccactttgaggtggtggaatcgggacgctacatcattctgctcctcgggaaagcactgtccgtggtgtgggatagacatctgagcatctcggtcgttctcaaacagacttaccaagagaaggtgtgtggcctctgtggcaattttgatgggattcaaaacaatgatcttacttcgtccaacctgcaggtggaagaggatccagtggattttgggaattcctggaaggtgtcgtcacagtgcgcggacacccgtaaggtgccactggactcgtcgcctgccacctgtcataacaacattatgaaacagaccatggtggactcgtcctgcagaattctgactagcgacgtgttccaagattgcaataagctggtggacccagaaccatacttggatgtgtgtatctacgatacctgctcctgcgaatccattggagattgtgcatgtttctgtgataccattgcagcgtatgcacatgtctgtgcacaacatgggaaggtggtgacttggcggactgcaaccctttgtcctcagtcgtgcgaagaacgcaacctgagagaaaacggatacgaatgcgagtggaggtacaacagctgcgcacccgcatgtcaagtgacttgtcaacaccctgaacctttggcatgtcctgttcagtgcgtcgaaggttgtcatgcacactgtcctcctggaaagattcttgatgaacttctccaaacctgtgtcgatcctgaagattgtcctgtgtgtgaagtcgcaggcagacggtttgccagcggtaagaaggtgaccctgaacccatccgatcctgaacactgtcagatatgtcattgtgatgtggttaacctgacctgcgaggcatgtcaagagccaggtggacttgtcgtccctcccaccgatgcacctgtctcaccgaccactctgtacgtcgaggatatcagcgaacctcctcttcacgacttttactgttcgcgtctgctggatctcgtgttcctgttggatggatccagccgcctttccgaggctgaatttgaagtgcttaaagcgtttgtcgtcgatatgatggaacgattgcgtatttcacaaaagtgggttagagtggccgtggttgaataccacgatggatcacatgcctacatcggcttgaaagaccggaaaagaccctccgaactccgccggattgcgtcacaagtgaagtatgccgggtcccaagtggcctccacttcagaagtcctcaagtacactctgttccagattttctccaagattgatcgtcccgaagcaagcagaataaccctcttgctgatggcgtcacaagagccacaaaggatgagccgaaatttcgtgcgttacgtccagggactcaagaagaagaaggtcattgtgatcccagtcggtatcggaccgcacgcaaacctgaagcagatccgccttattgaaaaacaagcgccggaaaacaaagcatttgtgctgagctcggtcgatgaacttgagcagcagagagacgagatcgtgtcctacctttgcgacttggccccagaagcaccacctcctaccctcccacctgacatggcacaggtgaccgtcggacctggtctgctgggtgtctccacgcttggtcctaaaagaaactcaatggtgcttgacgtggcgttcgtgctcgaagggtcggacaagattggggaagcggatttcaatcgctctaaggagttcatggaagaggtgatacagagaatggacgtgggacaagattcaatacatgtcactgtcctgcaatactcttatatggtgacggttgaataccctttttcagaagctcaatcgaaaggagatattctgcagcgagtgcgagagattcgctaccaggggggaaaccgtaccaatactgggttggcacttagatacttgtccgatcactcgttccttgtgtcacaaggagatcgagagcaagcaccgaacctggtctacatggtgacggggaatccagcatcggatgaaatcaagagactccctggagacatccaagtggtgccgatcggagtgggacctaacgcaaacgtgcaggagctggaacgcattggctggcctaacgcgccgatacttattcaagatttcgaaacccttccccgggaagcgcccgatctggtgctccagcgctgttgctcgggtgaaggactccagattcctactctttctcccgcacccgattgctcacagcctttggatgtgattctccttcttgacggatcctcatcgtttccagcgtcgtacttcgatgagatgaagtcatttgctaaggcattcattagtaaggcaaacattgggcccaggcttactcaggtgtctgtgctgcaatacggaagcatcaccaccatagatgtcccctggaatgtggtcccggaaaaggcccatcttctctcacttgtggatgtcatgcaacgagaagggggtccttcgcagattggagatgcactgggtttcgcagtccgataccttacctcggagatgcatggtgcccgccccggagcatcaaaggcagtcgtgatcttggtcaccgacgtgtccgtggattccgtggacgcagcagccgacgcggcgagatcgaacagggtcaccgtgtttccgattggaattggtgatagatacgacgcagctcagcttagaattctggctggtccagccggcgattcaaatgtcgtgaagctgcaaaggatcgaggacctgcccacgatggtgactctgggtaattcctttctccataagctgtgctcgggttttgtcagaatatgcatggacgaggatggaaatgagaagaggccaggcgatgtgtggactctgcccgaccagtgccacaccgtgacctgccagcctgatggccaaactctcctgaagtcccacagagtgaattgcgatcggggactgcgacccagctgtcctaatagccaatcgcctgtcaaggtcgaggaaacctgtggatgtcggtggacctgtccttgcgtctgtaccggaagcagcacgcggcatatcgtgacgtttgacggacaaaacttcaagttgaccggaagctgttcgtacgtgctgtttcagaataaagaacaagacctcgaggtgatccttcacaacggcgcatgttcacctggggctagacagggctgtatgaagtctatcgaggtcaagcatagtgctctgagcgtcgaactgcattcggatatggaggtgaccgtcaacggtcgccttgtgtccgtcccctacgtgggtgggaacatggaagttaacgtgtacggggcgatcatgcacgaagtccggttcaatcatcttgggcacatattcacgttcactccccaaaacaacgagtttcaactccagctttcccctaagacttttgcttcaaagacctacggcctgtgcggaatatgcgatgaaaacggcgcaaatgactttatgctcagggatggaaccgtcaccaccgactggaaaacgctggtgcaggagtggactgtgcaaagaccgggacaaacttgtcaaccaatccttgaagagcagtgcctcgtgcctgattcgtcgcattgtcaggtgctgttgctgccccttttcgcagaatgtcataaggtgctcgcccctgcaactttttacgcaatctgtcaacaggacagttgccatcaggaacaggtgtgtgaagtgattgcatcctacgcacatctgtgtagaaccaacggagtgtgcgtcgattggcggaccccggacttttgtgccatgtcgtgtcctccgagcctcgtttacaaccattgtgagcatggctgtcctcggcactgtgatggaaacgtgtcctcatgcggggaccatccatcagagggatgtttctgtccaccggacaaagtgatgctggagggatcatgcgtcccggaagaagcgtgtactcagtgtattggcgaggatggtgtccagcatcaatttctggaagcatgggtgccagaccatcagccttgtcaaatttgtacttgcttgtcaggacgcaaggtgaattgcacgactcagccttgtcccaccgcaaaggctccaacttgtggactttgcgaagtggcccggcttagacagaacgcagatcaatgttgccccgaatatgagtgtgtgtgtgacccagtgtcctgtgatcttccccccgtcccccattgtgaaagaggccttcagcctacccttaccaatccaggagaatgccgccccaactttacctgcgcatgtcggaaggaagagtgcaagcgcgtctcgcctccgtcgtgtcccccacataggctcccgactctgcgaaagacccagtgttgcgatgagtacgaatgtgcctgtaactgtgtgaactcaaccgtgagctgtccattgggatatttggcctcgaccgccactaatgactgtggttgtaccaccaccacttgccttccagataaggtctgtgtgcacagatcgactatttacccagtcggacagttctgggaggagggatgtgatgtctgcacttgtaccgatatggaggacgcagttatggggcttagagtcgcacagtgttcgcagaaaccctgtgaggatagctgtcggagcgggtttacttacgtgctccacgaaggggagtgttgcggtagatgccttccatcggcttgtgaagtggtgaccgggtcgccacgaggggactctcagtcgagctggaagagcgtcgggtcgcagtgggcctccccagaaaatccatgtctcattaacgaatgcgtgagggtcaaggaagaagtgtttatccaacagcggaacgtgtcctgtccccagcttgaagtgccagtctgcccttctggattccagttgtcctgtaagacttccgcctgttgcccttcgtgccgttgcgaacgcatggaggcctgtatgctgaatggaaccgtgatcgggccagggaaaactgtgatgattgatgtgtgtaccacttgccggtgtatggtccaagtgggggtcattagcggctttaagttggaatgtcgcaagactacctgcaatccttgtcctctgggatacaaggaggagaacaataccggtgagtgctgtggtcggtgcctgcctactgcatgtactatccaacttaggggaggccagataatgactctcaagcgggatgaaacgcttcaggacggatgtgatactcatttctgtaaggtcaacgagcggggagagtacttttgggaaaagcgggttacgggttgtcctcctttcgatgaacataaatgcttggctgagggtggaaagatcatgaagattcctggaacttgctgtgatacctgtgaagaaccagaatgtaatgatatcacggcacgacttcaatacgtcaaggttggttcctgtaagagcgaggtcgaagtcgacatccattactgtcaggggaagtgtgcaagcaaggcaatgtatagcattgatatcaacgatgtgcaagatcaatgtagctgctgttcaccgacccggacggaacctatgcaggtggcattgcattgtactaacggatccgtggtgtaccatgaggtgctgaacgcaatggagtgtaaatgttcgcctcggaagtgctcgaaa

SEQ ID NO: 12503 - DNA, 8439 bp, Artificial Sequence
  derived and/or modified sequence
atgatcccagcccggtttgcgggtgttctgctcgcattggccttgattctacctggcaccctctgtgctgaaggaaccaggggcaggagttctaccgcacgctgtagtctgttcgggtccgattttgtgaacacttttgatggttcaatgtattcctttgcgggttattgctcttatttactggctggggggtgtcagaaacggtcgttttcaatcatcggcgactttcaaaacgggaagagggtgtctctgtcagtctatcttggggagttttttgatatacatctcttcgtgaacggcaccgtgacccagggagaccagagagtgagcatgccatacgcctccaaggggctttaccttgagacagaggctggatattacaaactatctggcgaagcgtacgggtttgtggcaagaatcgatgggtctggaaattttcaagttctgttgtctgatcgctacttcaacaagacctgtggtttgtgtggcaacttcaatatattcgcagaagacgacttcatgactcaggaaggcaccctcaccagcgatccttacgacttcgcaaacagctgggcgttatcgagcggcgaacagtggtgtgagagggcctcaccacctagttcgtcgtgtaacatcagcagtggtgaaatgcaaaaggggctgtgggagcaatgccagctcctgaagtcaacctcagttttcgccaggtgccaccccctagtggacccagagccgttcgtggcactgtgtgagaaaactctgtgtgagtgcgcggggggattggaatgcgcttgcccagcactgttggaatacgcccgaacgtgcgctcaggaggggatggtcctttacgggtggactgatcacagtgcctgctcccccgtgtgtcccgccggaatggagtatcgtcagtgcgtgagtccttgtgcccgaacctgtcagtccctccacatcaacgagatgtgccaggagagatgtgttgatggctgttcatgcccagaaggccaactgctggatgaaggcctttgtgtggaaagcaccgaatgtccttgtgtgcactctggtaaaagataccccccaggaacttctctttccagggattgcaacacatgtatctgcaggaattcacagtggatctgttccaatgaggagtgtcctggagaatgcttggtgactggccagagtcattttaagagctttgacaaccgatacttcacatttagcggaatatgccagtacctattagcgcgggattgtcaggaccactcatttagcatcgtcattgagacagtccagtgcgcagacgaccgggacgcagtttgtaccaggtccgtaaccgtgcgccttcctggattgcataactccctggttaagctaaagcacggggctggggtggcgatggacggacaggatgtgcagctgcctcttctgaagggcgatctgaggattcagcatacagttactgcctctgtccggctatcttatggtgaggaccttcagatggactgggatggccgtgggcgcctgctggtcaaactctctcctgtctacgctggtaagacctgcggcttgtgtgggaactataatggcaatcagggggatgactttctcacgcccagcgggttggctgaaccccgtgtggaagactttgggaacgcgtggaagctgcacggcgactgccaggatttgcagaaacagcactctgacccctgtgctctgaatcccaggatgacccggttttccgaggaagcctgtgccgttctcacttctcccacgttcgaagcttgccatcgggcagtgtcaccactcccatacctgcgcaattgccgctatgatgtgtgttcctgtagcgatggacgagaatgtttgtgcggtgctttagcctcatacgctgccgcatgcgccggcaggggggtgcgggtagcctggcgcgagccgggaaggtgtgagctgaattgtcccaaaggacaggtgtatctacagtgtggaactccgtgcaatctcacttgccgaagtttatcttacccggacgaagaatgtaacgaggcttgcctcgagggatgcttttgccccccaggactgtacatggatgagcgtggagactgcgtgcctaaagctcagtgcccctgttattacgacggagaaatttttcagccagaggatattttcagcgaccatcatacaatgtgctattgtgaagatggctttatgcattgtactatgagcggcgtgcccggctcattattaccggatgctgtgttgagctcacctttgagccacaggagtaaaagaagtctatcctgtcggccccccatggtgaaactggtgtgtccagccgataatctgagggctgagggattggaatgcaccaaaacttgccagaattacgatctggaatgtatgagcatgggatgtgtgagtggttgcctgtgcccccctgggatggtccggcatgaaaatcgctgtgttgccctggaacgttgcccctgtttccaccagggcaaggaatacgccccgggggagacagtgaagataggatgtaatacttgcgtttgccaggacagaaagtggaattgtaccgatcacgtgtgtgacgccacctgctcaacgatcgggatggctcattatttgacatttgacgggcttaagtatcttttcccaggcgaatgtcagtatgttttagttcaggactactgcggttcaaatccgggtacctttcgaatcctcgtgggaaataagggttgtagtcacccctctgtgaaatgcaaaaaacgcgtgaccattctggtagaaggaggggaaatagaattatttgatggagaagtgaacgtcaagagacccatgaaagacgagactcactttgaggtggtcgagtctggccgctacattattctgctgctagggaaggctctctctgtggtgtgggaccggcatctcagcattagtgtcgttctgaagcagacgtatcaagaaaaagtttgtgggctctgcggcaactttgacggcattcagaataacgacctgacctcttctaatctacaggtggaggaggatcccgtagattttggcaattcctggaaagtttcatcacagtgcgccgatacccgcaaggtaccactggactcgagccccgccacatgccacaataatatcatgaagcagacaatggtagactcttcatgccggatccttacctccgatgtgtttcaggattgcaataagttggtggatccggaaccttacctggatgtctgtatttatgatacatgctcgtgcgagagcatcggggattgtgcctgtttttgcgacactatcgcagcatacgcgcatgtttgcgctcagcacggaaaagtggtaacctggaggaccgcgactctgtgcccacagtcttgtgaagagaggaatctaagggagaacggatatgagtgtgagtggcgatataacagctgcgcccccgcctgccaagtgacttgccagcatccggagcccctggcttgtcctgtccagtgtgtggaaggttgccacgcccactgcccaccaggaaaaatcctggatgagctgctacagacctgcgtggacccagaagactgtccagtgtgcgaggtcgctggacggcggtttgcgtccggaaagaaggtgacattgaaccctagcgatcctgagcactgtcagatctgccactgtgatgtggttaacctgacatgcgaagcttgccaggaaccagggggactggtcgtgccccctaccgacgctcccgtgtctcccactaccctctatgtggaggacatatcggagccacctctacacgatttttattgctctcgcctcctggatttggtcttcttgttggatggatcgtcccgacttagcgaggccgaatttgaggtgctaaaggccttcgttgtagatatgatggagaggctgagaatctctcaaaaatgggtgcgggtcgcagtggttgagtaccatgatggctcacacgcttacattggattgaaggacaggaagagaccttccgagctgaggcggattgcatcgcaagtgaaatatgctggttcgcaggtggcttcaacctccgaggtgctgaagtatactctcttccagattttctcaaaaattgatcgaccagaagcttctcggattaccttgctgcttatggctagccaagagcctcaacgaatgtcacgtaacttcgtgaggtatgtccagggactgaagaagaagaaagtaatcgtaattcccgtggggattggtcctcacgcaaatctaaagcagattcggcttatagaaaaacaggctcccgagaataaagcatttgtgctttctagtgtggatgaacttgagcagcaaagggatgaaattgtcagctatctttgtgacctcgccccagaagctcctccaccgaccctgccaccggacatggctcaggtgactgtggggccaggcctgttgggggtttctactctcggccccaagcgtaactctatggttctcgacgtggctttcgtgctagaaggcagcgacaaaatcggtgaggccgacttcaaccgcagcaaggaattcatggaggaagttatccagaggatggacgtgggccaggacagtatccatgtgactgttctccaatacagctacatggtgactgtggagtaccccttctctgaggctcagagcaaaggagatattcttcaacgcgtgagggaaatcagatatcaggggggcaatagaaccaatacaggacttgcgctgagatatctctctgatcacagctttctggtgagccagggcgacagggaacaggccccaaacctagtgtatatggtgactggcaatccagcgtccgacgagattaaacgcctacctggggacatccaggtggtcccaattggtgtgggtcctaatgccaatgtacaagagttggagcgtattggatggcctaatgccccgatcctgattcaagacttcgagactctccctcgcgaagctcccgacctggttttgcagcgctgctgcagtggggaagggttacagattccaactctgtcacctgccccagactgctctcaacctttggacgttattttgttgttggatgggagttctagttttccagctagctattttgacgaaatgaaaagcttcgccaaggcttttatttccaaggcaaatatcgggcctagactgacacaagttagcgttttgcagtatgggagtattaccactatcgacgttccttggaatgttgtccctgaaaaagcccatctgctgagtctagtcgacgtcatgcagagggagggcgggccttcccagattggcgatgcgctgggctttgccgttaggtatctcactagtgaaatgcacggggctagaccaggagcgtccaaggctgtagtgattctcgttacagacgtgagcgttgattcagtggatgcagccgcagacgcagcacgaagtaatcgggttactgtttttccaatcgggataggcgataggtacgatgccgcccagctgcgaatcctcgctgggccagccggagacagcaatgttgtgaaactgcagagaatcgaagacttgcctacaatggtgacgcttggcaactctttccttcacaagctgtgcagcgggtttgtccgaatttgtatggatgaggatgggaacgagaagcgaccgggcgacgtgtggacgttaccagatcagtgtcatacagtgacatgtcagcccgatgggcagacacttctgaagtctcacagagtcaactgcgaccgtggactgcgtccctcgtgtcctaattcccagtctccagttaaagttgaggaaacatgcggatgcaggtggacttgcccatgtgtctgcacagggtcttccacaaggcatattgtcacgttcgatggtcagaatttcaagctgacaggatcttgttcgtacgtgctcttccagaataaggaacaggacctggaggttattctgcacaacggagcttgctcaccaggcgcaaggcagggttgtatgaagtctatcgaggtcaagcactctgcgctaagcgtggaacttcactccgatatggaggttacagtgaatggcagactcgtttccgttccatacgttggaggaaacatggaagtgaacgtgtacggggcgatcatgcatgaggttcggtttaatcacctcgggcatatttttacgtttaccccacagaacaacgagtttcagcttcagttgtctcctaagaccttcgcctctaagacatacggtctgtgtggcatatgcgacgagaacggcgccaatgacttcatgctgagggatgggactgtcacaactgactggaagactctggttcaagagtggaccgtacagcggcctgggcagacgtgccagcccatcctggaggaacaatgcctcgtgccagacagcagccactgtcaggtgcttctgctcccacttttcgctgaatgtcacaaagtgctcgccccggctaccttttacgccatttgtcagcaggatagctgccaccaggagcaagtttgcgaggtcatcgcctcttatgcacatctgtgtagaacaaacggggtgtgcgtggactggcggactcccgacttctgcgccatgtcatgccctccaagcctcgtgtacaaccactgcgagcatggctgtccgcggcactgcgatgggaacgtgtcctcctgtggagatcacccctcagaaggatgtttttgcccaccagataaagtgatgctggaaggatcttgtgtgcctgaagaggcttgcacacagtgcattggagaggacggggtgcagcaccagttcctggaagcttgggtgccagaccaccagccctgccagatatgcacctgcctttcaggccgcaaagtgaattgcaccacccagccctgccccaccgccaaggcgcctacatgtgggctttgcgaggtggccagactgaggcagaacgcggatcagtgttgcccagagtacgagtgcgtatgcgacccggtgtcgtgcgatctgccaccggtcccgcactgtgagaggggcttgcagcccacgttaacgaaccccggagagtgtcgccccaactttacctgtgcctgccggaaggaggagtgcaaaagggtgagcccaccgtcctgtccccctcaccgattacctactcttcgaaagacacagtgttgtgatgagtacgagtgcgcctgcaattgtgttaactcaactgttagctgcccccttggctacctggccagcaccgcaacgaatgactgcgggtgtacgaccacaacctgtctgcccgataaggtgtgtgtacaccggtccacaatttatccagtaggacagttttgggaggaggggtgcgatgtttgcacatgtactgacatggaagatgccgtaatggggctcagggttgcccaatgctcacagaagccttgcgaggattcttgtagaagtggtttcacatatgtcttacacgagggcgaatgttgcggccggtgcttaccgagcgcatgtgaggtcgtcaccggatctccgcgaggggattctcagagtagctggaagagtgtcggctcgcagtgggcctcacccgagaacccttgcctcatcaacgagtgcgtgagagtgaaggaggaggtgtttatacagcagagaaatgtcagctgtcctcaactggaggttccagtttgcccgtcgggctttcagcttagctgtaagacgtccgcctgttgcccgtcctgcaggtgcgagagaatggaggcttgcatgctgaacggtaccgtaatcggccccggcaagaccgttatgatagatgtgtgcacaacctgtcgctgtatggttcaagtgggcgtgatcagcggtttcaaattggagtgccggaaaaccacttgcaacccctgcccactggggtacaaggaggagaacaacaccggagaatgttgtggcaggtgtctccctactgcatgcaccatacagcttcggggggggcaaattatgaccctgaagcgcgacgagacgctgcaagacgggtgtgacacccatttttgcaaagtgaatgagcggggagaatatttctgggagaaaagagttaccgggtgccctccatttgatgaacacaagtgtctggctgaaggaggcaagatcatgaagatccctggcacctgctgcgacacatgcgaagagccggagtgcaacgatataacggcacgcctgcagtatgtgaaagttggcagttgtaaatccgaggtcgaagtggatatacattactgtcaggggaagtgtgcctctaaggccatgtactccatcgacatcaacgatgtccaggatcagtgttcctgttgcagtcctaccagaaccgaaccaatgcaagtagctctacattgcacaaacggctctgtggtctaccatgaggtgttgaatgctatggaatgtaaatgctcaccacgcaagtgctccaaa

SEQ ID NO: 12504 - DNA, 8439 bp, Artificial Sequence
  derived and/or modified sequence
atgataccagctaggttcgcaggcgttctgctcgctctggcgcttattcttcccgggactctgtgcgcagaaggaaccaggggtcggagtagcactgcgcgttgctcactctttgggtcagatttcgtcaataccttcgatgggtctatgtactcctttgccggatactgcagctatctcttagccggcggctgtcaaaagcgaagcttttccataattggggactttcagaatggtaaaagggtttcactgagtgtatacctaggcgagttctttgacatacatttgtttgtcaatggcaccgtgacacagggggatcagcgtgtgagtatgccatacgcttctaagggcctctatctggagaccgaggccggctactacaagctgtctggggaagcctatgggtttgtggcccgcatagatgggtccggaaattttcaggttctcctctccgacaggtattttaataagacctgtggactgtgcggaaactttaacatttttgccgaagacgactttatgacccaggaaggaaccctgaccagtgacccttatgacttcgctaattcatgggcactgtcatctggggaacaatggtgcgaaagggcctccccaccttcctcctcgtgtaatatcagctccggcgaaatgcagaaaggcctgtgggagcagtgtcaactactcaagtcgacatctgtatttgctaggtgtcacccgctggtggaccctgaacctttcgtggccttgtgtgaaaaaaccctgtgtgaatgtgcgggtggcttagagtgcgcctgccccgcattgttggagtacgctcggacttgcgcacaggagggcatggtgctgtacgggtggacggatcactctgcatgctccccggtctgccctgcagggatggaatacaggcagtgcgtctccccttgtgcccgcacatgccagagcctgcacattaatgaaatgtgtcaggagaggtgtgtagatggttgtagttgcccagaagggcaactgctggacgaggggctatgtgtggaatccactgaatgtccctgcgtccatagcggaaagagatatcccccgggcactagtctctctagggattgcaacacttgtatttgccggaattcccagtggatatgctccaatgaggaatgtcccggagagtgtctggttaccgggcagagtcacttcaagtccttcgataatcggtattttacgttctcaggcatttgtcaatatctgctggcccgggactgtcaagatcacagtttttcgatcgtgattgagacagtacagtgcgccgatgaccgtgacgcggtttgtacccgctctgtgacggtgcgtctgcctggactgcataactctctggtaaagcttaaacacggagcgggcgtcgccatggacggccaagatgtccaactgcctcttctgaaaggtgatctgaggatacagcacactgtgaccgcctctgtgcgactgtcctacggagaagacctgcaaatggactgggatggacgtggccgactgctggtgaaattatcccccgtgtacgccggcaagacctgcgggctgtgcgggaattacaacggtaaccagggggacgactttctgacgcccagtggactcgccgaaccacgtgtggaagacttcggaaatgcctggaagctgcatggtgactgccaggacctgcagaagcagcattctgacccttgtgcattgaacccacgcatgactcggttttccgaggaagcgtgtgccgtcctgaccagtccaacctttgaggcatgccatcgggcagtctcccccctgccttacctgcgcaattgtcgctacgatgtctgttcatgttctgatggtagggaatgcctgtgtggagccctcgcaagttacgctgctgcctgcgctgggcggggcgtccgcgttgcctggagggaacccggacggtgcgagcttaattgccctaaaggccaggtctatctccagtgcggaacaccttgtaatctgacgtgccgcagcctatcctatccagacgaagagtgcaacgaagcttgcctggagggctgcttctgtccgccaggcctgtatatggatgagaggggggattgcgtgcctaaagcgcagtgcccatgctactatgatggtgagatcttccagcccgaggatattttttcagaccaccatacaatgtgttattgcgaggatggcttcatgcattgtactatgtccggcgtgccaggatcattactgcccgacgccgtgctgtcctccccattgtcccaccgctctaagcgatcacttagctgccgccccccaatggtcaaactggtctgcccagccgacaatctgcgggctgaggggctggaatgtacaaagacgtgtcagaactacgacctggagtgcatgagtatggggtgtgtgagtggctgtttgtgccctcctggcatggtgcggcatgagaaccgctgtgttgccctggaaagatgcccgtgctttcaccaaggtaaagaatacgctccaggggaaaccgtgaaaattggctgcaacacttgcgtctgccaagaccggaagtggaactgtactgatcacgtctgtgatgcaacctgcagcactataggtatggcacattatttgactttcgatggcttgaagtacctattcccaggtgaatgccagtacgtgctcgtgcaggactattgtggctccaaccctgggaccttcagaatccttgtaggtaataaaggctgctctcacccctccgttaaatgtaagaagagggtaaccatcttggttgaggggggggaaatcgaactttttgatggcgaggtgaacgttaagagacctatgaaagatgaaacccacttcgaagtcgttgagagtggacgctacattattttgcttctgggaaaagccctttctgtggtgtgggatcggcacctatccatttctgtggtgctgaagcaaacgtatcaggaaaaagtttgtgggctgtgtggtaacttcgacggaatacagaacaatgatctgactagtagtaatctgcaagtcgaggaagatccggtggacttcggcaacagttggaaggtctcttctcagtgcgcagatacccgcaaagtgccacttgactctagcccggcgacatgccataacaacattatgaagcagacgatggtggatagctcctgtaggatattgacctccgatgtcttccaggattgtaacaagctagttgacccagagccctacctggacgtctgcatctatgacacttgttcttgtgaaagcatcggcgattgcgcatgtttctgcgatactatcgccgcatatgcccacgtttgcgcccaacacggcaaggtcgtgacctggagaacagctacactttgtccccagagctgtgaagagaggaatctccgagaaaatggttatgaatgcgagtggaggtataactcatgtgctcctgcttgccaggtcacctgtcagcacccagaacccctggcctgccctgtgcaatgcgtcgaaggctgtcatgctcactgccccccaggcaaaatcttggatgagctactccaaacttgcgtggatccggaggactgtcccgtgtgcgaagtggccggaaggagattcgcctccgggaagaaagttaccctcaatcccagcgaccccgagcactgtcagatctgtcactgtgatgtggtaaacctgacatgcgaggcatgtcaggaacctggaggattggtggtaccgccaaccgacgctcctgtaagcccaaccaccctatacgtggaggatatctctgaaccgcctctccacgacttctattgctcgcgcctgctggacctcgtgttccttttagacggctcatctagactgtccgaggccgagtttgaggtcctgaaagcatttgtagtggacatgatggagcggctgagaatcagccagaaatgggtgagggtggctgttgtggagtatcatgatgggagtcacgcctatatcggtctgaaggatcggaaacgcccaagtgaactgcgtaggatcgcctcgcaggtcaagtatgctggatcccaggtggcttctacctccgaggtgctgaagtatactctttttcaaatctttagcaagatagaccggcccgaggcgtcacggattacgcttctgcttatggcatcccaggaacctcagagaatgtccaggaactttgtgaggtacgtgcagggcctgaagaaaaaaaaggtgatagtgatacctgttggcatcggcccccatgcgaacctgaagcagatccggttaatcgagaaacaggcaccagagaataaggcttttgtactatcttctgtcgacgagctggagcagcagagagacgagattgttagttacctgtgtgacctagccccagaagcccccccccctacgctgcccccagatatggctcaagtcactgtggggccaggcttgctcggcgtctcaaccctgggacctaagcggaacagcatggtgctcgacgtggcgtttgtgctggagggatccgacaaaatcggggaggcagactttaatagatccaaagagtttatggaagaagtgattcaaaggatggacgttgggcaggattcaatccacgtgaccgtgctgcaatacagctacatggttaccgttgagtaccccttcagcgaggctcagtctaaaggggacattttgcagcgcgtgcgagagattaggtaccaaggtggtaacagaaccaacacaggtttggccctccggtacctctctgaccactcgttcctagttagtcaaggcgatagggagcaggctcctaacctcgtgtacatggtgaccggcaaccctgcgtccgatgaaataaagcggcttcccggcgatatacaggtagtgcccataggggtcggcccaaacgctaacgttcaggagttagagcgcatcggctggccaaacgcacccatcctgatccaggacttcgaaacactgccacgggaggctcccgacctggtattgcaacggtgttgtagcggggaagggctgcagataccaaccctatctcccgcgcccgattgcagtcagcccttggatgtgattctcctgttagacgggagctcgtcttttccggcttcatatttcgatgaaatgaagagcttcgctaaggcattcatctccaaggctaacattggaccaaggttgacccaggtctctgtcctgcaatatggatccatcaccactatagacgtgccgtggaacgtggttccggagaaagcccacctgctgagtctggtggatgtgatgcagcgggagggcggcccatcccagattggagatgccctgggatttgcagttagatacctgaccagcgaaatgcacggagcccggcccggcgcatctaaggccgtggtgatcctagtgacggatgttagtgtggactcagtggacgccgcagcggacgcagcgcgcagtaatcgcgtgaccgtcttccctatcggtattggggaccgctacgacgcggcccagctccgcattctcgctggccccgccggcgactccaacgtggtgaaactgcagaggatcgaagatctaccgacgatggtaacactgggtaactcctttctacacaaattatgttcaggcttcgtgcgtatatgcatggacgaagacggaaatgagaaacggcctggcgacgtgtggactcttcctgatcagtgtcacaccgtgacctgccagccagacggccaaacgctgctgaagtctcatagagtgaattgcgacaggggattgaggccaagttgtcctaactctcagtctcccgtcaaggttgaagagacctgtggctgtaggtggacctgcccttgcgtgtgcacgggttcttctacaaggcacattgtcacatttgacgggcaaaacttcaaactgacaggtagttgtagctacgtgctgttccagaataaagaacaggatttggaagtaatcctgcacaatggggcgtgcagtccaggagcccgccagggatgtatgaaatcaatcgaggtcaaacatagcgccttgtccgtagaactccattccgacatggaagtcaccgttaacgggaggctggtgagcgtcccatacgtcggaggcaatatggaggttaacgtctatggagctattatgcacgaggttaggtttaaccacctggggcatatattcacattcactcctcaaaacaacgagttccagttgcaactctcacctaaaacattcgcctctaaaacctatggcctctgcggcatctgcgatgagaacggcgcgaatgatttcatgctgcgggacggaactgtcacgaccgattggaaaactctcgtccaagaatggaccgtacagcgacctgggcagacttgtcaaccaattctggaagagcagtgcttggttcccgattctagccactgccaagtcctcctcttaccactgttcgcagaatgccacaaggtgctggctccagccactttttatgccatttgccagcaggactcttgccatcaggaacaggtctgtgaggtcattgcgtcctacgctcacctgtgccgaaccaatggagtttgtgttgattggcgaacacctgatttttgcgccatgagctgccccccttcgctggtgtacaatcactgcgagcacgggtgcccgagacattgtgacggcaacgtgagcagctgcggggaccacccttccgagggatgtttctgtccccctgataaggtaatgctggagggttcatgcgtccccgaggaagcttgcacacaatgtataggggaggatggggtgcagcaccagttcctggaggcctgggtacctgatcatcagccatgccagatttgtacttgcctttcaggccgtaaggtgaactgcactactcaaccatgtcctacggctaaggcccccacttgcgggttgtgtgaagtggccagactgcgacagaatgcagatcagtgctgtcccgagtatgagtgcgtgtgcgaccccgtaagttgtgacctgcctccagtgccacactgtgaaagaggacttcagcccaccttgacaaatccaggcgagtgccggcccaacttcacatgcgcatgccgcaaggaggagtgcaagcgggtgagtccgccctcctgcccccctcacaggctgccaaccctcaggaaaacacagtgctgtgatgagtacgagtgcgcctgtaattgcgtgaactccaccgttagctgtcccctcggctacctagccagtacagccaccaacgattgcgggtgtacaaccaccacctgtctgcccgacaaagtatgtgtgcacagatccactatctatccggtcgggcaattttgggaggaaggatgcgatgtctgcacatgcacagatatggaggacgccgtcatgggtctgagagtggcacagtgctctcagaagccgtgcgaagatagctgccgcagcgggtttacttacgtgctccacgaaggcgaatgttgtgggcggtgcctccccagtgcctgcgaagtcgttactggaagcccccgtggcgactctcaatcatcttggaaatccgtggggtcacagtgggcctcccccgagaatccctgcctgatcaatgaatgcgtgagggttaaggaggaggtgttcatacagcaaaggaacgtatcgtgtccccaactcgaagtcccggtctgtccctccggctttcagttatcgtgcaagacaagcgcatgttgcccctcctgccgttgtgagagaatggaggcttgtatgctcaatggaacagtgatcggaccaggaaagacagttatgatcgacgtgtgtaccacatgccgctgcatggtccaggtgggggtgatttcgggtttcaagttggaatgtcgcaaaaccacatgtaatccatgtcctctcggctacaaagaagaaaataatactggtgagtgttgtgggcgatgcttgccaacagcctgtacaatccaactgcgcggagggcaaatcatgaccctgaagcgggatgagacactgcaagatggctgcgacacccatttttgcaaggttaacgagaggggcgagtatttctgggagaaaagggtgacaggctgccctcccttcgatgagcataaatgtttggcggaggggggcaagattatgaagatacctggaacctgctgcgacacttgcgaagaaccagaatgcaatgatataacagctcgtttacaatatgtcaaagtgggtagttgtaagtcagaggttgaggttgacatccactactgtcagggcaagtgcgcatccaaagccatgtattctatagatattaacgatgttcaggaccaatgtagctgctgtagccccactagaacagagcccatgcaggtggccctccactgcacaaacggttccgtggtgtatcacgaggtgctgaacgccatggaatgcaagtgttcaccgaggaaatgctccaaa

SEQ ID NO: 12505 - DNA, 8439 bp, Artificial Sequence
  derived and/or modified sequence
atgatacccgcccgattcgctggtgttcttctggcgctggcactcatcctgccgggaactctctgtgccgagggaactcggggacggagctccacggcccgctgttccctgttcggctccgacttcgttaacaccttcgacggatccatgtactccttcgcaggatactgtagctacctgttggccggaggttgtcaaaaacgctccttctcgatcattggcgatttccaaaacgggaagcgcgtgtccctttccgtgtacctgggagaattcttcgatatccacctgttcgttaacggcactgtgacccaaggtgaccagcgcgtgtcgatgccttacgcgtctaagggcttgtacctggagactgaggctggctactacaaactgtcgggagaggcatacggatttgtcgccaggattgacggctcgggaaactttcaggtactgctgtcggatcgctacttcaataagacttgcggactctgtggtaatttcaatatctttgccgaagatgactttatgactcaggagggcacccttacttccgatccatacgattttgccaactcttgggccctttcgtccggagaacagtggtgcgaacgggccagcccaccgagctcatcatgcaacatcagctcgggcgaaatgcagaagggcctgtgggaacagtgccagctcctcaaatcgacctcggtgttcgcccgctgccacccgcttgtggatccagagccattcgtggctctgtgcgaaaagacgctctgcgaatgcgccggaggactggagtgcgcctgccctgctctcctggagtacgcgagaacttgcgcccaggagggaatggtgctgtatggatggaccgatcactcggcatgcagccccgtctgccctgctggaatggaataccggcagtgtgtgagcccttgtgcaagaacctgccaatcactccacatcaacgagatgtgccaggaacggtgcgtcgacggctgctcctgcccggagggacagctccttgacgaagggctgtgcgtagagagcactgagtgcccttgcgtgcactcgggaaaaaggtacccaccgggtaccagcctctcccgcgactgcaacacctgcatctgtcgcaattcccagtggatctgctcgaacgaggaatgcccaggcgagtgcctcgtcacgggacaaagccacttcaagagttttgacaacagatactttaccttctcaggaatctgccagtacctccttgcaagagactgtcaggatcactccttttccatcgtcattgaaaccgttcagtgtgcggacgaccgggatgctgtctgcactaggtccgtaacggtgcggcttccaggcttgcataactccctggtcaaactgaagcatggggctggggtggctatggacggacaggacgtgcaactgcccctgctcaaaggagatcttcggatccagcacaccgtaacggcgtcggtgcggctgagctacggggaagatctccaaatggattgggatgggcgggggagattgctcgtgaagctgtcgccagtatacgcaggcaagacttgtggactctgcggcaattacaatggtaatcagggcgatgattttctgactccatcgggactggctgaaccgcgggtcgaagattttggaaacgcatggaaactgcacggagactgccaggacctgcaaaaacaacacagcgacccgtgtgctctcaatccgcggatgacccgcttttcagaagaagcctgcgccgttctgacttccccaaccttcgaggcttgccatcgcgctgtgtcgccactgccttaccttcggaactgccgctacgacgtctgctcgtgttccgatggaagggaatgtctttgtggagcactggcctcgtacgcggcggcgtgcgcaggtcgcggggtgcgcgtcgcctggagggaaccaggccggtgcgagctcaattgtcctaagggacaagtttaccttcagtgcgggactccgtgcaatcttacttgccggtcgctctcgtacccggacgaagaatgcaatgaagcctgcctggaaggctgcttctgcccccctgggttgtatatggacgagcggggtgactgcgttcccaaagcgcaatgcccgtgctactacgatggggagatcttccaaccggaggacatcttctcggatcaccatacgatgtgttactgcgaggacggctttatgcattgtactatgtccggtgtgccgggatcgctcctgccggacgcggtgctcagcagcccactcagccatcggtcaaagcggtccttgtcctgtcggccgccaatggtcaagctggtgtgcccggccgacaacctgcgggccgaaggtctggagtgcaccaagacttgtcaaaactacgacctcgagtgtatgtccatgggctgcgtctctggctgcctttgtccgccgggtatggtccgccacgagaaccgatgtgtggcccttgagcggtgtccatgttttcatcagggaaaggagtacgcacctggagagactgtcaagatcgggtgcaacacctgtgtctgccaggacagaaagtggaattgcactgaccacgtgtgtgacgccacctgctcaaccatcggaatggcacactacctgaccttcgatggactgaagtatttgttcccgggtgagtgccagtacgtcctggttcaggactactgcggctccaatccgggcacctttcggattctcgtcggcaacaagggatgctcacacccgagcgtgaagtgcaaaaaacgcgttaccatcctggtggaaggaggggaaatcgagctttttgacggcgaagtcaacgttaaaagaccgatgaaggacgagactcactttgaagtggtcgagtctggccgatacatcatcctgctgctgggtaaggccctcagcgtcgtctgggatcgccacctgagcatttcagttgtgctcaagcagacgtaccaagaaaaagtgtgtggactctgtgggaatttcgatggaatccaaaacaacgatctgacctcctccaatctgcaagtggaggaggacccagtggatttcggaaactcgtggaaggtgtcatcacagtgcgcggatacgcggaaggtgccactggattcgtccccggccacgtgtcataacaacatcatgaaacagaccatggttgactcgagctgtcgcatcctgaccagcgacgtgttccaggactgcaataaactcgtcgatccggaaccttacctggacgtgtgcatctacgacacgtgctcctgtgaatcgatcggagattgtgcatgcttctgcgatactattgctgcatacgctcacgtttgcgctcagcacggtaaggtcgtgacttggcggactgccactttgtgcccccagtcatgcgaggaacggaatcttcgtgaaaacggatacgagtgcgaatggcgctacaacagctgcgcgccggcatgccaggtgacctgccagcaccccgaacccctggcatgcccggtgcagtgcgtggaaggatgccacgcgcattgcccaccgggcaaaatcctcgacgagctgcttcaaacgtgcgtggacccagaggattgcccggtctgtgaagtggccggaagaaggttcgctagcggaaaaaaggtcactctgaatccgagcgacccagagcattgccaaatctgtcattgcgacgtggtgaacctcacctgcgaagcatgccaggaacctggcgggttggtcgtgcctccgactgacgcccccgtgtctccgaccactctctacgtggaagatatctcagagccgccgctgcatgacttttactgcagcaggctgttggatctggtattcctcctcgatggttcttcccggctctctgaagcggagttcgaggtcctgaaggcattcgtcgtggatatgatggaacgcctccgaatctcgcaaaaatgggtgcgtgtggcggtcgtggagtaccatgatggctcccatgcctatatcggactgaaggaccggaaaagaccatccgagctgcgcagaatcgcgagccaagtcaagtatgccggttcccaggtggccagcacttcagaagtgctcaagtacactctgttccaaatcttttccaagatcgatagaccagaagcgtcccgcattaccctcctgctcatggctagccaagaaccgcaaaggatgtcgagaaacttcgtgcgttacgtgcaaggacttaagaagaaaaaagtgatagtgatccccgtgggaatcggaccgcatgctaacctcaaacaaattcggttgattgaaaagcaggcccctgagaataaggcgttcgtgctttcttctgttgacgagctcgagcaacagcgggacgaaatcgtgtcatacctgtgtgacctggcccctgaagcgcccccgcctactttgccaccagacatggcccaggtcacggtcgggccaggtctgctgggggtgtcgaccctgggcccaaagcggaattccatggtgctggatgtcgcattcgtcctggaagggtccgataagattggagaggccgacttcaatcggagcaaggaattcatggaagaagtgatccagagaatggacgttggacaggattcgatccacgtgaccgtgctgcagtactcctacatggtgactgtggagtaccccttctcagaagcacagtccaagggagacatcttgcagagagtgcgcgaaattagataccagggcggaaaccgcaccaatactggactggctctgcgctatttgagcgaccattcattcctggtgagccagggagatcgtgaacaggctccgaacctggtatacatggtgaccggtaacccggcctcggacgaaatcaagcgcctgccgggagacatccaagtcgtgccgatcggcgtggggccgaacgcgaatgttcaggagctggagcgcattggatggccgaacgccccgattctcatccaagatttcgaaaccctgcctcgagaagccccagatttggtcctgcaaaggtgctgcagcggagagggcctccagattcctactctctcgccggccccggactgctctcagccgctcgacgtgatcttgctcctcgacggatcgtcatccttccccgcctcctacttcgacgagatgaagtcattcgcgaaggcattcatctcaaaggccaatatcggcccacggctcactcaggtgtccgtcctgcagtatggctctataactactattgacgtcccctggaacgtggtgccggaaaaggcacacctgctgtcgctggtcgacgtcatgcagagagaaggaggacctagccagatcggcgacgccctgggattcgcagtgagatacctgacctctgagatgcacggtgcccgcccgggggcgtccaaggccgtcgtgatcctggtgactgacgtctccgtggactccgtcgacgcggctgcggatgcggccagatcaaacagagtgaccgtgtttcccatcggaatcggcgatcggtacgacgcggcacagctcagaatcctcgccggccctgccggagattcgaacgtggtgaagctgcagaggatcgaggacctgccgaccatggtgacccttggaaattcgttcctgcataagctctgtagcggtttcgtgcgcatctgtatggacgaggatgggaacgaaaaacgcccaggggacgtgtggaccctgccggatcaatgccacaccgtcacctgtcaaccggacggacaaactctccttaagtcacatcgcgtcaattgcgatagaggtttgcgcccatcctgtccgaattcccagtcaccagtgaaagtcgaagaaacctgcggatgccgctggacttgcccttgtgtgtgtaccggatcgtcgacccgacacatcgtgacctttgacggacagaatttcaagctcaccggatcctgttcatatgtgctgttccagaacaaagaacaagacctggaggtgatcctgcacaatggtgcctgcagcccaggggcgcgccagggatgtatgaagtccattgaggtcaaacactcagccctctcggtggaactgcacagcgatatggaagtaaccgtcaacggaaggctggtgagcgtgccctacgtgggtggaaacatggaagtgaatgtgtacggagcaatcatgcacgaggtgcgcttcaaccacctgggtcacatattcactttcacccctcagaacaatgaattccagcttcaacttagccctaagacgtttgcctccaagacttacggactgtgcggtatctgtgacgaaaacggcgccaacgatttcatgctgcgtgacggaactgtgactacggactggaaaaccctggtccaagaatggactgtgcagcgaccaggacaaacctgccaaccgatcctggaggaacaatgtttggtgcctgacagtagccactgccaggtgttgctcctgcctctctttgcagagtgccataaggttctggctcctgcaaccttctacgcgatctgtcagcaagattcgtgccatcaggaacaagtctgcgaagtgatcgcctcatacgctcacctgtgcagaactaatggggtctgtgtggattggcgtacccccgacttctgtgcgatgagctgcccaccgtcgctggtgtacaaccactgtgagcacggatgccctcgtcactgcgacggaaacgtgtcctcgtgcggcgaccacccctccgaaggatgcttctgcccgccggacaaggtgatgctggaaggatcctgcgtgccagaggaggcttgtacgcagtgtatcggcgaagatggagtccagcaccaattcctggaagcatgggtccctgatcaccaaccgtgtcagatttgtacgtgtttgtccgggcgcaaggtgaactgcaccacgcagccgtgcccgactgctaaggcccccacctgcggattgtgcgaggtcgcgcgcctcaggcaaaacgccgatcaatgctgcccagaatacgaatgtgtgtgcgaccctgtgtcgtgtgacttgccaccggtgccccattgcgaaaggggattgcagccaaccctgaccaacccgggggagtgcagaccgaacttcacttgcgcgtgccggaaggaggagtgtaagagagtgtccccaccatcgtgcccaccgcatcggttgcctacccttaggaaaacgcagtgctgcgacgaatacgaatgcgcctgcaactgtgtgaactcgaccgtgtcgtgcccgctgggctacctcgcctcgacggcgaccaacgactgcgggtgtaccaccaccacttgcctccctgacaaggtctgcgtccacaggtcaactatctacccagtgggacagttctgggaagagggatgcgatgtgtgcacttgcaccgatatggaggatgccgtcatgggacttagagttgcgcagtgctcacaaaaaccgtgcgaggactcatgtcgatctggctttacctacgtgctgcacgagggagaatgctgcgggcgctgcctgcccagcgcgtgcgaggtggtgaccggatcaccgagaggcgactctcagagctcgtggaagtccgtggggtcgcaatgggcctcgccagaaaatccctgtctcatcaacgagtgcgtgcgcgtgaaggaagaggtgtttatccagcagcggaatgtgtcgtgcccccaactggaagtgccggtctgtccaagcggcttccagttgtcgtgcaagacctccgcctgttgcccttcttgccgctgcgagcggatggaggcatgtatgctcaacggcaccgtcatcggcccgggtaaaactgtgatgatcgacgtctgtacgacctgtcgctgcatggtccaggttggagtcatctccggctttaagttggaatgccgcaagacgacctgtaacccatgccctctcggatataaggaggagaacaacaccggcgagtgctgcggacgctgcctcccgaccgcgtgcactattcaactgcgcgggggacagatcatgactctgaaacgggatgaaaccctgcaagacggatgcgacactcatttctgtaaggtgaatgaacgaggagaatacttctgggaaaagagagtaactggctgccccccgtttgatgagcataagtgccttgcggaaggtggtaaaatcatgaagatcccgggcacttgctgcgatacttgcgaagagcccgaatgcaacgatatcaccgcacgcctgcagtacgtgaaggtgggttcatgcaagagtgaagtggaagtcgacatccattactgccaggggaagtgcgcctcaaaagctatgtactcgatcgacatcaacgacgtgcaggaccaatgctcatgctgctcgccgactcgcactgagccaatgcaggtggcactgcattgcaccaatggtagtgtggtgtaccatgaagtgctgaatgctatggaatgcaagtgctcgccccggaagtgcagcaaa

SEQ ID NO: 12506 - DNA, 8439 bp, Artificial Sequence
  derived and/or modified sequence
atgattccagccagatttgcaggagtacttctcgcccttgccctgattctgcccggtactctgtgtgctgaaggcacacggggacggagcagtactgctagatgctctctctttggatccgattttgttaacactttcgatggttccatgtactctttcgcaggctactgctcttacctcttggccggaggctgccagaagagatcattctccattataggcgatttccagaatggaaaacgcgtttccctctccgtttacctgggagagttctttgatatccatctgtttgtcaacggaacagtaacgcagggcgaccaaagagtttccatgccttacgcctctaaaggcctctaccttgagaccgaagccggctattacaaacttagtggggaggcctatggcttcgtggcccgcatagacgggtccgggaacttccaagttttgctgagtgatcggtattttaacaagacttgcgggctttgtggaaacttcaatatttttgcagaggacgatttcatgacccaggaagggacgctgacctcagacccctacgactttgcaaacagttgggccctgtcctccggtgaacagtggtgcgaacgagcaagcccgcccagttccagttgtaacatcagttcaggggagatgcagaagggcctgtgggagcagtgtcaactgctcaagtccacgagtgtgtttgccaggtgccatcctcttgtggacccagagcccttcgttgctctgtgcgagaaaactctttgtgagtgcgctggcggccttgagtgtgcatgccctgcgcttctggaatacgcacgcacctgtgcgcaggagggcatggtgctgtacggatggaccgaccacagcgcctgctcacctgtgtgcccagctggcatggaatatcgacaatgtgttagtccctgtgccagaacttgccaatcactgcatatcaacgagatgtgccaggaaaggtgcgtggatggatgtagttgccctgaagggcagctgctggacgaaggcttgtgcgttgagtctacagagtgtccctgtgtgcacagtgggaaacgctatccacctggtacatcactttcaagggattgtaacacttgcatttgtcgcaatagtcaatggatttgttctaatgaagaatgcccaggggaatgccttgtgacaggccagtctcacttcaagtcttttgacaacagatacttcacttttagcgggatttgccagtacctgctggctcgggactgtcaagatcactcattctcaatagtcatcgagactgtgcagtgcgctgatgaccgggatgcggtctgcacccgcagcgtgactgtgcgcctccccggactgcacaactcccttgtcaagcttaaacacggagcgggcgtggccatggatggccaggatgtacagcttccactgctgaagggggaccttaggatccaacacaccgtgaccgcaagcgtgcggctctcatatggggaagacctgcagatggactgggatggccgaggtaggcttctcgtcaagctttcaccagtgtacgcaggtaaaacgtgtggactgtgcggaaattacaacgggaatcagggagatgattttctgacccctagcggcttggcagagcccagggttgaggactttggcaacgcctggaagctgcacggtgattgtcaggaccttcagaagcaacacagtgatccttgcgcactgaacccacggatgacccggtttagcgaagaggcctgcgccgtccttacttcccccacattcgaggcgtgccatagagcagtctcaccactgccttacctcagaaattgtaggtatgacgtgtgctcatgcagcgatgggagagaatgtctttgcggcgcacttgcctcttatgccgctgcatgcgcaggtcgcggggtcagagtggcgtggcgggagcctgggcggtgtgaacttaattgtcccaaaggccaagtttatctgcagtgtggaacaccttgtaacctgacttgtagaagtctcagctaccccgatgaggagtgtaatgaagcatgtttggagggatgcttctgtcctcctggactgtacatggacgagcggggtgactgtgtgcctaaggcccagtgcccctgctattacgatggcgaaattttccaacctgaagacatcttcagtgaccaccacacaatgtgctattgcgaggatggcttcatgcactgtacaatgtcaggtgttcccggcagtctgcttccagatgccgtcctgtcttctcccctcagtcatagatctaaacggtctctgtcctgtcgaccgccaatggtaaaactggtgtgccctgccgacaatctgagggcggagggcctcgaatgtaccaaaacatgtcagaactacgatctggagtgcatgtctatgggttgtgtgagtggctgcctgtgccccccaggcatggtgcgacacgaaaaccggtgtgtggcgctggagcgatgcccatgtttccatcaaggcaaagagtatgcgcccggcgagactgtaaagatcggctgcaatacatgcgtttgccaggaccggaagtggaactgcactgatcacgtctgcgacgcaacatgtagcacaataggaatggcccattatctgacatttgatggtttgaagtacctcttccccggagaatgccaatatgttctggtgcaggattattgcggcagcaatccaggtacctttcgcatactggtcggaaataagggttgtagccatccatcagtcaaatgcaagaagagagtcactatcctcgttgagggcggcgagatagaactgttcgatggcgaagtgaacgtcaaaaggcctatgaaggatgagacccattttgaggtggtggaatctgggagatatatcattctgttgttgggcaaggcgctcagcgtggtgtgggaccggcatttgtctatcagtgtggtattgaagcagacttaccaggaaaaggtctgtggcctgtgtggaaacttcgacggcatccagaataatgacctcacttcaagcaatctgcaagtggaggaagaccccgttgactttggaaatagctggaaggtgtcctcacaatgtgccgatactcgcaaggttcccctggatagctctccagcgacatgccataataatatcatgaagcagacaatggttgatagttcctgccgaatcctgacttccgatgtgtttcaggactgcaacaaattggtggatccagaaccctacctggacgtctgtatctacgacacatgttcttgcgaatctatcggggactgtgcctgtttctgcgatacaatagctgcgtatgcgcacgtctgtgcccaacacgggaaagtcgtcacatggcgaaccgctactctctgtccccagagctgcgaagaaagaaacctgcgagagaacggctatgagtgcgaatggaggtataattcttgtgctccagcctgtcaggtgacttgtcaacatccagagccactcgcatgtcccgtgcagtgcgtagaagggtgtcatgcccactgtcccccagggaagatcttggatgagctgctccagacatgcgtggacccagaggattgtccagtatgtgaggtggcaggccgccgatttgcttccgggaaaaaggttaccttgaatccctcagatcctgagcactgtcagatctgccactgcgacgtcgtgaatttgacgtgcgaagcttgtcaggagcctggtggcctcgtcgtaccgccgacggacgcccccgtctcccccactaccctttatgttgaggacatctccgaacccccactgcacgatttttactgctctcggctcctggatctcgtgtttctgctggacggatcatctcggctcagcgaggctgaattcgaagtgctcaaggctttcgtggtggatatgatggaacgccttcggatcagccagaagtgggtgcgcgttgcggtagtggaatatcacgatggatctcatgcttacattggcctcaaggatagaaaacgcccatccgagctgcgcagaatcgccagtcaggtaaaatatgccggctcccaggtagcctctaccagtgaggtcttgaagtacaccctgttccagatcttctctaaaattgaccggccggaagcttctcgaatcaccctgctgctgatggctagccaagaaccgcagcgcatgtcccggaattttgttaggtacgtgcaggggttgaagaagaagaaggtgatagtgatacccgtgggaatcgggcctcacgctaaccttaaacagatccggcttatcgaaaaacaggccccggaaaataaggccttcgtcctgagctctgtcgatgaactggaacagcagcgggacgagatcgtgtcttacttgtgtgatctcgcgccagaggcacctccgcctacactccctcccgacatggctcaagttacagttggccccgggttgctgggggtcagcacactggggccaaaacggaacagtatggtgctcgacgttgcatttgtactcgaggggtccgacaagatcggtgaggcggattttaataggagcaaagaattcatggaagaagtcattcagcggatggatgtaggacaggactccattcatgtgaccgtgttgcagtactcatatatggttaccgttgaatatcccttcagtgaagcccaatccaagggcgacatcctgcagagagtgcgggagattcgctaccagggggggaacagaacaaataccggacttgccctgcgatacctttccgaccactcttttctcgtctcacagggggacagggagcaggcaccaaacctggtgtacatggttaccggcaatccagcaagcgacgagatcaaaagactcccaggggacatacaggttgtaccaatcggcgtggggcccaacgctaacgtgcaggagctggagcgaatcggctggccaaacgctcccattctgattcaggacttcgagacacttcccagggaggcccctgacctggtgctgcagagatgctgttctggggagggtctgcagattcctaccttgagtcccgccccagattgtagccaaccactcgacgtgattctgctcctggatggcagctcatctttcccagcttcatatttcgatgagatgaagtcttttgcgaaggcattcatctcaaaggcgaatatcggtccaaggttgacgcaggtgagtgtcctgcagtacgggtctattacaaccattgacgtgccttggaatgtggtgccggagaaggcacatctgctctcattggtggatgtgatgcagcgcgagggtggacctagccagattggcgatgcactgggatttgccgtacgctatctgacctccgaaatgcatggcgctaggccaggggcgtccaaagccgtggtgattctcgtcactgatgtgtctgtggattctgttgacgccgctgccgatgctgcaagatccaaccgggtcacagtgtttcccatcggaatcggagataggtatgacgccgctcaactcaggattcttgccggaccagccggcgactctaacgtggtgaagctccagcggatcgaggaccttcccactatggtgaccctgggcaattctttcctgcataaattgtgttctggttttgtacgcatttgcatggacgaggacggcaacgagaaaaggccaggggacgtgtggactttgcctgaccaatgccacaccgtcacctgtcagccagacggtcagacactgttgaagagccaccgagtgaattgcgatcgaggcctgaggccctcctgccctaacagccagagccctgtgaaggtggaagagacatgtggctgtagatggacttgtccatgtgtttgcaccggctctagtaccagacatatcgtaacatttgacggacaaaactttaagctgactgggagttgctcctacgtgctgtttcaaaacaaagaacaggacttggaagtcatactgcacaacggagcttgtagcccaggtgccaggcagggctgcatgaagtccattgaggtcaagcacagcgccctctccgtggagctgcactccgatatggaagtcactgtgaacggacggctggtcagtgttccctacgtgggcggtaacatggaggtgaacgtgtatggtgcaatcatgcatgaagtgaggttcaaccatcttggacacattttcacatttacccctcagaataatgagtttcagctgcaactgtcacccaagacattcgccagcaagacctatggcttgtgcggcatctgcgatgaaaacggggccaacgacttcatgttgcgggatggcaccgtaaccaccgactggaagaccttggtgcaggagtggaccgtgcagaggccagggcaaacatgccagccgatactggaggagcagtgtttggtgcctgacagcagccattgtcaagtcctgctgctgccactcttcgccgagtgtcataaggtcctggcacccgccaccttttatgcaatttgccaacaagatagctgccatcaggagcaggtctgtgaggtcatcgcctcctacgcacacctgtgcaggacaaatggagtgtgtgtagactggaggacccccgatttttgtgccatgagctgccctccttcactggtctacaatcactgcgaacacggatgtccccgccactgtgacggaaacgtaagctcatgtggagaccacccttctgaaggctgtttctgcccgcctgataaggtgatgctggaggggtcctgcgtgcccgaggaggcctgtacacagtgcattggcgaagacggggtgcagcatcagtttcttgaagcttgggttccggaccaccaaccctgtcagatttgcacgtgtctctctgggagaaaagttaattgtaccacccagccatgccctaccgcaaaggcccccacctgtgggttgtgcgaggtggccagactgcggcagaatgcagaccagtgttgtcccgagtacgaatgcgtgtgtgatcctgtttcttgcgacctgcctccggtcccacattgtgagagaggattgcaacccacgctgactaatccaggtgaatgccggccgaacttcacctgcgcgtgccgaaaagaagagtgcaaacgggtgagtccacctagctgccccccccacaggttgcctaccctgagaaagacacagtgctgtgatgagtatgaatgtgcttgcaactgtgtaaattccaccgtgtcctgcccgctcggttacctggcaagcactgccacgaacgattgtggatgtacaaccaccacttgcctccctgataaggtatgtgtgcatcggagcaccatctaccctgtaggccagttctgggaagagggttgtgatgtgtgcacatgtactgacatggaggatgccgtgatggggctcagagttgcacaatgttcccagaaaccctgtgaagactcatgtagatccggttttacttacgtgttgcatgagggagagtgctgtggcaggtgtttgccatcagcctgcgaggtggttacaggcagtccccggggggattcacagagtagttggaagtccgtcggatctcagtgggcctccccagagaacccttgccttattaacgagtgcgtcagagtcaaagaggaggtcttcatccagcagcgaaatgtgtcatgcccgcaactcgaggtacccgtgtgtccatccggctttcagcttagctgcaaaactagcgcttgctgcccgagttgtcgctgtgagaggatggaagcttgtatgctgaacggtaccgtgatcgggcctggtaaaactgtaatgatcgatgtgtgcactacgtgccgctgcatggtccaagttggcgtgattagcggttttaagctggaatgtcgaaaaacaacctgtaatccatgtcccctcgggtacaaggaagaaaataacacgggcgagtgttgcggtaggtgtttgcctacggcttgcaccattcagctcagaggtgggcagatcatgaccttgaagagagacgaaaccttgcaggatggatgtgacacccacttctgcaaggttaatgagcggggcgaatacttctgggagaagcgggtcactgggtgtcccccgtttgacgagcacaagtgtttggcggagggtggtaaaattatgaagattcctggaacatgttgcgacacctgcgaggagcctgagtgtaacgatattaccgctcggctccaatacgtgaaagtcggcagctgcaaatcagaggtcgaagttgatattcactattgtcaaggaaaatgcgccagtaaagccatgtactcaattgacatcaacgacgttcaggaccagtgctcatgctgttctccaacacgaaccgagccaatgcaggtagctctccattgcacaaacggttccgtcgtgtaccatgaagtgctgaacgcaatggaatgtaagtgcagccccaggaagtgctccaag

SEQ ID NO: 12507 - DNA, 8439 bp, Artificial Sequence
  derived and/or modified sequence
atgattccggcccggttcgctggggtcctgttggctctggccctgatcctcccgggtactctgtgcgcggaagggaccagaggaaggtcctcaacggcccgctgctcgctcttcggctcggacttcgtcaacaccttcgacggctcgatgtacagcttcgcgggctactgttcatatttgctggcaggaggatgccagaaacggtcgttttcgatcatcggtgatttccaaaatggaaagcgcgtctcgctctcagtgtacctgggcgaattcttcgatatccacctgtttgtgaacggtaccgtgacccagggagatcaacgcgtgtccatgccgtatgcctcaaagggactgtacctcgaaaccgaagcgggatactacaagctcagcggggaggcatacggatttgtcgctagaatcgatggctccggaaatttccaagtgctgctctccgatagatactttaacaagacgtgtggtttgtgtggcaatttcaatatcttcgcagaagatgatttcatgacccaagagggaactctgacctccgacccctacgacttcgctaactcctgggccttgtcctcgggtgagcaatggtgcgaaagggcatccccgccgtcaagctcctgtaatatctcgtccggtgaaatgcagaagggactctgggaacagtgtcagctgttgaagagcacttccgtctttgccaggtgccacccgctggtcgacccggagccgtttgttgcgctgtgtgaaaagacgctctgcgaatgcgccggaggactcgaatgtgcatgccctgctctgctggaatacgcccggacctgcgcccaggagggaatggtgctgtacggctggaccgaccactcagcatgctccccggtgtgcccagccgggatggaatatcgccagtgcgtttccccgtgtgccagaacttgtcaaagcctccacatcaacgaaatgtgccaggaacgatgcgttgacgggtgcagctgccccgagggacagcttctggacgaaggcctgtgcgtggagtcgactgagtgtccttgtgtgcactccggcaagcgctacccacctgggacttcactgtcccgcgattgcaatacctgcatctgcagaaattcacagtggatttgcagcaatgaggagtgtccgggggaatgcttggtcaccgggcaaagccacttcaagtccttcgataaccggtatttcaccttttctggtatctgtcagtaccttctggccagggactgccaagatcactccttcagcattgtcatcgaaaccgtccaatgcgcagacgatcgcgacgccgtctgcactcggtcggtgactgtgagactgccaggactccataattctttggtgaagctcaaacacggagcaggagtcgcgatggacgggcaggatgtgcagttgccgcttctgaagggagacttgagaatccagcataccgtgactgcgtcagtccggctcagctacggagaagatctgcagatggactgggacgggcgggggagactccttgttaagctctcgccggtctatgccggtaaaacgtgcggactctgcggtaactacaacggtaatcagggagatgacttccttaccccaagcggcctggcggagccgcgggtggaagattttggaaacgcgtggaagttgcacggagactgtcaggaccttcaaaaacagcattcagatccgtgcgcattgaacccccgcatgacgcgcttctcagaagaagcctgcgcagtgcttacgtctccgaccttcgaagcatgccacagagccgtgtccccgctcccatatctccgcaattgtcggtatgacgtgtgctcgtgctccgacggacgggagtgcctgtgcggcgcactggcgtcctatgccgcagcctgtgctggcaggggcgtgcgcgtggcatggagggagccaggacggtgcgaactgaactgcccaaagggtcaagtttacctgcagtgtggaactccgtgcaatcttacttgtagaagcctgtcgtaccctgatgaggaatgcaatgaggcctgccttgagggatgcttctgcccgccaggtttgtacatggatgaacggggggactgcgtccctaaagcccaatgcccatgctactacgacggagagattttccagccagaggatatcttctcagatcaccataccatgtgctactgtgaggatggctttatgcactgcacgatgtccggcgtcccgggctccctgctgccggacgcagtgctctcgtcaccgctgagccaccgctccaagcggtccctctcctgccggcctccaatggtcaagctcgtttgcccggcggacaacctgcgcgcagagggcctcgaatgcaccaaaacgtgccaaaactacgatctggagtgcatgtctatgggctgcgtcagcggatgcctgtgcccgcccggaatggtccggcacgaaaaccggtgtgtcgccctggaacgttgcccttgctttcaccaaggaaaggaatacgccccaggcgagactgtcaagatcggctgcaatacttgcgtgtgtcaggacagaaagtggaactgtaccgatcacgtgtgtgatgcaacctgctcgaccatcggtatggcgcactacctcactttcgacggactgaagtaccttttccctggtgaatgccagtacgtgctggtgcaggactactgcggatcgaatcccgggacgttccgcatcctcgtggggaacaaaggatgctcacatccgtcagtgaagtgtaagaagagagtgaccattctggtggaaggtggcgaaattgaactgttcgatggcgaggtgaacgtgaaaaggccgatgaaggacgagactcacttcgaggtggtggagtcggggcgctacatcatcctgctcctcgggaaagcactgtcggtggtgtgggaccgccatctgtctatctcggtggtgctcaaacaaacctaccaagagaaggtttgtggcctttgcggcaattttgacgggatccagaataacgacctgacctcctcgaaccttcaagtggaggaagatccagtggatttcggaaatagctggaaggtgagctcccagtgcgcggatacgagaaaggtgccactcgactcgtcaccagcaacttgccataacaacattatgaagcaaactatggttgatagcagctgcaggatcctgaccagcgacgtgttccaagactgtaacaaacttgtcgaccctgagccgtacctggacgtgtgtatttacgacacttgtagctgtgagtcgatcggagactgcgcctgtttctgcgatactatcgcggcctacgcccatgtgtgcgcccagcacggtaaggtggtcacttggcgcaccgcgaccctttgcccccaaagctgcgaagaacgcaatctccgggaaaacgggtacgaatgcgagtggcgctacaattcatgcgccccagcatgccaggtgacttgccagcaccctgaaccgcttgcctgccctgtgcaatgcgtggaaggatgccatgcccactgtcctccgggaaagatcctggatgagctgcttcagacctgcgtggatccggaagattgtcccgtctgcgaagtggccgggaggcggttcgcttcgggaaagaaggtgaccctgaacccttcggatccggaacattgtcaaatctgtcactgcgacgtggtgaacctgacgtgtgaagcgtgccaggaacccggggggctggtcgtccctccaaccgatgcacctgtgtcacccaccactttgtacgtcgaagatatctccgagcctcccctccatgacttctactgcagcagactcttggacctcgtgttcctgctggatggatcctccagactctcagaggcggagttcgaagtgctgaaggcgtttgtcgtggacatgatggagcgcttgcggatctcccagaaatgggtgcgcgtcgccgtggtggaataccatgacggatcccatgcctacatcggtctgaaggaccggaagcgcccttccgagcttcggcggatcgcttcgcaagtcaaatacgcaggttcgcaagttgcctccactagcgaggtgctgaagtacaccctgttccagattttctcaaagattgatcgcccggaggcttcgcgcattactctcctgctcatggcatcccaggaacctcagagaatgtcgcggaacttcgtccgctacgtgcaggggctcaagaagaaaaaggtgatcgtgatccctgtcggaatcggtcctcacgccaatctgaagcagattagactgatcgagaaacaggctccggagaataaggcgttcgtgttgtcgtcagtggacgagctcgaacagcagagggacgagatcgtcagctatctgtgcgatcttgcacctgaggcccctccaccaaccctgcctccagatatggcgcaggtgactgtgggtcccggactgttgggagtctcgactttgggaccgaaaagaaattctatggtcctggacgtggcctttgttctggaagggtccgataagatcggagaggccgatttcaaccgcagcaaggagtttatggaggaagtcatccaaagaatggatgtgggtcaggactccatccatgtgaccgtgttgcagtactcgtacatggtgaccgtggagtacccattttccgaggcgcagtccaaaggcgacatccttcagagagtgcgggagattagataccaaggaggaaatagaacgaacaccgggctcgcccttaggtacctgtctgatcatagcttcctcgtgagccaaggcgacagggagcaggcccctaacctggtctacatggtcaccggaaatccggcgtcggatgagattaagcggctgcctggcgacatccaagtggtccccatcggcgtgggacccaacgctaacgtccaggagctggaaagaattggttggccaaacgctccgatcctgatccaggacttcgaaaccctcccaagagaggctccggatctggtgctgcagcgctgttgttcaggagaaggactccagatccccactctgtcccccgctccagactgctcgcaaccactggacgtgatcctgctcctggacggttcatcctcattcccggcatcgtacttcgatgagatgaagtcattcgcgaaggccttcatctcgaaggccaacatcgggccaagactgacccaagtctctgtgcttcaatacgggtcgatcactaccatcgatgtgccgtggaatgtggtgccggagaaggcccacctgttgtcactcgtcgacgtgatgcaacgcgagggcgggcctagccagattggagacgcccttggatttgcagtccgctacctcacttcggaaatgcatggagctagaccgggagcctccaaagctgtggtcatcttggtgactgacgtgtcagtcgacagcgtggacgctgcggccgacgccgctcggtccaaccgcgtgaccgtctttccgattggcatcggcgacagatacgacgcggcacagctccgcattctggcagggcccgctggggactccaacgtggtgaagctccagcgaatcgaggacctcccgactatggtgactcttggaaatagcttcctgcacaaactctgcagcggcttcgtgagaatctgcatggatgaagatggcaacgagaagcgcccaggtgacgtgtggactcttccggatcagtgccatactgtgacctgtcagccagatggccagacccttctgaagtcccaccgcgtcaactgtgacaggggactgcgaccctcttgcccgaacagccagtcgcctgtcaaagttgaggaaacttgcggatgccggtggacctgcccatgcgtctgcactggatcctccacccggcatatcgtcacgtttgacggccagaacttcaagctcactggatcgtgcagctacgtgctgttccaaaacaaagaacaggatttggaagtgatcctccataacggagcgtgctcacctggcgctcggcaaggatgcatgaagtcgatagaagtgaagcattccgccctgtccgttgaactgcacagcgacatggaggtcaccgtgaacgggcgcctggtgagcgtgccgtatgtgggcggaaacatggaagtgaacgtctacggcgcaatcatgcatgaagtgcggttcaatcacctgggacacatctttacttttaccccgcagaataacgaatttcagcttcaactgtcgcctaagactttcgcctccaagacctacggtttgtgcggcatatgcgacgagaacggggcgaatgatttcatgctgagggacggaaccgtgacgactgattggaaaaccctggtccaggagtggactgtgcagcgcccgggacaaacttgtcagccaatcctcgaagagcagtgcctggtcccagactcttcacattgccaggttctgctgcttcctctcttcgctgaatgccacaaggttctggcgccagcaaccttctacgctatctgccagcaagattcctgccaccaggaacaagtttgtgaagtgatcgcatcgtacgctcatctctgcagaactaacggcgtgtgcgttgattggaggaccccggatttctgcgcaatgtcatgcccgccatccctggtctacaaccattgtgaacacggatgccctcgccactgcgacggaaacgtgtcgtcgtgcggggaccacccgtcggaaggctgcttctgccctccggacaaagtgatgctcgagggatcctgcgttcccgaggaggcctgcactcagtgcattggagaggacggcgtccagcatcagttccttgaggcttgggtcccagatcaccaaccgtgccaaatctgtacctgtctgtccggccgcaaagtcaattgtactacgcagccttgtccaaccgcgaaagcgccgacctgcggcctgtgtgaggtggctcggcttagacagaacgctgatcagtgctgtccggagtatgagtgcgtttgcgacccggtgtcgtgcgatctcccgcctgtgccgcactgtgaacgcggactgcaaccgactttgaccaacccgggagaatgccgccccaacttcacttgcgcttgcagaaaggaggagtgtaagcgggtgtcgccgccgagctgtccaccacaccgcctgccgaccctgcgcaagactcagtgttgcgacgagtatgagtgtgcgtgtaactgcgtcaattccacggtttcgtgcccactcggctacctggcctcaacggctactaacgattgtggctgtactaccaccacttgcctgcccgacaaggtgtgtgtccatcgctccaccatttacccagtcgggcaattctgggaggagggatgtgacgtttgcacgtgcaccgatatggaagatgccgtcatgggactgagggtcgctcagtgttcgcagaaaccatgtgaggactcctgccgctcaggattcacttatgtgctgcacgagggagaatgctgcggtagatgccttccttcggcgtgcgaagtggtgaccggaagcccgagaggcgatagccaaagctcgtggaaatccgtcggctctcaatgggcctccccggaaaatccgtgccttatcaacgaatgtgtgcgggtcaaagaagaagtgttcatccaacagcggaacgtgtcatgtccgcagctggaagtgcccgtgtgcccatcgggttttcagctgtcatgcaagacctccgcatgttgccctagctgccggtgcgaacgcatggaggcatgcatgctgaacggcaccgtcattggaccgggcaagactgtgatgattgacgtgtgtaccacctgtcggtgcatggtgcaagtcggcgtgatctctggtttcaagctggagtgccgcaagaccacgtgcaatccatgtccgcttgggtacaaagaagaaaacaacaccggagaatgttgcggtcgctgcctgccaactgcctgtaccatacagttgcgagggggacagatcatgactctcaagagagatgaaacgctgcaagatggctgcgacactcacttctgtaaagtgaacgaacgcggcgagtacttttgggagaaacgcgtgactggctgtccacctttcgacgagcataaatgcttggcagaaggaggcaaaatcatgaagatcccgggaacctgctgcgacacttgcgaagagccggagtgcaacgacattacggcccgtctgcaatacgtgaaggtgggttcgtgcaagtcagaagtcgaagtcgacatccattactgccagggaaaatgtgcgtcgaaggccatgtacagcatcgacatcaacgacgtccaggatcaatgctcgtgctgcagcccgaccaggacggaacctatgcaagtcgccctgcactgcaccaacgggagcgtggtctatcacgaggtcctgaacgcgatggaatgcaaatgttcgccacggaaatgcagcaag

SEQ ID NO: 12508 - DNA, 8439 bp, Artificial Sequence
  derived and/or modified sequence
atgattccagctcggtttgccggcgtgctgcttgcgctggcattgattctgccggggactctctgcgcagaaggcacccgaggtcgtagctcaaccgctaggtgcagtttgttcggttccgactttgtgaacaccttcgacgggtcgatgtattctttcgccggatattgctcctacctattggctggtggctgccagaaaaggtcctttagcataataggtgacttccaaaacgggaagagggtgagcctgtccgtgtatcttggtgagtttttcgatatacatctattcgtaaacggcactgtgacacaaggggaccagagggttagcatgccctatgcgtcaaaagggctgtatctggagaccgaagcaggttactacaaactgtctggcgaagcctatgggtttgtagctcgaatagacggatccggaaattttcaggttttactaagtgaccggtacttcaacaaaacctgcggattgtgtgggaactttaatatctttgcagaggacgacttcatgacccaggaggggaccttgaccagcgatccatacgatttcgctaactcttgggcactcagctccggggagcagtggtgtgagcgggcaagccccccgtcttccagctgtaatatttcgtcgggggaaatgcagaaaggtttatgggagcagtgccagttgctgaaatcgaccagtgtgttcgcacgatgtcaccccttggtggacccagaacctttcgtcgccctgtgtgagaaaaccctatgcgagtgtgccggtggtctcgaatgtgcctgtcctgcgttgctggagtacgcaagaacatgcgctcaggagggaatggtgctatacggctggactgatcattcagcgtgctcacccgtgtgtcccgcagggatggagtaccgccagtgtgtgtccccatgcgcgagaacctgccaatctctgcatattaacgagatgtgtcaggagcgttgcgtggacggctgtagttgtcctgaaggtcaactgcttgatgaaggtctgtgcgtggagtccacagagtgtccctgtgtccatagtggaaaaaggtatcctcctggcacctccctttccagagattgcaacacctgcatctgccggaactcccaatggatctgttccaatgaggagtgtccaggcgagtgccttgtcaccggccagtcgcactttaagtctttcgataatcgttattttaccttttccggaatctgccagtacctcctggcaagggattgtcaagatcacagcttcagtatagtgatagagacggtccagtgcgcagatgacagggacgctgtgtgtacaaggagcgtgacagtcaggctcccaggactgcacaattcactggtcaaactgaaacatggggcaggagtggcaatggacggacaagacgtgcaattacccctattaaagggggacctaagaatccagcataccgttacagcttccgtccgcctatcctacggggaagacctgcagatggattgggatgggagaggtcgactcttggttaaactgtccccagtgtatgccgggaagacctgcgggctgtgcgggaactataatggcaaccagggggacgatttcctgactcccagcgggttggccgaacctcgtgtggaggatttcgggaacgcatggaaactgcatggagactgccaagatttgcagaaacaacactcagatccctgtgcactgaatcccagaatgacacggttttcagaggaggcttgcgcagtgctgacgtcaccaacttttgaagcgtgccatcgcgccgtgagcccactgccttatcttaggaactgtcgctacgacgtgtgttcatgctcggacggacgcgagtgtttgtgtggagcactggcatcctatgctgcggcctgtgctggccgaggcgtgcgggtggcttggcgagagccaggcaggtgcgagctcaactgtcccaaagggcaggtgtacttgcagtgcgggacaccctgcaatctcacctgcagatctctgtcttaccctgacgaggaatgcaacgaggcttgtctggagggatgtttctgcccacccggcctgtatatggacgagcgaggcgactgtgtcccaaaggcacagtgtccctgctattacgatggcgagatctttcagccagaggacatatttagcgaccatcataccatgtgttactgtgaggatgggtttatgcattgcaccatgtctggtgtccctggatctctcctccccgatgccgtcctgagtagcccactaagccaccgatcaaagcgcagtctgagctgtaggccacccatggtgaagctggtgtgtcccgctgataatcttcgggctgagggtcttgagtgcaccaagacatgccagaattacgacctggagtgcatgtccatgggatgcgtgagcggctgcctctgtccccccggaatggtccgacatgagaacaggtgtgtggcattggagagatgcccctgcttccatcaggggaaagagtatgccccgggagaaacagtgaaaattgggtgtaacacctgtgtatgtcaggaccgcaagtggaactgcacagaccacgtgtgtgacgctacatgttccacaattggaatggcccattatctgacctttgacggcctcaagtatttattccccggcgaatgccaatatgtactggttcaggactattgtggaagcaatcctggaacgtttagaatcctcgtagggaacaaaggttgtagccatcccagcgtcaagtgcaagaaaagagtgactattctcgtagagggaggcgagatcgagctgtttgatggagaggtcaatgtcaagcggccgatgaaggatgaaacccacttcgaggtggttgaatctggacgttatattattctgctcctgggcaaagcactttcagtggtgtgggataggcatctctcgatcagcgtcgtgttgaagcagacctaccaagaaaaagtgtgcggattgtgtggaaactttgatggaattcagaataacgatctaacctccagcaacctacaggtagaggaagaccccgtcgacttcgggaatagctggaaagtgagctcacagtgcgccgacactaggaaagtacctctggacagttcacccgctacctgtcataacaatatcatgaagcagaccatggtggactccagttgccgcatcctaaccagtgatgttttccaggactgcaacaagctggttgaccctgagccgtacctggatgtgtgcatatacgacacttgctcttgcgagtcgattggggactgcgcatgcttctgtgatactatagccgcttatgctcacgtttgtgctcagcacgggaaggtcgtgacatggcggactgccacactgtgcccccagtcttgcgaggagcggaacttaagagaaaacgggtatgagtgcgagtggagatataactcttgtgcacccgcctgccaggtcacctgccagcatccagaacctctggcgtgccctgttcagtgtgtggagggatgccacgcgcattgtccaccaggcaaaatacttgatgagctgttgcagacttgcgtggatcccgaggactgtcccgtatgcgaggttgctggaagacgattcgcatctggcaaaaaggtaactctgaatccttctgaccctgagcactgccagatttgccactgtgatgtcgtgaaccttacctgtgaagcttgccaggaacctggagggcttgttgttccacccacagacgccccagtgtcccctaccacactgtacgtggaggatatatccgaacctccgctccacgatttctattgtagtagacttctggatttggttttcctcctcgatggtagcagtcgattaagtgaagccgagttcgaggtcctgaaagcctttgtagtggatatgatggagagactgcgtatttcacagaagtgggtaagggtcgctgtagtagaataccatgatgggtcacatgcttacatcggactgaaggatcgtaagagaccctctgagctcagaaggatagcctcacaggtgaagtacgccggcagtcaagttgcaagcacctcagaagtgctgaaatacacactcttccaaatcttcagtaagatcgatagacccgaggctagcagaatcacattacttttgatggcgtcccaagagccacagaggatgtcccgcaatttcgtgaggtatgtccagggtctcaaaaaaaaaaaagtcatcgtcattcctgttggcataggcccccatgcgaatcttaagcagatcagacttattgaaaagcaggccccagaaaataaagcgttcgtgttatcatccgttgacgagctcgagcagcagcgggatgaaattgtatcctacttgtgcgatcttgccccagaggctcctcctccgaccctgccgccagacatggcacaagtcacagtgggccccgggcttctgggtgtgtccaccctgggaccaaaacgaaactctatggtgcttgacgtagctttcgtgctagaaggcagtgataaaatcggggaggcggacttcaatagatccaaggaatttatggaagaggtgatccaacggatggacgtgggtcaagactccatccatgtaaccgtcctccaatactcttatatggtcactgttgaatacccattcagtgaagcacagtcaaaaggggatatacttcagcgcgtgcgggaaattcgttaccaaggaggcaatcgcacaaataccggacttgcgctgcggtacctaagcgaccacagcttcctggtttcacagggagatagggagcaggcaccaaatctggtttatatggtcaccggcaaccctgcttccgacgagattaagaggcttcccggcgatatccaagtggtgcctatcggtgtaggccctaatgcaaacgtgcaggagctggagaggattggctggcccaacgcccccatcttaattcaggatttcgagacactgccccgcgaggcaccagatctcgttcttcaacgatgctgctcaggcgaaggcctccagatcccaacgctgtcaccagcgcccgactgctcccagcctctcgatgtcattctcctgctagatggaagctcaagttttcccgcatcatattttgacgagatgaagtcgttcgctaaggcctttatctccaaggcaaacatcggaccacgcttaacccaggtgtccgtgctgcagtacggttccatcacgacaatcgatgtcccatggaacgtcgttcccgagaaagcacatttgcttagcttagttgacgtgatgcaacgggagggcggtccctcccagattggagatgcactgggattcgccgtgcggtacctaaccagtgagatgcacggcgcaaggccaggcgcctccaaagccgtggtcatcctcgtgaccgacgtgtccgtggactccgtcgatgcagccgccgacgcagccagaagtaaccgggtgaccgtgtttccgatcgggataggtgatcggtacgatgcggcgcagcttaggattctcgcgggcccagctggtgattctaacgtcgtgaagctacagcgtatcgaggaccttccaacgatggtgactctgggcaatagtttcctgcataagctgtgcagcggcttcgtcaggatttgtatggacgaggacggaaacgagaagcggcccggcgacgtctggacattgcccgatcagtgccatacagtgacatgccagcccgatggccaaacactgcttaaatctcatagggtgaactgcgaccggggcctgcgacccagctgtcctaatagccagagccctgttaaagttgaagagacctgtgggtgccggtggacatgcccctgcgtgtgcacgggttcctccactagacacatcgtgacatttgacgggcagaacttcaagctgaccggaagctgcagttacgtgttattccaaaataaagaacaggatctcgaagttatacttcataatggagcctgcagcccgggagcccgccaggggtgtatgaaaagcattgaagttaaacatagtgcactgtctgtcgagttgcacagcgacatggaagtgaccgttaacgggcgcctcgtgtccgtgccatacgtgggagggaacatggaggttaatgtttatggggcaatcatgcatgaggtccggttcaatcacttagggcacatttttacctttacccctcagaataacgaatttcagttacagctcagccccaaaacttttgcgagtaaaacgtatggactgtgcggaatttgtgacgagaatggggcaaacgactttatgctgagggacgggacggtgactacagattggaagaccctggtccaagagtggacggtccagcgaccagggcagacatgtcagcccatcttggaggaacaatgtctggtgccagattcctcacactgccaagtgctgctgctcccccttttcgccgagtgccacaaggtccttgcacccgcaacgttttatgccatttgccagcaggacagctgccaccaggagcaggtgtgtgaagtgatcgcctcctacgcccatctgtgcagaacaaacggagtgtgcgtagattggaggactcctgatttttgcgctatgtcttgtcccccaagtttggtgtataatcactgcgaacacggttgcccgagacactgcgatggaaatgtctcctcctgtggggaccatccatccgagggttgcttctgtcctccagacaaagtaatgttagagggatcctgtgtgcctgaagaggcatgcacccaatgcattggagaagacggggtccagcaccagtttctggaggcttgggtgccggaccaccagccttgccagatctgcacatgtctgtcggggcggaaagtcaattgtactacacagccttgtcccacagcaaaggccccaacttgtggcctgtgtgaagtagcgcgtcttagacagaatgccgaccagtgttgcccggagtacgagtgcgtatgcgatccggtttcatgcgatctgccaccagttccgcactgtgagcggggcctccaacccaccctgaccaatccaggcgagtgccgtcccaatttcacctgcgcttgccggaaggaggaatgcaagcgagttagccctccgagctgcccaccacatcgcttgccaaccctacgcaaaacccagtgctgcgatgagtacgaatgcgcctgcaactgcgttaatagtacggtctcatgccccctggggtacctcgctagcacggcaactaatgattgcggctgtactacgacgacttgcctcccagataaggtttgcgtacaccgctccaccatctaccctgtaggccagttctgggaagaaggctgtgacgtgtgtacatgcactgacatggaggatgccgtgatggggttaagggtagcgcaatgctcccagaaaccttgtgaagactcctgcagaagtggatttacttacgtactccacgagggcgaatgttgcgggcgttgtctgccctccgcctgtgaggtggtaacaggctccccgcgcggggatagtcagagctcttggaagagcgttggaagccaatgggccagcccagagaatccctgtctcattaatgaatgtgtcagggtgaaagaggaagtattcattcagcagcgcaatgtctcgtgtcctcagctggaggtgccggtgtgcccctccggctttcagctgtcttgtaaaacctcggcttgctgtccatcctgccggtgcgagagaatggaggcatgcatgctgaatggcaccgtgattggtcctgggaagacagtgatgatcgacgtctgcactacatgcagatgtatggttcaagtgggcgtgatatctgggttcaaactggagtgccgcaaaacaacatgcaatccctgtccgctgggctataaggaagagaacaacactggagaatgctgtggcaggtgcctcccgacagcgtgtacaatacagctcaggggcgggcaaataatgaccctcaagcgagacgagaccctccaggacggctgcgacacccatttttgcaaggtcaatgaaagaggagagtacttctgggagaagcgtgtgacagggtgccctccgttcgatgagcataaatgcctcgctgaaggggggaaaattatgaagataccagggacgtgttgtgatacatgtgaggaaccagagtgtaatgacatcacagctcgtttacaatacgtgaaagtgggttcatgcaagtcggaggtagaggtggatatccattactgtcaaggtaagtgcgcaagcaaggcaatgtactccattgacatcaacgatgtgcaggatcagtgtagttgctgttctcccaccagaaccgagcctatgcaggtggccctccactgtacaaacggctctgtggtgtaccacgaagtcctcaatgcaatggaatgcaaatgctctccccggaagtgctcaaag

SEQ ID NO: 12509 - DNA, 8439 bp, Artificial Sequence
  derived and/or modified sequence
atgatcccagcccggtttgccggagtcctgttggcgctggccctgattctgcctggcactctttgcgccgaaggaacccggggaagatcctcgactgcacgatgttcactgtttggttcagacttcgttaacaccttcgatggctcgatgtactcatttgcaggctactgttcctacttgcttgcaggaggctgccagaagagatcgttttcgattattggtgacttccaaaatggcaagcgtgttagcttgtccgtatacctcggagagtttttcgatattcatctttttgtcaacggtaccgtgacgcagggggatcaacgtgtttccatgccatacgcatccaagggcctgtacctcgagactgaagcaggatactacaaactttcgggagaagcatacgggtttgttgctcgaattgatggctcgggcaattttcaggtgcttctgtcagatcgctacttcaacaaaacctgcgggctgtgtggtaatttcaacatctttgctgaggacgacttcatgactcaggaaggtactcttactagcgatccatacgatttcgcaaactcgtgggcactttcatcgggcgaacaatggtgcgagagggcatcacctccatcgtcctcgtgtaacatatcttccggcgaaatgcagaaaggtctttgggaacaatgtcaactgcttaagtccacttcagtgttcgcgcgctgccatcctttggtggatccagagccttttgtggcactttgtgaaaagaccttgtgtgaatgtgcaggagggctcgagtgtgcgtgcccagcccttttggagtacgctcgcacttgtgctcaggagggaatggtgctctacggatggaccgatcattcggcctgttcgcctgtgtgtccagcaggtatggaataccggcaatgcgtgtcaccatgtgcaaggacctgtcaaagcctccatatcaacgaaatgtgtcaagaaagatgcgtcgatggctgctcgtgcccggaaggccaactgcttgatgaaggactgtgtgtggaatccactgagtgcccatgtgtacactcgggtaagcggtacccgccaggtacttcacttagccgcgattgtaatacctgtatctgccgcaactcacagtggatctgcagcaacgaagaatgccccggagagtgtctcgtcactgggcaaagccacttcaagtcatttgacaaccgttacttcaccttctcaggcatttgtcaatacttgcttgcgcgtgattgtcaagatcactcgtttagcattgtcatagaaactgttcagtgtgccgacgatcgagatgccgtgtgtactaggtcggttaccgtgagactcccgggactgcataatagccttgtgaaactgaagcatggcgcgggagtcgctatggacggacaggatgtccaactgcctctgcttaagggggatcttagaattcagcacactgtgaccgcctcggtgcgcctgtcgtacggggaggacctgcagatggactgggatggacgtggacgcctgctcgttaagctctcccccgtgtacgcggggaaaacttgtggcctttgcggcaactataatggtaaccaaggggacgattttcttactccctcaggtcttgcagaaccaagagtggaggactttggtaatgcgtggaaacttcacggcgactgccaggatctgcaaaaacaacattccgatccttgtgcactgaaccccagaatgacgagattctcagaggaggcatgtgccgtccttacctctccaacctttgaagcatgccatagagcagtcagcccgctcccctacctgcggaattgcaggtacgatgtctgtagctgttccgatggaagagaatgcctttgcggagccctggcatcgtacgctgcagcatgcgcgggtcgcggagtccgggtggcgtggcgcgaacctggacggtgtgaactgaattgtccaaagggccaggtgtacctgcaatgtggaacgccttgcaatctcacttgcaggagcctttcttaccctgatgaagaatgtaacgaggcatgtctcgagggatgtttctgtcctcccgggctgtacatggatgaacgcggagattgcgtgccgaaagcacagtgtccatgttactacgatggtgagatttttcaacctgaggacatcttttcagatcaccataccatgtgttactgtgaggatggtttcatgcattgtactatgtctggtgtccctggatcgcttctgcctgacgcagtgctgagttcgccactgagccatagatccaagagatcgctgtcatgtcgccccccgatggtgaaacttgtgtgtcctgctgataaccttagagcagagggcctcgaatgcaccaagacctgccaaaactacgatctggagtgcatgtccatgggatgtgtgtcagggtgtctctgtccccccggtatggtccggcacgagaatagatgtgtcgccctggagaggtgtccttgtttccatcagggaaaggaatacgccccaggagaaactgtgaaaattggatgtaacacttgtgtgtgtcaagatagaaagtggaactgtaccgatcacgtgtgtgacgcaacgtgtagcactattggtatggcccattacctgacttttgacggtctgaagtacctgtttcccggggaatgtcagtacgttctggtgcaggattactgtggtagcaacccaggtacctttagaatactggtgggaaataaggggtgttcccatccctccgttaagtgtaagaagcgggtcactatccttgtggaaggaggggagatcgaactgtttgatggggaggtgaacgtcaaaagaccaatgaaggacgagactcattttgaagtggtggaatccggacgatacattattctgctcctggggaaagcactgtccgtggtctgggatagacatctgtccatctcggtggtgctgaagcaaacgtaccaggaaaaagtctgcggtctgtgcggaaactttgatggcattcagaacaacgacctcacttccagcaatcttcaagttgaagaggacccagtggatttcggaaattcctggaaggtgtccagtcaatgcgcagatacccgtaaggtgccattggatagcagccccgccacctgccataacaacattatgaaacaaactatggtggactcttcctgtcggatcctgacctccgacgtatttcaggactgcaataaacttgtcgatcccgagccctaccttgacgtgtgcatttatgacacctgttcttgtgaatccatcggggactgtgcatgcttttgcgataccattgcagcatacgcacatgtgtgtgcacaacatggtaaggtagttacgtggcgtacggcaaccctttgtccccaatcgtgtgaggagaggaaccttcgagaaaacggttacgaatgcgaatggcgctacaattcatgtgctcctgcatgccaggtcacctgtcagcatcctgagcctctggcatgccctgtccaatgcgtggaagggtgccacgcccactgtccacctggaaaaatcttggatgagcttctccagacctgcgtcgatccagaggattgtccagtctgtgaagtggccggtcgaagatttgcctccgggaagaaggtgactctgaatccatctgatccggaacattgtcaaatatgtcactgtgatgtggtcaatcttacttgcgaagcatgccaagaacccggcggattggttgtccccccaaccgatgctccggtatccccaactactttgtacgtggaggatatcagcgagccccctctccatgatttctattgtagccggctgttggatctcgtttttctgcttgacggatcttcgcggctcagcgaagcagaattcgaggtgcttaaggcatttgtggttgacatgatggaaagacttcgcatttcacagaagtgggtcagagtcgcagtggtggaatatcacgacggatcccacgcatacatcggcctgaaggatagaaagcggccctcggaactgcggcgcattgcctcccaggtgaagtacgcaggttcccaggtggcatccacctctgaagtgcttaagtacacccttttccaaatcttttcaaagattgatagacctgaggcgtcacgaataactcttctgctgatggcatcccaggaaccacaacggatgagccggaactttgtgcgctatgtgcagggtcttaagaagaaaaaagtgatagtgattcctgtcgggatcggaccacatgccaaccttaaacaaattcggctgattgaaaagcaggcacccgaaaacaaggccttcgtcctgagctccgtcgatgagcttgagcagcaacgggatgaaattgtgtcttacctctgtgatctggctcccgaagcaccaccacctacgctgccccctgatatggcacaagtgaccgtcggacccgggctgctgggggtttcaaccttgggtccaaagcgcaactccatggtgctcgatgtggcatttgtgctcgaaggatccgataagattggtgaagccgactttaatcggagcaaggaattcatggaagaagtgatccaaagaatggacgtgggccaagactcaatccatgtcactgtgctgcaatattcgtacatggtgactgtcgaatacccattctcggaggctcagagcaagggggatatactccagagagtgagggaaattcgctaccagggaggtaacaggacgaacactggacttgcattgaggtacctttcagatcattcgtttctggtgagccaaggtgatagagaacaagctccaaacctcgtgtacatggtcactggaaatcccgcatcggacgagattaagagacttcctggagacatacaagtggtcccaatcggcgtaggcccaaatgcaaacgtccaagagctcgaacggattggttggcctaatgcacctattctcatacaagacttcgaaactctgccgcgggaagcgccagacctcgtgttgcaacgttgctgcagcggtgaaggcctccagatcccgactctttcaccagctccagattgtagccaacctctggacgtgatcctgctcctggacggatcgtcctcctttcctgcatcatactttgatgaaatgaagagctttgcaaaagcatttatcagcaaggccaacatcggcccgcgcctgacccaagtgtcagtgctgcaatacggatcgattactactatcgatgtgccgtggaacgtggtccctgagaaggcacatcttctctcgcttgtggacgttatgcagagagagggaggaccatcgcaaattggagatgcactgggtttcgccgtgcggtacctcacttcagaaatgcatggcgccagacccggagcgtcaaaggcggtggtcattctggtcaccgacgtgtccgttgactccgtcgacgcagcagctgacgccgcaagatccaatcgagtgacggtgtttcccatcggtatcggggatcgctacgacgcagcccaacttcgcattctcgcaggccctgccggtgattccaacgtggttaagctccaacgaatagaagatctgcctactatggtgacgcttggtaattccttcctgcacaagctctgtagcggcttcgtgcgaatctgtatggatgaagatggtaatgaaaaaagacctggggacgtgtggacgcttcctgaccagtgccatacggtgacttgccagccagatggtcagactttgctgaagagccacagggtcaactgcgaccggggacttagacccagctgtcctaactcccaatcacctgtgaaggtcgaggaaacttgcggatgtcgctggacgtgtccttgcgtgtgtacgggatcctctacccgccacattgtgactttcgacggccagaactttaaactgaccggatcctgttcttatgtgctctttcagaacaaggaacaggatctggaagtgattctgcataacggagcatgttcacctggtgctagacagggatgcatgaaaagcattgaagtcaagcattcggcacttagcgtggagcttcattccgatatggaagtgaccgtgaacgggagactggtgtccgtcccttacgtgggaggaaatatggaagttaatgtatacggagcgattatgcatgaagtgcggtttaaccacctgggtcacattttcaccttcacccctcaaaacaacgaatttcagcttcaattgagccctaaaaccttcgcttcgaaaacctacgggctttgcggtatctgcgatgaaaacggagcgaatgactttatgctgcgcgatgggacggtgaccacggattggaaaaccctcgtgcaagaatggactgttcagcgaccaggacagacttgtcagcccatccttgaggaacagtgtctggtgccagatagctcccactgccaagtgctcctgctccctctctttgcagagtgtcataaagtgcttgccccggcaactttctatgcgatctgtcagcaggactcgtgccaccaagagcaggtgtgtgaagtgatagccagctacgcacatctgtgccgaacgaatggagtctgcgtggactggagaacccctgatttttgtgcaatgtcctgcccaccgagccttgtctataaccattgcgagcacggatgtccccgccattgtgatggcaacgtgtcgtcgtgcggggaccacccgtctgaaggttgtttctgtccccctgataaagtgatgcttgaagggtcgtgtgtgcctgaagaggcctgcacccaatgtattggtgaggatggggtccagcaccagtttcttgaggcatgggtcccggaccaccaaccttgtcagatctgtacctgtctctcgggaagaaaggtcaattgcactacccagccctgcccaaccgcgaaggcccccacttgtggtttgtgcgaagtggcaaggcttcgtcagaacgcggaccaatgttgccctgagtacgagtgcgtgtgtgatccagtgtcgtgtgatttgccccctgtaccacactgtgagagaggcctgcaacctactttgactaaccctggtgaatgccgaccgaactttacctgtgcctgccggaaggaagagtgtaaaagagtgagcccaccttcatgcccacctcaccgcctccccactctgcgcaagacccaatgttgcgatgagtacgaatgtgcgtgtaactgcgtgaattcaactgtcagctgtcctcttggatacctcgcctcgaccgccacgaacgattgtggttgtactaccaccacctgtctgccagataaggtctgtgtgcatcggtcgaccatatacccagtgggacaattttgggaggaaggttgcgatgtgtgtacttgtactgatatggaggatgcagtgatgggtcttagagtggcacaatgctcgcagaagccatgcgaagatagctgtagatccggctttacctacgttctgcatgaaggagaatgctgcggaaggtgcctgccttcggcatgtgaggtggtgaccgggtcgccgcggggagattcccaatcgagctggaagtcagttggatctcaatgggcctcgccagaaaacccatgcctgattaatgaatgtgtccgcgttaaggaagaggtgttcatccagcagaggaatgtgtcttgtcctcaactcgaagtccccgtgtgcccttctggttttcagctgtcgtgtaagacctccgcatgttgtccgtcctgccgatgtgaaaggatggaggcgtgtatgcttaacggaaccgtgatcggtcctggtaagactgtcatgattgacgtttgtaccacttgtcggtgcatggtccaagtcggagtgatttcgggattcaaacttgagtgcagaaagaccacctgcaacccttgcccactcggatacaaagaagaaaacaacaccggtgaatgttgtggcagatgtctgccgactgcatgtactatacagctccggggagggcaaatcatgactcttaaacgtgacgaaactcttcaagatggatgcgatacccatttttgcaaggtcaacgagcgaggcgagtacttttgggaaaaacgtgtgaccggttgtcctccctttgacgaacataagtgtctcgcagaaggtggcaagattatgaagatccctggcacctgttgcgacacctgtgaagaaccagaatgtaatgacataaccgcacgattgcagtacgtcaaagtgggtagctgtaagtcagaagtcgaagtggacattcattactgtcagggaaagtgtgcctccaaggcgatgtactccattgacattaatgatgttcaagaccaatgtagctgttgtagccctacccgcaccgagcctatgcaagtcgcgctccattgtactaacggatcggtagtgtaccacgaagtgctcaacgctatggaatgtaagtgtagtcctcgcaagtgttcaaag

SEQ ID NO: 12510 - DNA, 8439 bp, Artificial Sequence
  derived and/or modified sequence
atgatcccggctaggttcgcaggtgtgctgctcgccctggcactcatactccccggtacgctctgcgcagaaggtacgagaggtagatcctcaaccgcaagatgcagcctttttgggtcggattttgtgaatacttttgatggatcgatgtacagttttgcaggatactgtagttacctgcttgctggtggttgtcagaaacgttcgttctccatcatcggagatttccagaacggaaagcgtgtgtccctttcggtgtaccttggagagtttttcgatatccatctctttgtcaacggaactgtcactcagggggatcagcgtgtgtcgatgccctatgcgtcgaaaggactttaccttgaaactgaggcgggttactacaaactgtccggggaagcatatgggtttgtggcccgcattgatggttccggtaactttcaagttcttttgtccgaccgctatttcaacaagacttgcggcctttgtggcaatttcaacattttcgcagaagatgacttcatgacccaagaaggcactctgaccagcgatccatacgatttcgcaaactcatgggcccttagctctggagagcagtggtgcgagagggcgtcacctccaagcagctcatgtaatatctccagcggcgaaatgcagaaggggctttgggagcagtgccaacttctcaagtcgacctcggtgtttgctagatgccatcctcttgtcgacccggagccctttgtggccctttgcgaaaaaactttgtgcgaatgcgccggtggcctggaatgtgcctgcccagctcttcttgagtacgcccgaacctgtgcgcaggaagggatggtgctgtacggctggacggatcatagcgcctgctcgccggtatgcccggccggaatggagtaccgacaatgtgtgagcccttgtgcccgtacctgtcagtcgctccacatcaacgaaatgtgtcaggagcgatgtgtcgatggatgttcttgtccagagggacagcttcttgacgaaggattgtgcgtcgaaagcaccgagtgcccttgcgttcactcgggcaagagataccctcctggtaccagcctttcacgggattgcaatacctgtatctgtcgtaactctcaatggatttgttccaatgaggagtgtccaggagagtgcttggtgactggacagagccactttaagtcctttgataatcgttactttaccttctccggaatctgtcaatacttgctcgcaagggactgccaagatcattccttttcgattgtcatcgaaaccgtgcaatgcgcagatgaccgagatgcagtgtgtacccggtcggtcactgtgagactccctggcctgcataactcattggtgaagctgaagcatggagcaggagtggcgatggacggacaggatgttcaattgcctctgcttaaaggggatctgcgcatccaacacactgtcacggcaagcgtgcggctctcgtacggcgaagatttgcagatggattgggacgggcgcggaaggctgctcgtgaagctgagccccgtgtatgcaggaaagacgtgcggactttgtggtaattacaacggcaatcaaggcgatgattttctcactccttccggactggcagaacctagggtcgaagatttcggaaacgcatggaagttgcacggagattgccaagatcttcaaaagcaacattcagatccatgtgcattgaaccctcgcatgacccgattcagcgaagaagcatgtgccgtcctgacttctcccaccttcgaggcgtgccatagggccgttagcccacttccttacctgcgcaattgccgttacgacgtgtgtagttgctcggatggaagggagtgcttgtgtggtgcactggcatcatacgcagcagcctgtgcaggaagaggtgtccgcgtggcatggcgagagccgggacggtgtgagttgaactgtcctaagggtcaggtctacctccaatgtggaaccccatgcaatctcacttgtcgatcgctctcatacccagatgaagaatgtaatgaggcgtgtcttgaagggtgcttttgtccaccaggtctgtacatggatgaaagaggcgactgtgtccctaaagctcagtgcccttgttactacgatggagagattttccagccggaggatatctttagcgatcatcacactatgtgttactgtgaggacggctttatgcattgtaccatgtccggagtcccaggttcgctgctccccgatgcagtcctctcctcccctctgtcacaccgcagcaaacggtccctttcgtgtcgaccgcccatggtgaaactcgtgtgtcctgcagataatctgagagcagaaggtcttgaatgtactaagacctgtcaaaactacgatctcgagtgcatgtcaatgggatgtgtgtccggatgcctctgccctccaggaatggtgcgccatgagaacaggtgcgtggctctggaacggtgtccttgctttcaccaaggaaaagaatacgcaccaggcgagacggtgaagatcggttgtaacacctgcgtgtgtcaagaccgtaaatggaactgtactgatcatgtgtgtgacgcaacctgttccaccattggtatggcgcattacctgaccttcgacggactcaaatacttgtttcctggcgagtgccagtacgtgctggtgcaggactactgcggaagcaatccaggcacctttagaatcctggtgggtaacaaaggatgttcgcacccctcggtgaagtgtaagaaaagggtgacgattcttgtggagggaggtgaaatagagcttttcgatggagaagtcaacgtcaagcggccaatgaaggatgaaacccatttcgaagtggttgagtcgggccggtacattattctgctgcttggaaaggcactttccgtggtgtgggatcgccacttgtccatctccgtcgtgctgaagcagacctaccaagagaaggtttgtggtctgtgcggtaactttgacggtatccaaaacaatgatttgacttcgtccaatctgcaagtggaagaagatcccgtcgattttggaaactcgtggaaggtttccagccaatgtgccgacaccaggaaggtgccccttgattcgagccctgctacctgccataacaacattatgaaacagaccatggttgactcgtcgtgtagaatactgacctccgatgtgttccaagactgtaacaaacttgtggaccctgaaccatacctggatgtctgtatctacgatacctgttcttgtgaaagcattggagattgtgcatgcttttgcgataccatcgccgcttacgcacacgtgtgtgctcagcatggcaaagtggtcacttggagaaccgccaccctttgcccacaatcgtgtgaagaacggaacctccgtgaaaacggctacgaatgtgagtggcgatacaatagctgcgcacctgcctgtcaagtcacgtgtcaacacccagaaccactcgcatgtccagtgcagtgcgtcgaaggatgtcatgcacattgtcctcctggcaagatacttgacgaacttctccagacctgtgtcgaccctgaagattgccctgtttgtgaggtggctggtaggagatttgcttcgggtaagaaggtcacccttaacccttcagatcctgaacactgtcagatttgtcactgtgatgtagtaaatctcacgtgtgaagcatgtcaggagccggggggactggtggtgcctccaaccgacgcacccgtgtccccaaccaccctctacgtcgaggacatttcggaaccacctcttcatgacttctattgttcccgtctgctggatttggtattcctgctggatggatcgagcagattgtcggaagcggaatttgaagtccttaaagccttcgtggtggacatgatggagaggctgagaatctcccaaaagtgggtcagagtggcggtcgtggaatatcatgacggtagtcatgcgtacattggcctgaaggatcgcaagaggccctcagagcttcgaagaattgcctcgcaagtgaaatacgcaggctcacaagtggctagcacttccgaagtccttaagtacactctctttcagattttcagcaagattgacagaccggaggccagccggattactctgcttcttatggcaagccaggagcctcagcggatgtccagaaatttcgtgagatatgtgcagggacttaagaagaaaaaagtcatcgtgatccctgtgggaattggacctcacgcaaatcttaagcaaatacgcctcattgaaaaacaggcccctgagaataaggcattcgtcctgtcatcagtggatgaactcgagcaacaaagggatgagatagtctcctacttgtgtgacctggcacccgaagcgcctccccctacccttcctcctgatatggctcaagtgacggtcggccccggactcctgggcgtttcgaccctgggcccgaagcgcaattcgatggtcctggatgtcgcctttgtgcttgaaggatcggataagatcggtgaggcagactttaacagaagcaaggagtttatggaagaggtcattcagcgcatggacgtcggacaagactcaatacatgtgactgtgctccagtactcttacatggtgactgtggagtacccgttctcggaagcacaatcgaagggagatattctccagcgcgtgcgagaaatccggtaccaaggagggaatcgcaccaacactggtctggctttgcgttacctgtcagatcactcgttcctcgtctcacaaggggatagggaacaggcacccaacctggtgtacatggtgaccggtaaccccgcttcggacgaaatcaagagattgcccggggatattcaagttgtgcccattggggtcggacctaacgctaatgtgcaggaactcgaacgaataggttggcctaacgcacctatcctgatccaagactttgaaaccctcccaagagaagcgcccgacctggtcctgcagcgttgctgtagcggagaggggttgcagattccaactctgtcgccagcaccagactgttcacagcctcttgacgtgattctgcttttggatggctcatcatcctttccagcgtcgtactttgatgaaatgaagtcatttgccaaggccttcatatccaaagcgaacattggtccacgcttgacccaagtcagcgtcctgcagtacggtagcattaccacgattgacgtgccttggaatgtggtgccagagaaggcacatctgctgtcactggtggacgtgatgcagcgggaaggaggtccatcccaaatcggcgacgcactgggatttgccgtgcggtacctgacctccgagatgcacggcgcacggcccggagcatccaaagcagttgtgattcttgtgactgacgtgtcggtggatagcgtcgatgctgcagcggacgcagcacgctcaaatcgggtgactgtctttcctatcggtattggtgatagatacgatgcagcgcaactgaggatacttgcaggaccagcgggagattccaacgttgtgaaactgcagcgcatcgaggatctgcccaccatggtgacccttgggaactcatttctgcataagctctgttcagggtttgtgcgcatttgtatggacgaggacgggaacgaaaaaaggcctggtgacgtgtggactctgcctgaccaatgtcataccgtgacgtgccaacccgatggtcaaactttgctcaaatcccatagagtaaattgcgatcggggacttcgaccatcgtgtccgaactcccaatcccctgtgaaggtcgaagaaacgtgtggctgtagatggacctgtccctgtgtctgtactgggtcatcgacccgacatattgtgacgtttgacggacaaaacttcaagttgaccggatcatgctcgtatgtgctgtttcaaaacaaagaacaggaccttgaggtcattctgcataacggcgcttgtagccctggtgcgcgccagggatgcatgaagtcaattgaagtcaagcactctgccctttccgtcgaactgcatagcgatatggaggtcactgttaacggaaggttggtatctgtgccatacgtgggaggaaacatggaggtgaacgtgtacggagcaatcatgcacgaagtgcgctttaatcatcttggacacattttcacctttacccctcagaacaacgaatttcaactgcaactgtcgcctaagacttttgcgagcaagacctatggactttgcggaatatgtgacgagaatggagcgaacgactttatgcttagagatggcacggtgaccaccgattggaaaacccttgtgcaggaatggaccgtgcaaagaccagggcaaacctgccagcctatccttgaagaacaatgtctggtcccagactcctcccactgccaagtgctccttctgcctcttttcgcagagtgccacaaagtgcttgcacctgccacgttttacgcaatctgtcagcaagattcgtgtcatcaggaacaagtgtgcgaagtgattgcatcctacgcgcacctgtgtcggactaatggtgtctgtgtggattggagaactcctgatttttgtgcgatgtcgtgccctccttctctcgtgtacaatcattgcgagcatggttgcccgcgtcactgcgacggcaacgtgagctcatgtggagatcatccaagcgaggggtgcttctgcccacccgataaggttatgcttgaagggtcctgcgtgcccgaagaggcctgtacccaatgtatcggcgaggacggtgtccagcatcagtttctcgaagcctgggtgccagaccatcaaccatgccagatctgtacctgcctgtcgggtagaaaggtgaattgtaccactcaaccatgcccgactgccaaagcccctacctgtggactgtgcgaagtcgcgcgcttgcgacaaaacgccgatcagtgctgtcccgaatacgaatgtgtctgcgatccagtgagctgtgacctccctcccgtgccacattgcgaacgcggcctccagcctactctgactaaccctggggaatgccgacctaactttacttgtgcctgtagaaaggaagaatgcaagagagtgtcaccacctagctgccctccacaccgcctgcccaccctccgaaagacccaatgctgtgatgagtacgaatgtgcatgtaactgtgtgaacagcactgtcagttgtcctctcggttacttggcaagtacggcaacgaatgactgtggttgtaccaccactacttgccttccagataaggtctgtgtgcaccggtccaccatttaccccgtgggtcaattctgggaagagggatgtgatgtttgtacctgtactgacatggaggacgccgtgatgggacttcgggtggcacagtgctcacaaaagccctgtgaggatagctgtcgttcaggctttacctacgtgcttcatgaaggtgaatgctgcggtcggtgccttccttctgcatgtgaggtggtcacggggagcccccgcggtgattcacagtcgtcctggaaatcggtgggttcacagtgggcatcaccagaaaacccctgtctgattaacgaatgcgttcgtgtgaaggaagaagttttcattcagcagcgcaacgtgtcatgtccccagctggaagttcccgtgtgccctagcggatttcagctgtcatgtaaaacgagcgcatgttgtcctagctgtagatgtgaaaggatggaggcctgtatgctgaatggaacggtgattggccctggaaagactgtgatgattgatgtctgcaccacctgtagatgtatggtccaagtgggtgtgatctcgggatttaagttggaatgtagaaaaactacgtgtaacccatgtccgctcggatacaaggaagagaacaataccggagagtgttgcggtaggtgtttgcctacggcctgtaccattcaactgagaggaggacaaatcatgactctgaagagggatgagactttgcaagatggctgcgacacgcatttctgcaaggtgaatgaaaggggtgagtacttctgggaaaagcgagtgacggggtgtccacctttcgacgagcacaagtgtctggcggagggaggcaagataatgaagataccaggtacttgctgtgatacttgtgaggagccagaatgtaacgatattactgcccgcctgcaatacgtgaaggttgggtcgtgcaaatccgaagttgaagtcgatattcattactgtcaaggcaagtgtgcttcgaaggccatgtactccattgacatcaacgatgtgcaagaccagtgtagctgctgttcgcctactagaaccgagccaatgcaagtggcactgcattgcactaacggttcggtcgtctatcatgaagtgcttaacgcaatggagtgtaaatgtagccccagaaagtgttcgaaa

SEQ ID NO: 12511 - DNA, 8439 bp, Artificial Sequence
  derived and/or modified sequence
atgatcccagcccggtttgcaggtgtcctgttggctctggcactgatcctcccaggaacgctgtgcgcagaaggtacaagaggtaggagttctacagcccggtgctccctgtttgggtctgacttcgtgaacaccttcgacggctccatgtactctttcgcaggctactgctcctacctgctggcaggcgggtgccaaaagcgctcatttagtatcataggagatttccaaaacgggaaaagggtgtctctgagcgtctacttaggggaattctttgacattcatttgttcgtcaatggcactgtgacccagggcgatcagagagtctcaatgccctatgccagcaagggtctttacctcgaaacggaggccggctactacaagttgtccggtgaggcctacgggttcgtcgcgcgaattgacggatccggtaattttcaggtactgctgtctgaccgatatttcaataagacatgtgggctgtgtggaaactttaatatttttgcagaggatgattttatgacacaggagggaaccctgacaagcgatccttatgacttcgctaatagctgggcactgagttcaggagaacagtggtgtgagagggcctctcctccatcttcttcctgtaacatctctagtggtgagatgcaaaagggtttgtgggagcagtgtcaactgcttaagtctacatccgtgttcgcacgatgccaccccctggttgatcccgagccatttgttgctttgtgtgagaagactctgtgcgagtgtgcaggtggattagaatgtgcctgtccagccctcttagagtatgctcgtacgtgcgcgcaggaggggatggtcttgtatggctggacggaccactcagcatgctctcccgtctgtccagccgggatggaatatcgtcagtgcgtcagcccctgcgcccgaacatgtcagtccctgcacatcaatgagatgtgtcaagagcgttgcgtagatggatgtagctgtccagaaggacagttactggatgaaggcctgtgcgtcgaatccaccgaatgtccatgtgtgcatagtggaaagaggtatcctccgggaacttccctgtcccgagactgtaatacatgcatatgtaggaattcacagtggatctgcagcaacgaggagtgtcccggtgaatgcctcgtgaccggccagtcccatttcaagtcctttgacaatcgctacttcacgttttccgggatctgccagtacctgctcgcccgcgactgtcaggaccatagttttagcatcgtgatagagaccgtccagtgcgctgacgaccgggacgctgtgtgcacccgatctgtcactgtgaggctgccaggcctgcacaatagcttagtgaagttgaagcatggcgctggcgtggctatggacgggcaggatgtgcagctgccgcttttgaaaggggacctgcgcatccagcacaccgtgacagcctcagtacggctttcgtatggagaagacttacagatggactgggatgggcgagggcgcctacttgtgaagctcagtcccgtgtatgcaggaaaaacatgcgggctgtgtggcaactacaatggaaatcaaggcgacgatttcctaactcccagcgggctggccgaacctagagtggaggatttcggaaacgcgtggaagctgcacggagattgccaagatctgcagaagcagcatagtgacccttgtgccctgaatcctcggatgacacggttttctgaagaggcatgcgccgtactgacctctccaaccttcgaggcatgccatcgagctgtatcacccctgccctacctcaggaactgccggtacgacgtgtgttcttgcagcgacgggcgcgagtgtctctgtggagcgctagccagctatgcagcagcctgtgctggcagaggtgtgcgagtggcgtggcgggaacctggcaggtgtgagctgaattgccctaaagggcaagtataccttcagtgtggtacgccttgcaacctgacttgcaggtccctgagttacccagacgaggagtgcaacgaggcctgcttggagggatgcttctgcccacccggattgtacatggatgagagaggcgattgtgtgcccaaggctcagtgcccatgctattatgatggggagatttttcagccagaggatatattctctgatcatcacaccatgtgctattgtgaagacggattcatgcattgtacaatgagtggggtgccagggtccctactgcccgatgccgtgctgagcagcccactttctcatcggtctaagcggtcactgagctgtcggcctcctatggttaagctggtgtgccccgccgacaatctgagggcagaagggctggaatgtaccaaaacctgccagaactatgacctcgagtgcatgagcatgggctgtgtgtctgggtgtctctgcccaccggggatggtgcgccacgagaatagatgtgtcgccttggagcgctgtccttgcttccatcagggtaaagagtacgccccaggtgagaccgtgaagatcggatgtaatacatgcgtgtgccaggacaggaagtggaactgtaccgaccacgtctgcgacgccacttgctctactataggtatggcccactacctgacgttcgacgggcttaaatacctgttccccggagaatgtcaatacgttctggtgcaagactactgtggatctaatcccgggacgttccggattctggtgggaaataagggttgtagtcaccctagcgtgaagtgcaaaaaacgcgtgaccatacttgtggaggggggcgagatcgaactctttgacggcgaggtgaacgtcaaaaggcctatgaaagatgagactcactttgaggtggttgagagtggccggtacattatcctccttctgggcaaggccttgtccgttgtgtgggatcgacatttgtctatttctgttgtcctgaagcagacctaccaggagaaagtctgcggattgtgcgggaatttcgacgggattcagaataacgacctgacatctagcaatctgcaggtggaggaagacccggtcgacttcggtaattcttggaaagtgagttcccagtgtgctgacaccagaaaagtacccctcgattcatcccctgccacctgccacaacaacatcatgaaacagacgatggtagattcaagctgcaggattctcacgtccgatgttttccaggattgcaacaagctggtggacccagaaccatacctggatgtgtgcatatacgatacttgtagctgcgaatcaattggagattgcgcttgcttctgtgataccatcgccgcgtacgctcatgtgtgtgctcagcacggcaaggtggtcacatggagaacagccacgctttgcccccagtcttgcgaggagaggaacctgcgcgagaatggctacgagtgtgagtggagatataactcgtgtgctccagcttgccaggtgacgtgccagcatccagagccactggcatgtcccgtgcagtgcgtggaaggatgccacgcacattgtcctcccgggaaaattttggatgagctcctgcagacttgcgttgaccccgaagactgcccggtgtgtgaggttgctggccgcagattcgcgagtgggaaaaaggtgactttgaacccctccgacccggagcactgccagatctgtcactgcgacgttgtgaaccttacctgcgaggcgtgccaggaaccaggcgggctggtcgtcccccctaccgatgccccagtgtcacctaccactctctacgtggaagacatctccgagccccctctgcatgacttttactgtagccgactcctcgacctcgtctttctgctcgatggctcctcgcgactgagtgaggccgagtttgaggtgctgaaagctttcgtggtggacatgatggagcgactacgaatctctcagaagtgggttagggtggccgtcgtggagtatcacgatggctcgcacgcgtacataggcctgaaggacagaaaacgaccatctgaactgcgcaggatcgcctctcaggtcaaatatgctgggtcccaggtcgcctctacaagcgaggtccttaaatacacactttttcaaatattttccaagatagatcgtccagaagcctccaggatcaccctgctgctgatggctagtcaagaaccccagcgaatgtcaaggaacttcgtgaggtacgtgcagggattgaagaaaaagaaggtgatcgtgattccggtcgggatcggccctcatgctaatctgaagcagattcgcttgatcgaaaagcaagcgccagagaacaaggcttttgtgctgagtagcgtggacgagctagagcagcagagggatgagattgtgagctatttgtgcgatctggccccagaagcccctccacctactctgccccctgacatggcacaggtcacagtgggaccggggttgctcggagtgagcaccctgggccccaaaaggaacagcatggtgctcgacgtcgcctttgtgctggaagggtccgataagatcggagaagccgattttaacagatccaaggaatttatggaggaggtgatccagcgcatggatgtgggccaggacagcattcatgtgactgtgctgcaatacagctacatggtgacagtggagtatccttttagcgaggctcagtctaagggcgacatcttgcagcgcgtcagggaaatccggtaccaagggggaaaccgcaccaacacagggctggccctgcgctacctgtcggatcactcatttttggtgagccagggtgaccgggagcaagccccgaacctcgtatacatggtcactggcaacccggccagtgacgaaattaaacggcttcctggagatatccaggtggtgccaattggcgtcgggccaaacgcgaatgtgcaggagcttgagcggatcggatggccgaacgcccctattctgattcaggatttcgagacactgccccgtgaagcacctgatttagtgctgcaacggtgttgctctggagaaggtctccagattcctacattgtcacccgctcctgattgctcgcaacccctcgatgttatccttctcctcgatggcagcagttctttccccgccagctattttgacgagatgaagagttttgccaaggctttcatctccaaggcaaacattgggccaagattgactcaggtttccgtattgcaatatggctcgatcacaacgatcgacgtgccctggaacgtggtccctgagaaagcgcatctcctgagcctcgtagatgtcatgcagcgtgaaggagggccatcccaaattggggatgccctgggattcgccgtccgctacttgaccagcgagatgcacggagcccgccctggtgcaagcaaggctgtggtgatcctggtgaccgacgttagtgttgattccgttgatgcagccgccgacgcggcaagaagcaatagggtgaccgtgtttcccattggaattggggacaggtatgacgccgcccagctgcgcattttagccgggcctgcaggagactcaaatgtggtgaaactgcaaaggatcgaagacttgcccacaatggtgaccttgggaaattctttcctccataagctgtgctcgggcttcgtaaggatctgtatggatgaagacgggaacgaaaaacgccctggagatgtctggacccttccagaccagtgccataccgtaacatgtcaacctgacgggcagaccctgctgaaatcacatcgagtaaactgtgacagaggcctgagaccctcgtgccctaacagccagtctcccgttaaagtggaggagacctgtggatgtaggtggacctgtccctgcgtctgtacaggaagcagcaccaggcatatagttacatttgacgggcaaaactttaagttgactggatcgtgttcctacgtcctgttccaaaacaaagaacaggacctcgaagtgatactccacaatggagcttgttctcccggggctagacaaggctgcatgaaatcaatcgaagtaaagcatagcgctctgagcgtggagctgcatagcgatatggaagtcaccgtgaatggccgcttggttagcgttccctacgtaggtgggaacatggaggtgaacgtgtacggggccataatgcacgaagtccgctttaatcatttgggccacatctttactttcactccccaaaacaatgagttccagctccaactgtctcctaagacctttgcatccaagacttatggcctttgcggtatctgtgacgagaatggcgcgaacgatttcatgcttcgcgacgggacagtcaccacagactggaagaccttggttcaagagtggactgtgcagagacccggtcagacatgccagccaatcctagaagaacagtgcctggtgcccgattctagtcattgccaggttctgcttctgcctttgttcgccgaatgtcacaaggtgttagctccggcaactttttacgctatctgtcagcaggattcgtgccaccaagagcaggtgtgcgaggttatcgcctcctacgcccatttatgtcgtaccaacggcgtctgtgtggattggcgcacacccgacttctgcgcaatgagctgccccccaagtctggtgtataaccattgcgaacatgggtgtcccaggcactgtgatgggaacgtgtccagctgtggcgatcacccctccgaggggtgtttctgccctcccgacaaggtcatgctggagggatcttgtgtcccggaggaggcttgcacccaatgcatcggcgaggatggggtacaacaccagttcctcgaagcatgggtgccggaccaccaaccctgtcagatctgtacttgcctatctgggcgaaaggtaaattgtactacccagccctgccctacggcgaaggcgcccacttgtggcctgtgtgaagttgccaggctacgacagaacgctgatcagtgctgccccgagtatgagtgcgtgtgtgaccctgtttcctgcgacctcccccctgtgccccactgtgagaggggcctccagccaacgttgacaaatcctggcgaatgtcgccctaatttcacgtgcgcctgcagaaaggaagagtgcaaacgagtgagccctccctcctgccctcctcaccgattgcctacactaaggaaaactcaatgctgtgatgaatacgagtgcgcctgcaactgcgtgaatagtaccgtgtcctgccccctgggctaccttgcgtctaccgctacaaacgactgcggctgtacgacaactacctgcctgcccgacaaggtgtgtgtgcaccggtctactatctatccagtaggtcagttttgggaagaaggatgtgatgtttgcacctgtactgacatggaggacgccgtgatggggcttagggttgcccagtgctcccaaaaaccttgtgaggattcatgtcgcagcgggttcacctatgtgctgcacgagggggagtgttgcgggcggtgtctcccgtccgcatgtgaagtggtaaccggttcgcccagaggcgactcgcagtcatcatggaagtcagtcgggagccaatgggcaagtcctgagaacccgtgccttatcaacgaatgcgtgagggtgaaagaggaggtatttattcaacagagaaacgtgagctgcccacagcttgaggtgccggtttgcccctccggctttcagctgagctgcaaaaccagcgcctgctgtccttcatgccggtgcgagagaatggaagcctgcatgctcaatggcaccgtgatcggtcctgggaagaccgtgatgatcgacgtttgcacgacttgccgctgcatggtgcaggtcggcgttatttcgggctttaagctggagtgccgtaaaacaacatgcaatccctgcccccttggatataaagaagagaataacactggcgagtgctgcggtcggtgcctgccgacagcctgtactattcagcttagaggcggccaaataatgaccctgaaaagagacgaaacacttcaagatggttgcgacacccacttttgtaaagtgaacgagagaggggaatatttttgggaaaaacgagtgaccggttgtcccccgtttgatgagcacaagtgcctggctgagggcggcaagatcatgaagattccaggaacatgttgcgacacttgtgaggaaccggagtgcaacgacatcaccgcccgtctccagtatgtcaaagtgggctcgtgtaagtcagaggtcgaggtcgacattcactactgccaggggaaatgtgccagtaaagccatgtattctatcgatatcaacgacgtgcaggatcagtgctcatgttgttctcccactaggaccgagcccatgcaggtggctcttcactgcacgaacggtagcgtcgtttatcatgaggtactcaatgcaatggaatgcaagtgtagtccacggaaatgctcgaaa

SEQ ID NO: 12512 - DNA, 8439 bp, Artificial Sequence
  derived and/or modified sequence
atgattccagccaggttcgctggcgttctcctggctctcgctctgattcttccaggtactctgtgtgccgagggtaccagaggtaggagcagcacagcacgctgttcactcttcggtagcgacttcgttaacacattcgatggctcaatgtattcctttgctggatactgctcctatctgctggccggtggttgtcagaagagaagcttttccatcatcggcgatttccagaacggcaagagagtgtccttgtctgtctacttgggtgagtttttcgatatccacctgtttgtgaacggtacagtcacccaaggagatcagagagtatccatgccttacgccagcaagggcttgtatttggagactgaagctggatattacaagctgtctggcgaggcctacggttttgtagcacgcatcgatggctcaggtaacttccaagtgctgctgagcgatagatatttcaacaaaacatgcggcctctgcggaaacttcaatattttcgccgaagacgacttcatgactcaggagggcaccctgaccagcgatccctacgacttcgctaacagttgggccctgtccagtggcgagcaatggtgcgagagagctagcccacccagtagttcctgtaatataagcagcggagagatgcagaagggcctctgggaacaatgccagctgttgaagagcacttctgtcttcgccagatgtcatcctctggttgacccagaaccatttgtcgccctctgcgagaaaacactttgcgaatgcgccggcggcctcgagtgcgcttgccctgccctcctcgagtacgcaaggacctgtgcacaagagggtatggtgctgtatggctggaccgatcatagcgcttgttcccccgtgtgccccgcaggtatggagtaccgccaatgcgtcagtccatgcgcaagaacatgtcaatccctgcacattaacgagatgtgccaggaaagatgtgtggacggatgttcatgcccagaaggtcagctcctggacgaaggtctctgtgtcgaatccactgaatgtccttgcgtgcattctggcaaaaggtatccccccggtaccagcctgtctagagactgtaacacttgtatatgtcgtaactcacaatggatttgctccaacgaagagtgccccggcgagtgccttgtaacaggtcagtctcacttcaagtccttcgataacaggtacttcacattttctggcatttgtcaatacctccttgccagggattgccaggatcactctttttcaatcgtgatcgagactgtacagtgtgctgacgacagagacgcagtctgtactaggtcagttactgttcgtctccccggccttcataacagcttggttaagctcaagcatggagcaggtgtggccatggacggtcaagacgttcagcttcccttgctgaagggagacttgagaatccagcataccgttaccgcaagcgtaaggctgtcttacggcgaggaccttcagatggattgggacggaagaggccgtctgctcgtgaagctctctcccgtctatgctggaaagacatgcggactctgcggaaactataacggaaatcaaggcgacgattttctgacaccaagtggattggccgagccccgtgtcgaggactttggcaacgcctggaagctgcacggtgactgccaggatctgcaaaagcaacatagcgacccctgtgctctcaatcccaggatgacccgttttagcgaggaagcctgtgctgtcctcacaagcccaaccttcgaagcctgccaccgcgctgtgtccccccttccctatctcaggaattgtagatacgatgtttgtagttgttccgacggtcgtgagtgcctctgcggcgccctcgcttcttacgccgccgcatgcgccggtaggggcgtgcgcgtggcctggagagagcccggcagatgtgagttgaactgccccaaaggacaggtctaccttcaatgcggcaccccatgcaacttgacatgccgtagtctttcataccctgatgaagaatgtaacgaggcatgtcttgagggatgcttttgccctcccggactgtacatggacgagcgtggcgactgcgttcccaaggcccagtgcccatgctattatgatggagagatcttccaacctgaagacattttcagtgaccaccataccatgtgctactgtgaagacggtttcatgcactgcaccatgagcggtgtgccaggatcccttctccccgacgccgtgcttagcagcccattgtcccacagatctaagagatcactgagttgtaggccaccaatggtgaaactggtttgccccgctgacaacctgcgtgctgaaggcctggagtgcactaaaacttgccagaattacgacctggagtgtatgagtatgggctgtgtatccggatgcctctgtcctccaggcatggttaggcacgagaaccgctgcgtcgccctggaacgttgcccctgtttccatcagggcaaggagtacgcacctggagaaaccgttaagatcggatgcaatacttgcgtatgccaagaccgtaaatggaattgtactgatcacgtatgtgatgcaacatgctccacaatcggaatggcccactaccttaccttcgatggactgaagtacctgtttcccggcgagtgtcaatatgtactggtacaggattactgtggatctaaccctggaacattcagaatcttggtgggtaacaagggctgcagtcaccctagcgtcaagtgtaagaagcgcgtcactatcctggtggagggaggcgagatcgaactgtttgacggtgaggtcaatgtgaaaaggcctatgaaggacgagacccatttcgaggtcgtggagtccggaaggtacatcatcctgttgctcggtaaggctttgtccgtcgtatgggacaggcatttgagtatctcagttgtcctgaaacaaacttatcaggagaaggtctgtggcttgtgcggaaattttgatggcatccaaaacaatgaccttacttcttcaaaccttcaagtggaagaggacccagtggatttcggcaactcctggaaagtgagcagccaatgtgctgatacccgcaaggtcccattggacagctctcccgctacatgccataacaacatcatgaagcagactatggtcgactcatcttgccgcatcctgacatccgacgtgtttcaggattgcaataagctggttgatcctgaaccttacctggatgtatgcatttatgatacatgctcttgcgaatccatcggagattgcgcctgcttctgcgacaccatcgctgcctacgctcacgtgtgtgcacaacacggtaaggtggtgacctggaggacagccacactttgtccacaaagctgtgaagagcgcaaccttcgcgaaaatggctacgaatgcgagtggcgttacaactcctgcgctcccgcttgtcaggtgacttgccagcatccagaacctcttgcctgtcctgtgcagtgtgtcgagggttgccacgcacattgtccaccaggtaagatcctggatgagctgctccagacttgtgtggaccctgaggactgtcctgtgtgtgaggtggcaggtaggagattcgcaagtggcaagaaggtgaccttgaaccccagcgatcccgagcactgtcagatatgtcattgcgatgtggtcaacttgacatgcgaagcctgtcaggaacccggcggccttgtcgttccacccaccgacgctcctgtttcccctacaactttgtatgtggaagatatttcagagccacccttgcacgacttttattgctcacgtctccttgacctcgtgttcctccttgatggctcttccagactgtctgaggctgagttcgaggtgctgaaagccttcgtggtggacatgatggagaggctcaggatttctcagaagtgggtgcgtgtggctgtggtggaataccatgatggctcacacgcctacatcggactgaaagacaggaaacgcccatctgagctgcgcaggatagcttcccaggtgaagtacgctggatcccaggttgcaagcacctctgaggtgttgaagtataccctgtttcagatctttagtaaaatcgatcgtccagaggctagtcgtatcaccctgctcctgatggcatctcaggaacctcaaagaatgagccgcaacttcgttcgctacgtacagggcctgaagaagaagaaggttattgtgatcccagttggcatcggcccacacgccaacttgaaacagatacgtctgatcgagaagcaagctccagagaacaaggcattcgtcctgtctagcgttgatgaactggagcagcagcgtgatgaaattgtatcttacctttgcgacttggccccagaagcacctccccctaccctgcctcctgacatggctcaagtgacagtgggaccaggactgctgggtgtttcaaccttgggtcccaagagaaattctatggtgctcgacgtagccttcgtgctcgagggctcagacaagatcggcgaagctgacttcaatagaagtaaggagttcatggaggaggttatccagcgcatggatgttggccaagatagcatccacgtgaccgtgctgcagtattcctacatggtcacagtggagtacccattctccgaggcccaatccaagggcgacattctgcagcgcgtccgtgagatcagataccagggaggcaatagaacaaacaccggcctcgctctgcgctacctgtctgaccacagcttcctggtgagccagggagacagggaacaggcccctaacctcgtttacatggtaactggcaacccagcctccgatgaaatcaagcgtctccctggtgacatacaagtcgttccaattggagtgggacccaacgctaacgtgcaagagctggagaggatcggttggcccaacgcccctattctgatccaggattttgagacattgcctagagaggccccagatttggtcctccagcgttgctgttctggagaaggtctgcagatacccactttgtcacctgctcctgactgttctcaaccattggatgtgatcttgctgttggacggatccagctccttcccagcatcatactttgacgaaatgaagagtttcgcaaaagccttcatttccaaggccaatatcggcccccgtctcacacaggtctcagtgctgcagtacggcagcattaccacaatcgacgtgccatggaatgttgtgccagaaaaggcccatttgctttccctcgtcgatgtaatgcaaagggagggaggaccctcccagatcggcgatgccctcggcttcgccgtgaggtacctgacttcagaaatgcatggagctagacctggtgcatctaaggctgtcgttatccttgtcaccgacgtttctgttgattcagttgacgctgccgccgacgccgcacgtagcaacagagttactgtgttcccaatcggcattggcgatcgttatgacgccgcacagctgcgcatcctggctggtcctgctggcgattctaacgtcgtgaagttgcaacgtattgaggatctgccaactatggtcacactgggtaacagttttctgcataagctttgtagcggatttgtccgtatatgtatggatgaggatggtaacgaaaagagaccaggagatgtgtggactctgcccgaccagtgtcataccgttacttgtcagcccgatggccagactctgttgaagtcacaccgtgtgaactgcgacagaggtttgagaccatcctgccccaactctcagtctcctgtgaaggttgaggagacatgcggatgcaggtggacctgcccctgcgtctgcacaggttcaagtacacgtcacatcgtgacttttgacggtcagaatttcaaactcaccggcagctgcagttatgtcctctttcagaacaaggaacaagatcttgaagtaatcctgcataacggcgcctgctctcccggtgctcgtcagggttgcatgaagtccattgaggtcaaacatagcgccttgtctgtggagttgcactccgatatggaagtaacagtgaacggccgcctcgtctccgtgccctacgtaggcggtaatatggaggtgaacgtctatggtgctatcatgcatgaggttagatttaaccacctgggccacattttcaccttcacaccccaaaacaacgaatttcaactccagctgtcccccaagactttcgctagcaagacctacggattgtgcggaatatgcgatgagaatggtgctaatgacttcatgttgcgcgacggcactgtcacaactgactggaagacactggtgcaagagtggaccgtgcagcgcccaggtcaaacctgtcagcctattcttgaagagcagtgcctggttcccgattccagtcactgccaggtgttgctgttgcctctcttcgctgaatgccacaaggtgttggccccagccactttctacgccatctgtcaacaggacagctgtcatcaggagcaggtgtgcgaagtaattgcttcatacgctcatctctgcaggacaaacggtgtctgtgtggattggaggactcccgacttctgcgctatgtcctgccctcccagtctggtttataaccattgcgagcacggatgcccccgccactgtgatggtaacgtaagtagttgcggcgaccacccaagtgaaggttgcttctgcccacccgacaaggtgatgcttgaaggatcctgtgtccctgaagaagcctgcacacagtgtattggtgaagatggagtgcagcaccagttccttgaggcttgggtgcctgatcaccagccatgccagatctgtacctgcctctccggccgcaaggttaactgtacaactcaaccttgtcctactgcaaaagctcccacatgcggcctgtgcgaagttgctaggctgaggcagaacgccgaccagtgctgccctgaatacgagtgcgtgtgcgaccctgtctcctgcgatctgccacctgtgccccattgcgagcgcggcttgcagcctacactcaccaatccaggtgagtgcagaccaaacttcacttgcgcctgtcgtaaggaggagtgcaagagagtgtcacctcccagctgcccacctcaccgtttgcctaccttgagaaaaactcagtgttgtgacgagtatgaatgtgcctgcaactgcgtgaacagcaccgtttcctgccctctgggttacctcgcatccaccgctaccaacgattgtggctgtaccaccaccacctgtctccccgataaggtgtgcgttcataggagtactatctaccctgtgggacaattctgggaggagggctgtgatgtgtgcacatgcacagatatggaggatgcagtgatgggactgcgcgtggcacaatgttcccaaaagccttgtgaggactcttgcaggtccggtttcacctacgttctgcacgagggcgagtgttgtggacgctgccttcccagcgcatgcgaggtcgtgaccggcagtcccagaggagactctcagtcatcatggaagtcagtgggcagccagtgggctagtcctgaaaacccttgcttgattaacgagtgcgtgcgcgtcaaggaggaggttttcattcagcaacgtaatgttagttgtcctcaacttgaggtacctgtttgtccaagtggtttccagttgagttgcaagaccagcgcctgctgcccttcttgcagatgcgaaaggatggaggcatgtatgctcaatggaaccgtaatcggaccaggtaagactgtgatgatcgacgtgtgcactacttgtaggtgcatggtacaagtgggagtcatcagcggtttcaagctggaatgcaggaagacaacctgcaatccatgtccattgggttacaaggaggagaacaacaccggtgagtgctgtggaagatgtttgcccaccgcctgcactatacagctgcgtggaggtcaaattatgacactgaagagggatgaaactttgcaagatggctgtgacacacacttctgcaaggtgaacgagcgcggagaatatttctgggaaaaacgtgtgaccggatgccctcctttcgacgagcacaaatgccttgctgagggcggtaagatcatgaagattcctggaacctgttgtgacacctgcgaggaaccagaatgcaatgacattacagcacgcctccagtatgtcaaagtcggcagctgcaagtctgaagtggaagtggatattcactactgccagggcaagtgtgcttctaaggcaatgtactctatcgatatcaatgacgtccaggatcagtgttcatgttgcagccctacaaggacagagccaatgcaggtcgcactgcactgcactaacggcagcgtagtataccatgaagtactcaatgctatggagtgcaaatgttcccctcgtaaatgttccaag

SEQ ID NO: 12513 - DNA, 8439 bp, Artificial Sequence
  derived and/or modified sequence
atgatccctgccagatttgccggcgtcttactggccctggctttgattctccctggaactctgtgcgcagagggcacccgggggaggtcttcaacagcaaggtgttctttgtttggctctgacttcgtgaataccttcgacgggtccatgtatagcttcgctggctattgctcctacctcttagccggtggttgccagaagaggagtttcagtattatcggggacttccagaacggcaaacgcgtgtcactaagtgtgtatctaggcgagtttttcgacatccatctgttcgtgaatgggactgttacacagggtgatcagcgtgtctctatgccatacgcatctaaggggctgtacttagagacagaggccggttactataaactgtctggtgaggcatatggcttcgttgcccggatcgatggctcaggtaattttcaagtccttttgagcgatcggtacttcaataagacatgcggactatgcggaaacttcaatatatttgcagaggacgactttatgactcaagagggtactctgacttctgatccctacgacttcgcaaactcatgggccctatcctctggggaacaatggtgcgagcgagccagtccacccagttctagctgtaacatctcaagtggcgagatgcagaaggggctgtgggagcagtgtcaactgctgaagagtacaagtgtctttgcccgctgtcatcccctagtggacccagagccatttgtggccctgtgtgagaaaaccttgtgcgaatgcgctggcggtctggaatgcgcctgtcccgccctgctcgaatatgctaggacctgcgcccaggagggaatggtgctgtacgggtggaccgatcacagtgcctgctctcccgtctgcccagccgggatggaataccgccaatgcgtgtccccctgtgctagaacatgccagtctctgcacatcaatgaaatgtgtcaggagcggtgcgtcgatggctgcagttgtcccgagggacaactcctggacgagggactatgtgtcgagagtaccgaatgcccatgtgtccactctggcaaaaggtacccacctggcactagtctgagccgcgactgtaatacctgcatttgcaggaactcccagtggatatgtagtaacgaggaatgtcctggcgaatgtcttgtgacaggacagagtcacttcaaatcttttgacaataggtacttcaccttttccggtatttgtcaataccttcttgcaagggattgccaggatcactctttttctatagtcatagagactgttcagtgcgcagacgacagagacgccgtctgcacaagatccgtaaccgtgagactacctggtctgcacaacagtctggtgaagctcaaacacggggcaggcgtggctatggacggacaggacgtccagctccctctcctgaagggtgacctgcgaatccagcacaccgtgactgcatcagtcaggctcagctacggtgaggatttgcagatggactgggatgggcggggccgacttctggttaaactttccccagtctatgctgggaagacatgtggactgtgcgggaactacaacggaaatcaaggcgatgacttcctgactccgtcaggccttgccgaacccagggtagaagattttggcaatgcatggaaacttcacggcgattgtcaggacctccagaagcagcacagtgatccctgcgccttaaacccaaggatgactcggttcagcgaagaagcatgcgccgttctgaccagtcccaccttcgaagcctgccatagagctgtttctccactaccctacctccgcaattgccgttatgatgtgtgtagttgtagtgacggccgggagtgcctttgtggcgccttagcctcttacgcagccgcctgtgccggccgaggcgtgagagtggcatggagagagccaggtagatgtgagcttaactgccccaaaggccaggtttacctgcagtgtgggactccatgtaatctaacctgtcggagcctgtcttatccagacgaagagtgtaatgaggcctgccttgaagggtgcttctgtcccccaggcctgtatatggatgaaagaggcgactgcgtcccaaaggcccaatgcccgtgttattatgatggggaaatcttccagccagaagacatatttagtgatcaccataccatgtgctattgcgaggacggcttcatgcactgcaccatgtcaggcgtccccggtagtctgctgccagatgccgtgctgagttccccactatctcaccgaagcaagcggtccctgtcttgtcggcctcccatggtgaagctggtatgtcccgctgataacctgcgagctgagggcctggagtgcaccaaaacatgtcagaattatgatctggagtgcatgtccatgggctgcgtgagtggctgtctgtgtccacccggcatggttcgacatgagaatcgctgcgtagctctggagcggtgcccgtgcttccaccaaggcaaggaatacgctccaggcgaaaccgtgaagattggatgcaacacatgcgtgtgtcaggatagaaaatggaattgtaccgatcacgtatgcgacgctacatgttctaccattgggatggcacattacctgacttttgatgggttgaaatacctgtttcccggggagtgccagtacgtcctcgtccaagactactgtggctctaatccaggtacctttcggatcctcgtggggaataaaggttgcagtcacccaagcgtcaagtgcaagaaacgcgtcacaattctggtagaaggcggagagatcgaactgttcgacggtgaggttaatgtgaaaaggccaatgaaagatgagacccacttcgaggttgtcgagagcggccgctacattatcctgctgctgggcaaggcactgagtgtggtctgggatcgacacctgagtatttccgttgtgctgaagcaaacatatcaagagaaagtgtgtgggctgtgtggtaattttgatgggatacagaataatgatttaacctccagtaatctacaggttgaagaagatccagtggacttcggcaatagttggaaagttagcagccaatgcgcagacaccaggaaagtcccactcgactcaagtcctgctacttgtcataataacatcatgaagcagacaatggttgattcttcttgccggatcctgacctctgacgttttccaggattgtaataaactcgtggacccagaaccctatctagatgtgtgcatttacgacacctgttcttgtgagtctattggcgattgcgcttgtttttgcgatactatagccgcttacgcccacgtgtgcgcacagcacggaaaggtggtgacttggcggactgctacactgtgtcctcagtcatgtgaggagcggaatttaagggaaaacggttatgaatgtgagtggcggtacaacagctgcgccccagcctgtcaagttacttgccagcacccagaacctctggcctgtccagttcaatgtgtggagggttgtcatgcacactgccctcccggcaagatcttggatgagctgctgcagacatgtgtcgaccctgaagattgtcccgtgtgcgaggtcgccggaaggcgttttgccagcggcaaaaaggtgaccttaaatccatccgacccagagcattgtcagatttgccactgtgatgttgttaacctgacttgtgaggcatgccaggagcccggcggcctggtcgtgccacctaccgacgctcctgttagtccaactacactgtacgtggaagacattagcgaaccacccctgcacgacttctactgcagccgtctgctggatctggttttcctgctggatggctccagcagactcagcgaggccgaatttgaggtcttgaaggcttttgtagttgatatgatggagaggctgcgtatttcacaaaagtgggtgcgcgtggcagtcgtcgagtaccacgatggcagccacgcatacatcggcctgaaggatagaaaacggccttctgagctgcgccggattgctagtcaagtgaagtacgctggctctcaggtggcttcaacctccgaggtgctgaagtacactctgtttcagatcttttccaagatcgatagaccagaggctagtagaataacactgttactaatggcctctcaggagccccaacgaatgagtcggaactttgtgcgatacgtccagggcctgaagaagaagaaagttattgtgatacccgttggaatcggcccacacgctaacctaaagcaaataagactgattgaaaagcaggctccagagaataaagcctttgttctctcaagtgtggacgagctggaacaacagcgcgacgagatagtgtcttacctgtgcgacctggccccagaagctccccccccaaccctccctcctgatatggctcaggttacagtggggcctggcctgctaggcgtcagcacactaggtcctaagcggaattcaatggttctggacgttgcctttgtcctggagggctccgacaaaattggagaagcagattttaacaggtctaaggagtttatggaggaggttatccagagaatggacgtggggcaggactctattcatgttaccgttctacaatattcttatatggttactgtggagtatccatttagcgaggctcagtccaagggggatatactgcagcgggtcagagagattaggtaccaggggggtaacagaactaacaccggcctggcactccgatacctgagtgaccactccttcttggtgagtcaaggtgaccgcgagcaggccccgaatctagtgtacatggtgacaggaaatccagctagcgacgaaattaaacggctacccggcgatatccaggtcgttccaatcggggtgggtcccaacgctaacgtccaggagttagaacggattgggtggcctaacgctcccattctaatccaggacttcgagactctgcctcgggaggccccggatctagtgttacagcgctgctgctctggagagggcctgcagatccccacactgtcaccagccccagactgctctcagcccctggatgtgatcctgctgctggatggcagttcctcctttccagccagctattttgacgagatgaaatccttcgctaaagcttttattagcaaggctaacatcggaccccgtctaacccaagtgtctgtcctgcaatacggaagcataaccactatagacgtgccttggaacgtcgttccagagaaggcccatctgctgagcctagtcgatgttatgcagcgcgagggaggcccaagccagataggagacgccttgggtttcgccgtcagatacctgaccagcgaaatgcacggggcccgtcccggagcctccaaagctgttgtgatccttgtaacagatgtctctgttgactcagtggacgccgccgccgacgccgctaggagcaatcgcgtcaccgtgtttccaatcggcataggcgatcgctacgatgccgcccagctgcgcattctggccgggcctgccggcgattccaacgtggttaagctgcaacggattgaggacctgcccaccatggtgaccctggggaattcattcctgcacaagctgtgcagtggttttgttaggatttgcatggacgaggacggcaacgagaaacggcccggggacgtctggaccctgcctgaccagtgccataccgttacctgccagcctgatggacagaccctgttgaagagtcatcgcgttaattgcgatagaggactgcgacctagctgccctaattcacagagccctgttaaggtggaagagacttgcgggtgcaggtggacttgcccctgtgtttgcacaggctccagcacacgccacattgtaactttcgatggtcagaattttaaactaaccggaagctgtagctacgtactgtttcagaataaggagcaggatctggaggtgatactgcataacggggcttgctcccctggagcacgccaaggatgtatgaaaagcattgaggtgaaacatagcgctctgagcgtggagttacattctgacatggaggtgaccgtcaacggaaggttggttagcgtgccctatgtgggcggcaatatggaagttaatgtttacggcgccattatgcacgaggtcagattcaatcacctggggcacatatttactttcactcctcagaacaacgaattccagctccagctatcccctaagaccttcgcctccaagacctacggcctgtgtgggatatgcgatgagaatggagccaatgacttcatgctgcgggatgggacagtgactaccgactggaaaacactcgtccaagagtggaccgtgcagcgacctggacagacctgccagcctatactagaggaacagtgcctagtccccgattcatctcactgtcaggtcctactcctccctctgttcgccgaatgccataaagttctcgcacccgcaacattttatgccatttgtcagcaagacagctgtcaccaggagcaggtctgcgaagtcatcgcctcttatgctcacctgtgtagaactaatggtgtttgtgtcgactggaggacacccgatttttgtgccatgagttgccccccaagcctggtttacaaccactgcgagcacggttgtccccgtcactgtgacggcaatgtatcttcctgcggcgaccatccatctgaaggatgcttttgccccccagacaaagtcatgctagaaggtagttgcgtacctgaggaggcttgcactcagtgtataggcgaggacggcgtccagcaccagttcctggaggcatgggtgcccgaccaccagccatgtcagatctgtacctgcctctccggaaggaaggtgaactgcactacccagccatgtccaactgcaaaagcccccacttgtgggctttgcgaggtcgctcgactgaggcaaaacgccgaccaatgctgccccgagtatgagtgtgtgtgcgacccagtctcctgtgatcttcctcccgtaccacactgcgagcgaggtctacaaccaacactcaccaatcctggggagtgccgccccaacttcacctgtgcttgcagaaaggaggaatgtaagagggtgagtccaccttcctgtccaccacacaggctgccaaccctgcggaagacacagtgttgcgacgagtacgagtgcgcctgcaactgtgttaattctaccgttagctgtccactagggtacctcgcttccaccgccactaacgattgcggctgcactactaccacatgcctccccgataaagtgtgcgtgcacaggagcactatctacccagtcggccaattctgggaggagggctgtgacgtgtgcacatgtaccgacatggaggatgccgtgatgggtctccgtgtcgcacaatgttcccagaagccttgtgaagactcttgccgcagcggcttcacctatgtgctacacgagggcgagtgttgtggccgttgtttgcccagcgcctgcgaggttgtgaccggcagtccacggggggattcacagagcagctggaaatcagttggctctcagtgggctagtcccgaaaacccctgtctgatcaacgagtgtgttcgggtgaaagaggaagtgtttattcagcagcggaacgtgtcctgcccacagctggaagttccagtgtgcccctcagggtttcaactgtcctgtaaaacctccgcatgctgtccatcctgccgctgcgagcgtatggaggcttgcatgctgaacggtactgtcattggccccgggaaaacagtgatgatcgacgtgtgcaccacctgcaggtgtatggttcaggtgggagtcatatccggattcaagctagagtgccggaaaactacctgtaacccttgtcctctcggttataaggaggagaacaatactggcgaatgttgtggccgttgtctccctacagcctgcacaatacagttaaggggcggccagataatgacactcaagcgcgacgaaacactgcaagatggctgcgatacccacttctgcaaagtgaatgagagaggggagtatttttgggaaaaaagagttactgggtgcccacctttcgacgaacataagtgcttagctgagggcggcaagatcatgaaaatccccggcacctgctgtgatacatgcgaggagcctgagtgcaatgatatcacagcacgactgcaatacgtgaaggtggggagttgtaagagcgaggtggaagtggacattcattattgccaggggaagtgcgctagtaaggccatgtactccatcgatatcaacgatgtgcaggaccagtgcagctgctgttcccctacacgtaccgaacctatgcaggtcgctctgcactgcaccaacggctcagtcgtttaccatgaagtcctgaacgccatggaatgcaagtgctctccccgaaagtgcagtaag

SEQ ID NO: 12514 - DNA, 8439 bp, Artificial Sequence
  derived and/or modified sequence
atgataccagccaggtttgctggcgttttattggcactggccctgatactccctggaaccctctgtgcagaaggaacgcgcgggaggagctcgaccgcgaggtgttccctattcggatccgatttcgtcaatacctttgacggcagtatgtactccttcgccgggtactgctcttacctcctcgctgggggttgtcagaaaagaagtttcagcatcattggcgactttcaaaatggcaaacgagtcagtctcagcgtctatctgggagagttcttcgacatacacctctttgtcaatggtacagttacacagggtgaccaacgagtgagcatgccatatgctagtaaaggtctatacctggaaaccgaggccggttactacaaactgagcggcgaagcttacgggttcgtggcccgtattgatgggagtggaaattttcaggtactgctgagtgaccgctatttcaataaaacttgtgggctctgtggcaactttaatatttttgccgaagacgacttcatgactcaggaaggcactctgacctcagacccatatgactttgccaattcttgggcccttagttctggcgaacagtggtgcgaacgggcaagccccccgagcagcagttgtaacatatcttcaggagagatgcagaaaggtctctgggagcagtgtcaattgttaaagtccacaagcgtgtttgccaggtgccatccactggtagatccagagcctttcgttgccctttgcgagaaaacgctgtgtgagtgcgccgggggcttggagtgtgcttgcccggcccttctcgaatacgctcgaacctgtgcacaggagggcatggtgctctacggctggaccgaccatagtgcctgtagccctgtgtgtcctgccggcatggagtacaggcagtgtgtgagtccatgcgcaaggacttgtcaatccctgcacataaatgagatgtgtcaggagaggtgcgtggacgggtgctcatgcccggaaggccagttactcgatgagggactgtgtgtggagtccactgaatgcccttgtgtgcattcaggcaagcgctatcctccaggcacatcgctttcgcgggattgtaatacttgcatctgtcgaaactctcagtggatttgctctaacgaggaatgtcctggggaatgccttgtgacaggccagagccattttaaaagttttgacaacaggtacttcaccttctctggcatttgccagtacctgctggctagggattgccaagaccattccttctcaatcgtgatcgagactgttcagtgcgcagatgatcgggatgctgtgtgcacgcgatctgtcacagtcagactacccgggctccataatagtctggtgaaactgaagcatggtgccggcgtcgccatggatggtcaagatgttcagttgccactccttaagggggaccttcgtatacagcacacagtgactgcctcagttcggttaagttatggcgaagacctgcagatggattgggatgggaggggtcggcttcttgttaagttgtctcccgtgtatgcaggcaaaacctgtggcctatgtggcaattataacggaaaccagggcgatgatttcctcactccctccggtctcgcagagccccgcgtcgaggactttggaaacgcttggaagctccatggcgattgccaggaccttcagaaacaacactctgatccctgtgctctgaaccccaggatgacacggttttccgaagaggcatgtgccgtcttgacatctcccacattcgaggcttgccacagggcggtatcacccctgccctacttgcggaactgccgatatgacgtttgttcttgctctgacggaagagaatgtctgtgcggcgctctggcaagttatgccgccgcttgtgcgggtaggggcgtgcgcgtagcttggagggagccaggtaggtgtgagctgaattgtccaaaaggtcaagtctatctccaatgcggcacgccctgcaatctgacgtgtaggtcactgtcgtatcccgacgaagaatgcaatgaggcttgtcttgaaggttgtttttgcccaccgggactgtacatggacgagcggggagattgcgtgcccaaagcccagtgcccatgctattatgacggggagatctttcagccagaggacatattctccgaccatcacaccatgtgttattgtgaagatggatttatgcactgtaccatgtccggagtgcccggatcattgctgcctgacgcagtgttatctagccctctcagtcaccgatccaagcgctcactttcatgtcggcccccaatggtgaaattggtttgcccggctgataacttgcgcgccgagggtctggaatgcactaaaacttgtcagaactacgaccttgaatgcatgagcatgggatgcgtgtcagggtgtctatgccccccgggcatggtcaggcacgaaaaccgttgtgtcgccctggaaaggtgcccttgcttccaccagggaaaggagtacgcaccaggggaaacagttaaaatcggctgcaatacatgcgtgtgccaggacagaaagtggaattgtacagatcacgtgtgcgatgcgacctgctccactatcggaatggctcattatctgactttcgatgggctcaagtatctgttccccggagaatgtcagtatgtgttggtacaggattactgcgggtctaatcctggtacatttcgcatactcgtgggcaacaagggatgctcgcacccttctgtcaagtgcaagaagcgcgtgacaattcttgtggagggcggagaaattgaactcttcgacggcgaagtcaatgtcaaacgcccaatgaaggatgagactcattttgaggtggtggaatcaggaagatatatcattctgctgctaggtaaggcgctgagcgtggtgtgggataggcacctcagcatcagcgtggtactcaaacagacatatcaggagaaggtctgcgggctctgtggaaattttgatgggattcagaataatgacttgacgagtagtaatctacaggtcgaagaagatcccgtcgatttcggcaattcctggaaggtctcgagccagtgcgccgacacccgcaaagtacccctggattcatctccagctacctgtcacaacaatattatgaagcagacaatggttgactcttcttgtaggattctgacatccgatgtcttccaggattgcaataagctggtggatcccgagccttacctcgacgtgtgcatttacgacacatgttcatgtgagtctataggggactgcgcttgtttctgtgataccattgcagcatacgcccacgtatgcgctcagcatggcaaagttgtaacatggaggactgcaaccctgtgtccccagtcatgtgaggagcgaaatctcagagagaatggctatgagtgtgagtggagatacaacagttgtgctccagcctgccaggtcacctgtcagcatccagaacccctggcttgccctgtacaatgcgttgaggggtgccatgcccactgtccgccaggtaaaatcctcgacgagctattacagacatgcgtagaccccgaggattgtcccgtttgcgaggtcgccggaaggaggttcgcctcagggaaaaaagtcaccttgaacccctccgatcccgaacactgtcaaatctgccactgtgatgtggtcaacctgacatgcgaagcttgtcaggagcctgggggactggtggtgccccctacagatgccccagtctctccaacaacactttacgtggaagacatatccgaaccccccctgcatgacttttactgttctcggctcctggacttggtgttcctcctggatggctcatccaggttgtccgaagctgaattcgaagtcctgaaggcatttgtggtggatatgatggagcggctgcgaatttcgcagaagtgggtcagggtggcggtggtggaatatcacgacggcagtcacgcgtatataggcctcaaagaccgcaagcgacctagcgaattgagacgaatagcctcgcaagtgaaatatgccgggtctcaagtggctagcactagcgaggttctgaaatataccttgttccaaatcttcagtaagattgatcgacctgaggctagccgtattacgctgctgctgatggcctctcaggaacctcagcggatgtctaggaatttcgtcaggtatgtgcagggcctaaagaaaaagaaagtgatcgttatccctgtaggtattgggccacacgccaacctgaagcagattcggttgatagaaaagcaggcgccagaaaacaaggccttcgtgctgtcctccgtcgacgagttggagcaacagcgagacgagatcgtctcctatctatgcgacttggcacccgaagctccacctcccactctgccgccagatatggcccaggttaccgtcggacctgggctcctaggggtgtctacactggggcccaagcgaaacagtatggtgctagatgtggcattcgtgctggaaggctctgataagatcggagaagctgatttcaataggtctaaagagttcatggaggaggtgatccaaagaatggatgtgggacaggactccatccacgttactgtgcttcagtactcatacatggtcactgtggagtacccatttagtgaggcgcagtcaaagggtgatatactgcagcgggtgcgagaaatcagataccagggaggaaaccgcaccaacactgggctggccctgagatacttgtccgaccactcatttctcgtgagtcagggggaccgcgaacaagcaccaaacctggtttatatggtgaccgggaatcctgcttccgacgaaataaagagattgcctggagatatccaagtggtcccgattggcgtaggccccaatgccaacgtgcaggaattggagcgtattggctggccaaatgcccccattctaattcaggactttgagacactgccccgtgaagcccccgatctggtactgcagaggtgttgctccggtgagggtctgcagatacccacacttagcccagcaccggactgctctcaacctctcgacgtgatacttctgctagacggatcctcctcatttcccgcctcctatttcgatgagatgaaaagttttgctaaggcattcatttctaaggccaacatcggtcccagactaacccaggtgtccgttctgcaatacgggtccattacaacaatcgatgtaccgtggaatgtagtgcccgaaaaagcccaccttctctcgctggtcgatgtcatgcagagggagggagggcctagtcagatcggcgacgctctcggatttgcagtccggtatttgacttcagagatgcatggagctaggcccggcgcttcaaaggccgttgtgatactggtgacagacgtgtcagtggattccgtggacgctgcagctgatgctgccagaagtaatcgagtaacagtgtttcctatagggatcggagatcgatatgatgccgcccagctgcgcatcctggcaggtccagccggggactcaaatgtcgtcaagcttcaacggattgaagacctacccacgatggtaaccttggggaattcatttctccacaaactctgcagtggtttcgtgcgcatctgtatggacgaagatggcaacgaaaagagacccggcgatgtgtggacgttgcctgatcagtgccatactgtaacatgtcagcctgacggccagacactcctaaaaagtcaccgtgtaaattgtgaccggggccttcggccttcctgtcctaacagccaatctcccgtgaaggtggaggagacttgtgggtgcaggtggacttgtccctgcgtgtgcactggatctagcaccagacacatcgtgaccttcgatgggcaaaatttcaagcttaccggcagctgtagctacgtcctgtttcagaataaggagcaggatctggaggtgatactccataacggcgcctgcagcccaggtgcaaggcagggttgcatgaagtcgatcgaggtgaagcacagcgcacttagcgtcgaattacacagcgatatggaagtgaccgttaacgggaggctggtgagcgtgccctatgtcggagggaatatggaggtgaatgtgtatggcgcaattatgcatgaggtacgttttaaccacctgggccacattttcaccttcactccgcagaacaatgaattccagttgcaactttcccctaaaacttttgcctctaagacttatggactgtgtgggatttgtgacgagaacggggcgaatgatttcatgttgcgcgacggcacagtgaccactgactggaagacactcgtgcaggagtggacagtccaacggccgggtcagacttgtcagcctatcctcgaggaacaatgtttggtccccgattcgtcccactgccaagtgctgctactgcccttgttcgctgagtgtcataaagtcctggctccagctaccttctatgccatctgtcagcaggacagttgccaccaagaacaggtgtgcgaggtcatcgcctcctacgcccatctctgccgtaccaatggggtatgtgtggattggcgaactccagacttctgcgctatgagttgcccgccaagtcttgtctataatcactgcgagcatggttgcccacggcactgtgatgggaacgtttcctcatgcggcgatcacccaagtgagggttgtttctgtccccctgataaggtaatgctggagggctcttgcgttccggaggaggcctgcacacagtgcatcggggaagacggagtgcagcaccagttcttggaggcctgggtgccagatcaccagccatgtcaaatctgcacttgtctgtccggtaggaaggtgaactgcacgacgcagccttgtcccactgccaaggctcctacttgcggcttgtgtgaggtggcacggctacgtcagaacgccgatcagtgttgccccgagtatgagtgtgtgtgtgatcctgtgtcatgcgatcttcctcctgttcctcactgcgagcgcggtctgcagcctactctcacgaaccccggcgaatgccgtccaaattttacctgcgcgtgtcggaaggaggaatgcaagcgagtctccccaccaagctgtccgcctcatagattgcccactctgaggaagacccaatgctgtgatgagtacgagtgcgcttgtaactgcgttaacagtaccgtgtcctgtcccctggggtatttggcctcaaccgctacaaacgactgtggctgcaccaccacaacctgcctacctgacaaggtgtgcgtgcatcggtctacaatctaccctgtcggtcagttctgggaagagggatgcgatgtttgcacttgcacagacatggaagatgcagtgatgggcctcagagtggcccagtgctcacagaaaccatgtgaagacagctgccgcagcggcttcacgtacgtgctgcacgagggagaatgttgcggacgttgcctgccatccgcctgtgaagtggtgaccgggtctcctcgcggtgactcacagagttcatggaagagtgtcgggtctcaatgggcctctcccgagaatccttgtctgattaatgagtgtgtcagagtaaaagaggaggtgtttatacaacagaggaacgtgagctgcccgcagctggaggtgccagtctgtccctctggatttcagctgtcatgtaaaacgtccgcctgttgcccatcttgccggtgtgagcgcatggaagcttgtatgcttaatggaacagtcatcggcccggggaaaactgtgatgatcgatgtctgtacgacctgcaggtgtatggtccaagtgggagtcatttccggattcaagctcgaatgccggaaaaccacctgcaatccatgtccactgggctacaaggaagaaaataacaccggtgagtgctgcggacgttgcctgcctacggcatgtacgatccaactgaggggaggtcagatcatgacgttgaagagggatgagaccctgcaggacggttgcgatacgcatttctgcaaggtgaacgagaggggggaatatttctgggagaagcgggttaccggctgcccccccttcgatgagcacaagtgcctggcagagggaggcaagatcatgaaaatccctggcacatgttgtgatacctgtgaagagccagagtgtaacgatatcacagctaggctgcagtacgttaaggtgggctcctgtaagtcggaggtggaagtagatattcattattgtcagggaaagtgcgcaagtaaagctatgtacagcatcgatatcaatgatgtgcaagaccaatgttcatgttgtagtccaaccagaactgaacccatgcaggttgccctgcattgcaccaacggcagtgttgtttaccatgaagtgctcaatgctatggaatgcaaatgttctcccagaaaatgctcaaag

SEQ ID NO: 12515 - DNA, 8439 bp, Artificial Sequence
  derived and/or modified sequence
atgatcccggcgcggtttgctggcgtgctgctggcgcttgctctcatcctgccgggtactctctgcgctgaggggactcggggacgctcgagtaccgcccgctgttccctgttcggatcggacttcgtgaacaccttcgacggatcgatgtactcgttcgccggctactgctcatacctgctcgcaggaggatgccaaaagaggtccttttcgattatcggagacttccaaaacggaaagcgggtgagcctgtcagtctacctcggagaattcttcgacatccacctgttcgtgaatggaactgtcacccaaggcgaccagagagtgtccatgccatatgcctccaaaggactgtatctggaaaccgaagcgggctactacaaattgtccggggaagcgtacgggtttgtcgcccggatcgacggatcagggaatttccaagtgctcctgtcggacagatacttcaacaagacctgcggactgtgcggcaatttcaacatcttcgctgaagatgatttcatgacccaggaaggtacgctgacctcagatccgtacgacttcgctaattcttgggctctctcctcgggggagcagtggtgtgagcgagcgtcgccacctagctccagctgcaacatttcctccggcgagatgcagaagggcctctgggagcagtgtcaattgctgaagagcacgtccgtctttgcccggtgtcacccactggtcgacccagaaccattcgtggctctgtgcgagaaaacgctgtgcgaatgcgcaggcggtctggagtgtgcgtgcccggcgctgctggaatacgcgcgcacctgcgcacaggaaggaatggtgctgtacggctggaccgaccattcggcctgctcgccagtttgtccagccggcatggaatacaggcagtgcgtgtccccttgcgcacggacctgtcaatcgctccacatcaacgaaatgtgccaggaaagatgcgtcgacggctgttcctgcccggaaggacagctgctcgacgaagggctctgcgtcgaatccaccgagtgtccgtgcgtgcactccggtaaacgttaccctccgggcacctcactgtcacgcgactgcaacacttgcatctgcagaaattcccagtggatctgctccaacgaggaatgcccaggagagtgtctggtcactggccagtcacacttcaagtcatttgataatcggtatttcacgttcagcggcatctgtcaataccttctcgcaagggactgccaggaccactccttctcgatcgtgatagagacggtgcagtgcgcggatgatagagatgccgtctgtactcgctcagtgaccgtcaggctgccgggactccacaactcactggtcaagctcaaacatggggcaggcgtggcgatggacggtcaggatgtgcaactgccactgttgaaaggcgatttgcgcatccaacacactgtcactgcatcggtgagattgtcctacggagaggatctgcagatggactgggacgggagaggtagactgctggtgaagctgtcgccggtgtacgcgggcaaaacttgcggcctgtgtggcaactacaacggaaatcagggcgatgatttcctcaccccttcaggactggcggagcctagggtggaggattttgggaatgcctggaagctccatggagattgccaggatttgcagaagcaacattcggacccttgtgccctgaatccacgcatgactcggtttagcgaggaagcctgcgctgtgctcacctcgcctaccttcgaagcctgtcatcgagccgtgtcgcccctgccttacctccgcaattgcaggtacgatgtgtgcagctgtagcgacggacgcgagtgcttgtgcggcgccctggcatcgtacgcggccgcttgcgccggacgaggtgtcagagtcgcctggcgcgaaccagggcgctgcgagctcaactgcccgaaaggccaagtctaccttcaatgtggaaccccctgcaatctgacctgcagatccctgtcctacccggacgaagaatgcaatgaggcctgcctggagggatgcttttgtcctcccggactgtacatggacgaaagaggagactgcgtgccgaaggcccaatgcccctgctactacgatggagaaatcttccagccagaggatatcttttccgaccaccacaccatgtgctattgcgaggatggcttcatgcattgcactatgtccggagtgcctgggtcgttgctgccggatgctgtgctgagctctccactctcccaccgctcgaagagatccctgtcatgccgcccaccgatggtaaagctggtatgcccggcggacaacctgagagcagaaggactggagtgcactaagacgtgtcagaattacgatctggaatgcatgtctatgggttgcgtgtcgggatgcctctgcccgcctggaatggtgaggcatgaaaatagatgcgtcgcattggagcggtgcccgtgcttccatcaaggtaaagagtacgctccaggtgagacggtgaagatcggatgtaacacttgcgtgtgccaggataggaagtggaactgcaccgaccatgtgtgtgacgccacctgctcgactatcggaatggcacactacctgacctttgacggcctgaagtacctcttcccgggtgagtgccaatacgtgcttgtccaagattactgcggttccaatccaggaactttcagaatcctggtggggaataagggatgctcccatccttcggttaaatgtaagaagcgggtcaccatcctggtcgaaggcggagaaatcgaactgtttgacggtgaggtcaatgtgaaaagacctatgaaggacgaaacccactttgaagtggtggagtcgggacggtacatcatcctgctcctgggcaaggcgctcagcgtcgtgtgggaccgacacctgagcatctccgtcgtcctgaagcagacctatcaagaaaaggtgtgcggactgtgtggtaactttgatgggatccaaaacaacgatctgaccagctccaacttgcaggtggaggaggacccggtcgacttcggaaatagctggaaggtgtcctctcaatgcgctgatacccggaaagtcccgcttgactcgtcaccggccacctgccacaacaatatcatgaagcagaccatggtcgactcctcatgccggatcctgacttcggatgtctttcaggactgtaataagttggtggacccggaaccatacctggacgtgtgcatctacgacacttgctcgtgtgaatccatcggagactgcgcctgcttctgtgataccatcgcagcatacgctcatgtgtgtgcccaacatggaaaggtcgtgacctggaggactgccactctgtgccctcagtcctgcgaggagcggaacctccgggagaacggatacgagtgcgagtggcggtacaattcgtgtgcaccggcctgccaggtcacctgtcaacatccggagcctctggcctgccctgtgcagtgcgtggagggttgccatgcccattgcccaccaggaaaaatcctcgacgaactgctgcagacttgtgtggacccggaggattgtccggtctgtgaagtggccggacgccggttcgcgagcggaaaaaaggtcactctgaatccgtccgacccggaacattgccagatctgccactgcgatgtcgtcaatcttacttgcgaagcctgccaagagcccgggggactggtggtgccgccgaccgatgcgccggtgtcgccaacgaccctctacgtggaggacatatcagaaccgccattgcacgatttctattgcagcagactcctcgaccttgtgttcctgctcgacggaagctcgcggctctcagaagcggaattcgaagtgctgaaagccttcgtcgtggacatgatggaacgactgagaattagccaaaagtgggtccgggtggcagtggtggagtaccatgatggctcgcacgcgtacattggactcaaagaccgaaaacggccgtccgaactccggcgcattgcttcacaagtgaagtacgcgggttcacaggtcgctagcaccagcgaggtgctgaaatacactctgttccaaatcttctccaaaatcgatcgccctgaggccagccggatcaccttgcttctcatggcctcgcaggagccccagcggatgtccaggaacttcgtgagatacgtccagggcttgaaaaagaagaaggtgatcgtcatcccagtgggaatcggcccgcacgccaacctcaagcaaatccgccttatagaaaagcaagcaccggaaaacaaggcctttgtgctgtcaagcgtggacgaactggagcagcagcgggatgaaatcgtaagctacctgtgcgacctcgcacctgaagcccctccgccaactcttccgccggacatggcccaagtcaccgtgggaccgggcctcctgggagtgtccaccctgggaccaaagcgcaactccatggtcctggatgtggcgttcgtgcttgaaggatctgacaagatcggcgaggcagactttaacagatccaaggaattcatggaggaggtgatccagcgcatggacgtgggccaggattcaattcacgtcacggtccttcaatattcttacatggtgactgtcgaatatccgttttcggaggcgcaaagcaagggagacatccttcaacgtgtgcgcgagatcagataccaaggtggcaatcggactaacaccgggctggcgttgaggtacctgtcagaccactcgtttctggtgtcgcagggggacagagaacaagctcctaacctggtgtacatggtcactggaaacccagcatccgacgagatcaagcgactgccaggagacatccaggttgtgccaatcggggtcggtccaaacgctaacgtgcaggaactcgaaagaatcgggtggccgaacgcgcccatcctcatccaggactttgagacgctccccagagaagcaccggacctggtgctgcaacgctgctgcagcggggaaggacttcagatccctaccctctcaccggctcctgattgctcacagccactggatgtcatcctgctcttggacggatcgtcatcctttcccgcttcgtattttgatgagatgaagtcattcgccaaagcgttcatctctaaggccaacattgggcccagactcacccaagtctccgtgcttcagtacggatcgatcacgaccatcgatgttccttggaatgtggtgcctgaaaaggctcacctgcttagccttgtggatgttatgcaacgggaaggtggccctagccagatcggagacgctctgggatttgcggtgcggtacctgacctccgagatgcacggagcccggccaggagcttcaaaggctgttgttatcctcgtcactgacgtgagcgtggactccgtggatgccgcggctgacgctgcacgctcaaaccgggtgacggtattcccaatcggcatcggggaccgctacgatgccgcccaactgagaatcttggccggacccgccggcgactccaacgtggtgaagctccagaggattgaggacctgccgaccatggtgaccctcggcaactcgttcctccataagctgtgctccggattcgtgagaatctgcatggacgaggatgggaacgagaaaagacccggcgacgtttggactctcccggaccagtgccataccgtgacctgtcagcctgatgggcagaccctgctgaagtcgcatagagtgaattgcgataggggcctccgaccgtcatgtccaaactcccagtccccggtgaaggtcgaggaaacttgcggatgccgctggacctgcccatgcgtgtgtaccggctcatccacccgccacatcgtcactttcgacggccagaacttcaaattgactggaagctgctcatacgtcttgttccagaacaaggaacaggacctggaggttatcctccataacggggcctgttccccaggagcgcggcagggatgtatgaagtcgatcgaagtcaaacatagcgcactgtccgtggaacttcacagcgacatggaagtgactgtgaatggtcgcctggtgagcgtgccgtacgtcggaggaaatatggaggtgaatgtgtacggagcaattatgcacgaagtccgctttaaccatctcgggcatatcttcaccttcactccgcagaacaatgagttccaactgcagctgtcgccaaagactttcgcgtcgaaaacctatgggttgtgcggaatttgcgacgagaatggggctaacgacttcatgctccgcgatggcactgtgaccactgattggaaaacgctcgtgcaagaatggaccgtgcagaggccgggccagacgtgccagccgatcctcgaagaacaatgccttgtgccggattcgtctcactgccaggtcctgctgcttccactgttcgccgaatgccacaaggtgctcgccccggccactttctatgccatctgtcagcaggactcctgtcatcaggaacaagtatgtgaggtgattgcctcgtacgcccacctctgcagaactaacggagtgtgtgtggactggagaactccggatttttgcgcgatgtcatgtccgccctcactggtgtacaatcattgcgagcacggatgcccgcgccactgcgacggaaatgtgtctagctgcggagatcacccatccgaaggttgcttctgcccgcccgacaaggtgatgctggagggaagctgtgttccggaggaggcttgcacccaatgtattggtgaggacggtgttcagcatcagttcctggaggcatgggttccggaccatcagccatgccagatttgtacctgcctctcaggacgcaaggtcaattgcactactcagccatgcccgaccgcgaaggcgcccacttgtggactctgcgaggtcgctcgcctccgccagaacgcagatcaatgttgcccagaatacgaatgcgtgtgcgacccagtctcgtgcgatctgccgccggtgccacattgcgaacggggacttcagccgaccctcaccaatccaggagagtgcaggccaaatttcacctgcgcttgccggaaggaagagtgtaagagagtgtcacccccgtcctgtccgcctcatcggctgccgacccttcggaaaacccaatgttgcgacgaatacgagtgcgcgtgcaattgcgttaactcgactgtgagctgtcccctggggtacctcgctagcacggccaccaatgactgcgggtgtaccaccaccacttgcctgccagacaaagtgtgcgtgcacaggagcaccatctacccagtcggacaattctgggaagaggggtgtgacgtatgcacctgcactgacatggaggacgccgtcatgggactgcgcgtggctcagtgttcccagaagccgtgcgaagattcctgccggtcggggttcacttatgtcctgcacgagggagagtgttgcggccgctgtctgccttcggcgtgtgaggtggtcactggctcgcctcggggcgattctcagtcatcatggaaatccgtgggatctcaatgggcctcaccagagaacccctgcctgattaacgagtgcgtccgtgtgaaggaagaagtattcatccagcaacgcaatgtttcctgcccacagttggaggttccggtgtgcccatccgggttccaattgagctgcaagacctcagcctgctgccctagctgcagatgcgagcggatggaagcgtgcatgctcaatggcactgtcattggcccaggcaaaaccgtgatgatcgacgtgtgtaccacttgccggtgtatggtgcaggtgggagtgatctcgggcttcaagctcgagtgcaggaaaaccacttgcaacccttgtcccctgggctataaagaggagaacaacaccggagaatgttgcggccggtgcctgcccaccgcttgcactatccaacttcggggaggacagatcatgactctgaaacgcgacgagactctccaggatggctgcgatactcacttctgcaaggtgaacgagcggggtgagtatttctgggaaaaaagagtgactggatgtcccccatttgacgagcataagtgcctggcagagggcggaaagatcatgaaaatcccaggcacctgctgcgatacctgcgaggaaccggaatgcaacgacatcaccgcgcggctgcagtacgttaaggtgggttcgtgcaaatcagaggtggaggtggatatccattactgtcaggggaaatgtgcgtccaaggccatgtactcgattgacattaacgacgtgcaggaccagtgcagctgttgctcacccaccagaactgagcctatgcaggtggccctgcattgcacgaacgggagcgttgtctatcatgaggtgcttaacgcgatggagtgtaaatgctcgccacgaaaatgctctaag

SEQ ID NO: 12516 - DNA, 8439 bp, Artificial Sequence
  derived and/or modified sequence
atgattccagcccggtttgcaggggtcctccttgcgttggccctgatcctgccagggaccttatgtgccgaggggacgcggggccgctcctcaacagcgcggtgcagtctctttgggtctgattttgtcaacacatttgacggctccatgtattcctttgctggatattgtagctatcttctcgcaggaggttgccagaagcgctcattcagcattattggggatttccagaacggtaagcgggtcagtctgtctgtctatttgggagagttcttcgacatacacctgttcgtgaacggaacagtgacccaaggggaccaacgagtgtctatgccttacgcctccaaaggtctttatttggaaaccgaggctggatactataagctgtccggcgaggcgtacgggttcgtggcccgtattgacggctctggcaacttccaggttctgctgtctgataggtacttcaacaagacgtgtggtttgtgcggcaattttaatatttttgccgaagacgatttcatgacacaggagggaaccttgacttccgatccttacgatttcgccaattcctgggcgctgagctctggggagcagtggtgtgagcgtgcttccccaccttcgagctcatgtaacattagctcaggcgaaatgcagaagggtctttgggaacagtgccaacttcttaaatccacaagcgtttttgcgcgttgccaccctctcgttgaccccgagcctttcgtggcgctatgcgaaaaaacactttgcgaatgtgccggggggctggagtgtgcctgccccgccctcttggagtatgcccgcacttgtgcccaagagggcatggtactgtacggatggacagatcacagcgcttgttcaccggtctgccctgcaggcatggaatatcgccaatgcgtgtccccctgcgctcgcacatgtcaaagtttacacatcaatgaaatgtgccaggagcgctgtgtggacggttgttcatgtcctgaggggcagctcttggatgaggggctgtgtgtggagtccacagaatgcccttgtgtgcatagtgggaagaggtatcctcctgggacgtctctgtccagagattgtaacacgtgtatttgcaggaactctcagtggatctgctctaacgaggagtgtcctggcgaatgcttggtgacagggcagtcccactttaaatccttcgacaaccgttacttcaccttctccggtatttgccagtacctgttggcccgcgattgtcaggatcattcttttagtatcgtgatcgagacggtgcagtgcgccgacgatcgcgatgcggtttgtacaaggtcagttacagttcgcctgcctgggctacacaacagtcttgtaaagctcaaacatggcgccggggttgctatggatggacaagacgttcagttgcccttacttaaaggagacctgaggatccaacatacagtcacagcaagtgtgcggctcagctatggtgaggatttgcagatggactgggacgggcgtgggaggctcctggttaagttgtcgcctgtgtatgctggtaagacctgtggtctttgcggcaactacaacggtaaccagggtgatgactttctgacaccaagtggcttggccgagcctcgggtcgaggatttcggaaatgcttggaaactccacggggactgccaggacctgcaaaaacagcattcagatccgtgtgcactcaatcctaggatgacaaggtttagtgaggaggcttgcgccgtgctgacttctcctacatttgaggcatgtcaccgagccgtcagtcccctgccgtatctccgaaattgcagatacgatgtatgctcctgcagcgacggacgcgaatgcctgtgtggagctcttgcatcctacgccgcggcctgtgccggacgaggagtgcgggtagcatggagagagccagggcggtgcgagctgaactgccctaaaggccaggtctacctccagtgtgggaccccatgtaacctcacctgtaggtccttgagctatcccgacgaggaatgtaacgaggcgtgtctcgaggggtgcttctgccctcccggcctatacatggacgaacggggcgattgcgtgcctaaggcgcagtgcccttgctattacgacggtgagatattccagcccgaggacatattcagcgatcaccataccatgtgctattgtgaagacggattcatgcattgcactatgtcgggggtcccgggcagcctcctgccggacgccgtcctaagctctcccctgtcccaccgctctaagcggtccctgtcatgtagacctcctatggtgaagctggtgtgccccgccgataacctcagagccgaagggttagaatgcactaagacatgtcagaactacgatctagaatgtatgagcatgggatgcgtttctggatgtctgtgtccccccggcatggtgcgtcacgaaaaccgatgcgtagctctggagaggtgtccctgcttccatcagggtaaagagtacgccccaggcgagactgtgaagataggttgtaatacctgcgtctgccaagacagaaaatggaactgcactgaccatgtctgtgacgcgacctgctctactatcggaatggctcactacctgacctttgacggccttaaatatctattcccaggagagtgccagtatgtgcttgtacaggattactgtggatctaatcctggcaccttcaggattctcgtgggcaacaaaggttgttcccacccctcagtgaagtgtaaaaagcgcgtgacaattttagtagaaggcggcgagattgaactgtttgacggcgaagtgaacgtgaagcgcccaatgaaggatgagacccacttcgaggtcgttgaatcaggtcggtatattatacttctactgggaaaagccctttcagttgtctgggatcggcacctgagtatcagtgttgtactgaaacagacttatcaagagaaggtgtgcggactgtgcggcaatttcgatggaattcaaaataacgatttgacctcttccaaccttcaggttgaagaggatcctgtggactttgggaattcatggaaggtgtcgtcgcagtgcgctgatactcgcaaggtacctttggactcgtcccctgcgacatgccataacaacattatgaaacagacaatggttgactcatcatgtcgcattcttacgagtgatgttttccaggattgcaataaacttgtggaccccgaaccctacctggatgtatgcatctacgacacctgttcctgcgagtcgattggcgattgcgcctgcttctgcgacaccattgctgcatacgcccacgtgtgcgctcagcatgggaaggtggtgacttggaggacagcaactctgtgcccccaatcttgcgaggaacgcaatctgcgcgagaatgggtacgagtgcgagtggaggtacaacagctgcgcacccgcctgtcaggtcacatgtcagcaccccgagcctctggcgtgccctgtgcagtgtgtggaaggttgtcacgcacactgtcctcccgggaagattctcgacgaactgttacaaacttgcgtggaccccgaagattgtccggtttgtgaagtggccggacgccggttcgcatccggtaaaaaagtgactctcaacccctccgaccctgagcactgccagatatgtcactgcgacgtcgtcaatctcacatgtgaggcctgccaggagcctggaggtctggtggttccaccaacagatgcaccagtgtctccaacaaccttgtacgtagaggacatctcagaaccaccactgcacgacttttattgctcccgactgctagacctggtgttccttcttgatgggtcgtcccgcctaagtgaggccgagtttgaggtgctaaaggcttttgtcgtcgatatgatggagcggctacgcattagtcagaagtgggtgagggtggccgtggtagagtaccacgacggatcccacgcgtatatcggactcaaagaccgcaagagacccagtgaactaagacggatcgcttcacaagttaagtatgccggaagtcaggtggcctctaccagcgaggtcctcaagtataccctgttccagatcttctctaaaatcgatcgcccggaagctagtcgcataaccctgttgctcatggcctcccaggagccacagcggatgtcgcgcaattttgtgaggtacgtgcagggcttgaaaaagaagaaggtaatagtcataccggtgggcatcggcccacatgcaaatctcaaacaaatcaggctcattgagaagcaggctcccgaaaacaaggctttcgttctcagtagtgtggacgagttggaacagcagcgggacgagattgtgtcttacctctgcgatttagcccccgaagcaccgccccctacactgcccccagacatggctcaggtgacggtaggtccaggacttctcggagtgagcaccctcgggccaaagcgcaatagtatggttcttgacgtggcgtttgttcttgaagggagcgacaagatcggagaggctgacttcaatcggagcaaggaattcatggaggaggtgatccagcgcatggacgtggggcaagattctatccacgtgactgtcctccaatactcttacatggtgacggtggagtatcctttctctgaagcacaatctaagggggacattctgcagagggtgagggagattcggtaccagggtgggaaccgcactaatactgggcttgccctcaggtacctgagcgatcactcttttttggtttctcaaggggacagggaacaggcgccgaacctggtctatatggtgacagggaacccagccagcgatgagatcaagcggttacccggcgatatacaggtcgtgcctatcggcgtgggaccgaatgccaacgtccaagagctggaacgtataggttggccaaacgctccgattctgattcaggacttcgagacgctgcctcgagaagcgccggatctggtactgcagcgctgttgctctggcgagggtttgcaaattcctactttaagtccagcgccagactgctctcagcctctggacgtgattcttttactggatggcagctcctcttttcccgcttcttacttcgatgaaatgaagagcttcgccaaggcttttatttcgaaagcaaacatcggcccacggctgacccaggttagtgtgctacagtacggttctatcaccacaatagacgtgccatggaatgtcgtgcccgaaaaagcgcacctgctgagcctcgtcgacgtgatgcaacgcgaaggaggaccaagccagatcggtgacgcactaggcttcgctgtacggtatctcacatcagaaatgcacggcgcaagacctggcgctagtaaggctgtggtcatcctcgtgaccgacgtctcagtggacagcgtggacgcagccgccgacgctgcgcgctctaaccgggtgacagtgttccctatcggaatcggcgacaggtatgacgccgcccaactgcgcattctggcgggacctgcaggcgattccaacgtcgttaaactgcaaaggatcgaagatctgcctaccatggtcactctgggcaattccttcttacacaagctgtgctccggcttcgtgagaatctgtatggacgaggacggaaacgaaaagcgcccaggtgatgtgtggacactccctgaccaatgccacacggtaacatgccagcccgacggacaaaccttgttaaagtcgcacagggtgaactgcgaccggggactgagacctagctgccctaacagccaatcacccgtaaaggtagaagagacctgcggctgccggtggacatgcccctgtgtgtgtactggctcctccacaagacatattgtgacttttgacggtcagaatttcaagcttaccggaagctgcagttatgtgcttttccagaataaggagcaggacctggaagtcatactgcacaacggggcttgtagtcctggagccagacaaggttgtatgaaatctatagaagttaaacactccgccctatccgtggagctgcacagcgacatggaagtgactgtcaacggtagactagtgtcagtgccctatgtgggtggcaatatggaggtgaacgtgtacggggccattatgcatgaagtgcggttcaatcaccttggacacatctttacatttacccctcagaacaacgaatttcagctgcaactctcacctaaaacatttgcaagtaagacttatggcctctgcggcatctgcgatgaaaatggagccaacgattttatgcttagggacgggaccgtgacaaccgactggaagaccctagtgcaagaatggacagtccaacggcctggacagacatgtcagcctattttggaggagcaatgcttggtccccgattcttcacattgtcaggtgctgctccttcctctctttgctgaatgccataaggtcctcgcacccgcaaccttctacgccatttgccagcaggactcctgtcaccaggaacaggtttgcgaggtcattgcttcctacgcacatttgtgtcgcactaacggtgtgtgcgtcgattggagaacgcccgacttctgtgctatgtcttgtcccccatctctggtgtataaccactgcgagcatggctgtcctagacactgtgatggcaatgtgtctagctgcggagaccatccgtccgagggctgtttctgtccacccgataaggttatgctagaaggctcttgcgtgccagaggaggcgtgcacacagtgcatcggggaagacggcgtgcagcaccaatttctcgaggcctgggtgccagaccatcagccatgccagatatgcacttgtttatctggcaggaaagtaaattgcactactcagccatgcccaacggcaaaggctcctacatgcggcctctgtgaagttgcccgactgagacagaatgcggaccaatgctgcccagaatatgaatgcgtctgtgaccctgtgagctgcgatttaccccctgtgcctcattgcgaacggggcctgcagcccacactaaccaacccaggggagtgtcgacccaattttacctgcgcctgcagaaaggaagagtgtaagagggtcagccccccctcatgtccaccccatagactgccaacattgaggaaaacccagtgctgtgatgagtatgaatgtgcctgtaactgcgtgaattcaacggtgtcttgccccctgggatatctggcaagtaccgcgacaaacgactgcggctgtacaaccactacttgtttgcccgataaggtatgtgttcacaggtcaactatatatccggtgggccagttttgggaagaaggatgcgatgtatgtacctgtaccgacatggaggatgcagttatgggacttcgggtcgcccagtgttcgcagaaaccttgcgaagatagctgccggagcggtttcacatatgtcctccatgagggcgagtgctgtggcaggtgcctgccatccgcctgtgaggtcgtcacggggagtccacgaggagatagccagtcctcttggaaaagcgtgggatcgcagtgggcgagccccgaaaacccctgtctgattaacgaatgcgtgcgtgtgaaagaggaggtgtttattcagcaacggaacgtgagttgtccccagttggaggttccagtgtgtcctagtggattccagttaagctgtaagacaagcgcttgttgccctagttgtcgttgtgagcgcatggaggcatgtatgctcaacggcacagtcattgggcccggcaagactgtgatgatcgacgtctgtacaacctgccgttgcatggtgcaggtcggcgtgattagtggcttcaagctggagtgtagaaaaaccacctgtaacccttgccccttaggctacaaggaggagaacaacacgggcgaatgttgcggccgctgtctccctaccgcatgcaccatccaactcagaggaggccagataatgacactgaagagagacgaaacactccaggatggctgtgacacgcacttctgcaaggtgaatgagcgtggggaatacttttgggagaagagggtgaccggctgtccaccctttgacgaacacaagtgtctcgcagagggtggtaaaatcatgaagattcccgggacgtgctgcgacacatgtgaagagcctgagtgtaatgacataaccgctcgcctgcagtatgtgaaagtggggtcctgcaagagtgaggtggaggttgatatacattattgtcaaggcaaatgtgcctcaaaagccatgtacagcattgacatcaatgacgtgcaagaccaatgcagctgttgcagtcctacaagaactgaacccatgcaggtggcccttcactgtacaaatggctctgttgtgtatcacgaagtgctcaatgcgatggaatgtaaatgctctccgcggaagtgtagcaag

SEQ ID NO: 12517 - DNA, 8439 bp, Artificial Sequence
  derived and/or modified sequence
atgattccagcgcgctttgcaggggttcttcttgccctggcactgatcttgccgggaactctgtgtgctgaagggaccagaggacgctcctcaactgcccggtgttccctcttcggatcggactttgtcaatacgttcgatgggtcgatgtactcctttgccggatactgtagctaccttcttgcgggaggttgtcagaaaaggtccttttcgatcattggagactttcaaaatggtaagcgggtgtcactttccgtgtatctgggcgagttttttgatatacatctgttcgtgaacggcaccgtgacgcaaggggatcaaagagtgtcgatgccctacgcatccaaaggactttacctcgaaaccgaagcgggatattacaagctgagcggggaagcatacggctttgtcgcacggatcgacggttcggggaattttcaagtgcttctgtcagaccggtactttaacaagacctgtggactgtgtggcaactttaacatatttgcagaggatgactttatgactcaagaaggcaccctcacttcggatccatacgattttgcaaattcgtgggcactctcgagcggtgagcagtggtgcgagcgggcaagcccaccttcgtcgagctgcaacatttcgagcggagaaatgcagaagggtctttgggagcagtgtcagctgctgaaatcgacctcggtgtttgcaagatgtcatccacttgtggacccagaaccattcgtggcactctgtgaaaagaccctgtgtgagtgtgcgggtggtctggaatgcgcatgtccagcactcctggagtacgcacggacttgtgctcaggaaggtatggtcctgtacggctggactgatcactccgcctgttcgccagtgtgtcctgcgggaatggagtatagacagtgtgtgtcaccatgtgcaaggacgtgtcaaagcctgcacatcaacgaaatgtgtcaagaacgttgcgttgacgggtgtagctgtccagagggccaacttcttgatgaaggactgtgtgtggaatctacggaatgcccatgtgtgcacagcggaaagcgatacccgcctggcacgtccctctcgagagattgcaacacttgcatctgtcgtaactcgcaatggatctgttcgaacgaggaatgtccaggggagtgccttgtgactggacaatctcatttcaaatcattcgacaaccgttactttaccttctccggtatctgtcagtacctcttggcaagggattgtcaggatcacagctttagcatcgtgattgaaaccgttcaatgcgcagacgatcgggatgcagtatgtaccaggtccgttaccgtcagactccctggactgcacaattcgcttgttaagttgaaacatggcgccggcgtcgcaatggatgggcaagatgtgcaactccctctgctgaagggggatctgagaatacaacatactgtcaccgcgtcggtgaggctgtcatacggtgaggatttgcaaatggattgggatggaagaggtaggttgctcgtgaagctgagcccggtctacgcaggaaaaacctgtggcctgtgcggaaactacaatgggaaccagggagatgattttcttaccccttccggactcgccgaaccgcgggtggaagattttgggaacgcttggaaacttcacggagattgccaagaccttcagaagcaacattcagatccatgtgcacttaatccaagaatgacccggttctccgaagaggcgtgtgctgtcctgacctcacctacttttgaagcatgccaccgagcagtcagccctctgccatatttgcggaactgccgatacgacgtgtgttcatgctccgatggtcgggagtgtttgtgcggtgccctcgcctcatacgctgcagcatgtgcaggacggggagtgagagtggcctggcgggaaccaggccggtgtgagctcaattgtccaaagggtcaggtctaccttcagtgcggaaccccatgtaatctcacttgcagaagtctttcctacccagacgaagagtgcaatgaagcatgccttgaaggttgtttctgtcccccaggcctttacatggacgagagaggtgattgcgtcccaaaggcccaatgtccgtgctactacgatggagagatattccaaccagaggatatcttctctgatcaccatacgatgtgctactgtgaggacgggtttatgcattgtaccatgtcaggcgttcctggatcactcctccctgatgcagtgctttcatcgccactttcacacagatccaaacgctcgcttagctgcaggcctcctatggtgaagttggtgtgtcctgccgataacctcagggcagagggtctggaatgtactaagacctgtcagaactacgacctggaatgcatgtcgatgggttgtgtgtcaggttgtttgtgtccgcctggaatggtgagacacgaaaatagatgcgtggccctggaaagatgcccttgcttccatcagggaaaagaatacgcacctggcgaaaccgtcaaaattggatgcaatacctgcgtctgtcaggatagaaagtggaattgtaccgatcatgtgtgtgatgcgacttgtagcactattggaatggcccattatcttacctttgacggacttaagtaccttttcccaggagagtgtcaatacgtgctcgtgcaggattactgcggtagcaatccggggacttttaggatacttgtgggaaataaggggtgttcccacccatctgtcaaatgtaagaaaagagttaccattctcgtcgagggtggcgaaatcgaactcttcgatggagaggtcaacgttaagcgaccaatgaaggatgaaacccatttcgaggtggtcgagagtggacggtacattatcttgttgctcggaaaggccctctccgtggtgtgggatcgccacctgtcgataagcgtggtgctgaagcagacgtaccaagaaaaagtgtgcggactctgtggaaactttgatggaattcagaataatgatctgacctcgtccaaccttcaggttgaggaggatccagtggattttggcaattcctggaaggtgtcctcgcagtgcgcagatactcgcaaggtaccacttgactcgagcccagccacttgccataacaacattatgaagcaaaccatggtggacagttcctgtagaattctgacctccgacgtctttcaagattgcaacaagctggtggaccccgaaccctacttggacgtctgcatctacgacacttgttcatgcgagtccattggcgactgtgcctgtttctgcgatacgattgcagcgtacgcacatgtctgtgcacaacacgggaaggtcgtgacttggcggactgctaccctgtgcccccaatcatgtgaggaacgaaacctgagagaaaatggttacgaatgcgaatggcggtacaattcttgtgccccggcctgtcaagtgacttgccaacatccagaacctctggcgtgtccggtgcagtgtgtggaaggttgtcatgcccattgtcctccgggaaagattttggacgaactccttcaaacttgtgtggaccccgaggattgccctgtgtgcgaggtggcaggacgccgttttgcgagcggtaaaaaggtgactctgaatccgtcggatccagagcattgtcagatctgtcactgtgatgtcgtgaacttgacctgtgaggcctgccaagaacccggcggactcgtggtgccgcctaccgacgcaccagtgtcgcctactaccctctatgtggaagatatttcagaaccaccactgcatgacttctattgctcccgcttgcttgaccttgtttttctgctggacggcagctcccggctgtcagaagccgagtttgaagtgttgaaggcatttgtggtggatatgatggagagactgagaatttcacaaaagtgggtgagagtcgcagtcgtggaataccatgacggatcgcatgcctacatcggccttaaggatagaaaacgaccctcggagcttcgtagaatcgcttcgcaagtgaagtacgcgggaagccaggtcgcctcgacttcggaagtgctcaaatacaccctctttcaaatcttttccaaaatcgaccggccagaagcatcgagaattacgctgcttttgatggccagccaagagccccagcggatgagcagaaatttcgtgagatacgtccaaggcctgaagaaaaagaaggtgattgttatcccagtggggatcggccctcatgctaacctcaagcaaattaggctgattgaaaagcaggcgcccgagaataaagcgtttgtgctttcctccgtggatgaactcgagcagcaaagagatgagatagtctcatacctttgcgatcttgccccagaagcaccaccgccaaccctgcccccagatatggcacaggtgaccgtgggccccggactcctgggtgtatcgactctggggccaaagagaaattcgatggtcctggatgttgcatttgtgcttgaaggtagcgacaagattggtgaagctgatttcaaccgtagcaaggagttcatggaggaagtgattcaacgcatggacgtcgggcaggattcgatacatgtgacggtcctgcaatactcctacatggttaccgtggagtaccctttctcagaagcgcaatcgaagggcgatatcctgcaacgtgtgcgggaaattcgctaccaggggggtaatcggactaacactggcctggcccttagatacctttccgatcattcattccttgtgtcgcagggcgaccgtgagcaggccccaaacctcgtctacatggtcactggtaaccccgctagcgacgagattaagagacttccaggtgatattcaggtcgttcctattggtgtggggcctaacgcaaatgttcaagagcttgagagaattgggtggcctaacgcaccaattctcatccaggattttgaaaccctcccacgagaggcccctgatctcgtgttgcagcgttgctgctcgggagaaggactccaaattccaaccctgtcccctgccccagattgttcccagcctttggatgtgatcttgctcctggacggttcctcatcattcccagcatcctactttgatgaaatgaagtcatttgctaaagccttcatctcaaaagcaaacataggacctcgactgacccaggtgagcgtgcttcaatatggctccattaccactatagacgtcccatggaacgtcgttcctgaaaaagcacatcttctgagcctggtggacgtgatgcaacgggaaggaggaccttcgcagatcggagatgcactgggctttgccgttcgctatctcacttccgagatgcacggggcccggccgggggcttcaaaggcagtggtgatccttgtcactgatgtcagcgtggattcagtcgacgccgcagcagatgcagcaaggtccaaccgcgtgaccgtgtttcctattggtattggagatcgctacgatgcagcacagctgcgcattctcgccggcccagcaggagactctaatgttgtgaagctccagaggattgaagatcttcctactatggtgactctcggtaattcgtttcttcataagctctgctcgggctttgtgcgcatctgcatggatgaagatggcaatgagaagcgccccggagatgtctggactctgcccgatcagtgccataccgtcacttgtcagcctgatggtcaaacccttctgaagagccacagagtcaactgtgatagagggcttaggccgtcctgcccgaactcgcaatcccctgtgaaggttgaggaaacctgtggctgtaggtggacttgcccgtgtgtctgcactgggagctcgaccaggcatatcgtcacttttgacggacagaactttaaactgactgggagctgttcctacgtactctttcagaacaaggaacaggatcttgaagtgatcctccataatggtgcctgttctcctggagcgcgccagggatgtatgaaaagtatcgaggtcaagcattctgccctttcagtggaactccactccgatatggaggtgactgtgaatggtaggcttgtctccgtgccttacgtgggagggaacatggaagtgaacgtgtatggggcgatcatgcatgaagtccgatttaaccatttgggtcacatattcactttcacccctcaaaacaatgaatttcaactccaactgtcccctaagacttttgcgtcaaaaacttacggtctgtgtggaatatgtgacgagaacggcgcaaatgactttatgttgcgtgacgggaccgtcactaccgattggaaaaccctggtgcaagaatggaccgtgcaacgtccgggccaaacttgccagcctatcctggaagagcagtgcctggtgccagatagcagccactgccaggtgttgcttctgcctctttttgcagagtgtcacaaggttcttgcaccggcgaccttctacgctatctgtcagcaggatagctgccatcaagagcaagtgtgtgaagtcattgcatcgtacgcccatttgtgtcggactaatggcgtctgtgtggactggcgaacccccgatttctgtgcaatgagctgccctccatccctggtctacaatcattgcgagcacggatgtcctagacactgcgatggaaacgtctcatcatgcggagatcatccttccgaaggttgtttttgtccccccgataaggtgatgctggaaggctcatgtgtgcccgaagaagcatgtacgcaatgtatcggagaagatggggtgcaacaccaattcttggaggcatgggtcccagatcatcagccttgtcagatatgtacgtgtctgtccggtcgtaaagtgaactgtaccacccagccctgccctactgccaaggctcctacttgcggactctgcgaagtggcaagacttcgacaaaacgcagatcaatgttgccccgaatacgaatgcgtgtgtgatcccgtgagctgcgatttgccacctgtgccacactgcgagcgaggtctgcaacctaccctgactaacccgggggagtgcagacctaactttacctgtgcatgtagaaaggaagaatgtaagagggtgtcccctccttcgtgtccccctcatcgtctgccaactctcagaaagacgcagtgttgcgatgagtacgaatgtgcatgcaactgcgtgaactccaccgtctcatgccctcttggatacctggcatcgactgcaaccaacgactgtgggtgtaccactacgacctgtctgcctgataaagtgtgtgtgcatagatccacgatttaccctgtgggacaattttgggaagagggttgcgacgtctgtacttgtactgacatggaggatgcagtgatggggctccgggtggctcaatgtagccaaaaaccatgtgaggattcgtgcaggtccggtttcacttacgtgctgcacgaaggagaatgttgcggtcggtgtctgccttcggcgtgtgaagtggtgactggttccccaagaggcgactcccagtcgtcgtggaagtcggtgggatcgcagtgggcgtcgcctgagaacccatgcctgattaacgaatgcgttcgggtgaaagaagaggtattcatccagcaacgtaacgtgtcgtgtccacagctcgaagtgccagtctgtccttcggggttccagctgtcctgcaagacgtccgcatgctgcccatcgtgcagatgcgaaaggatggaagcatgtatgcttaacgggactgtgataggacccggcaagactgtgatgattgacgtatgtactacgtgtcgctgtatggtgcaggtgggagtcattagcggatttaagctcgaatgtcggaaaaccacgtgtaacccatgtccccttgggtacaaagaagagaataacactggcgagtgttgtggccgctgcttgccgaccgcatgtacgatccagctgcgtgggggacagatcatgaccctgaagagagatgaaactctgcaagatggttgtgatacccatttttgtaaggtcaatgaaaggggagagtacttttgggaaaaaagggtgaccggctgtcctcctttcgatgaacataagtgcctggccgaggggggaaagataatgaagattcccggaacttgttgcgacacctgcgaagagcccgaatgcaacgacattaccgcccgtctgcaatacgtgaaagtaggtagctgtaagtccgaagtggaagtcgacattcactactgtcaaggaaaatgcgcatcgaaggcaatgtactcgatagatatcaacgacgtccaggaccaatgctcatgttgtagccctactagaactgaacctatgcaagtggcgctgcactgtaccaatggctcagtggtgtaccatgaggtgcttaacgccatggaatgtaaatgttcaccccggaaatgttcgaag

SEQ ID NO: 12518 - DNA, 8439 bp, Artificial Sequence
  derived and/or modified sequence
atgatcccggcccggtttgcgggcgtgctgctggctctggcgctcatcctcccggggactctgtgcgcagaaggaactagaggacgctcgtccaccgcccggtgtagcctgttcggatcagattttgtgaacactttcgatgggtcaatgtactccttcgccggatactgctcgtacctgctcgctggcggatgccaaaagaggtccttttcaatcatcggcgatttccaaaatggcaagagagtgagcctgtcggtgtacctgggcgagttcttcgacatccacctcttcgtgaacggtaccgtcactcagggggatcagcgcgtgtcgatgccctacgcttcaaaaggactctacctcgagacggaggcaggttattacaagctgtcaggagaggcctacgggtttgtggccagaattgacggctccggaaacttccaggtgctcctctctgaccgctacttcaataagacctgcggcctgtgcggaaacttcaacatctttgcagaggacgatttcatgactcaggaaggaacgctgacctcggacccgtacgacttcgcgaactcgtgggcgctgagcagcggtgagcagtggtgcgagcgggccagccctccgtcctcaagctgcaacatttcaagcggagaaatgcaaaaaggcctctgggaacaatgccagctgctgaagagcacctcagtgttcgcacggtgccatccgctcgtggatccggaaccgttcgtggccttgtgcgagaaaaccctctgcgagtgcgccggagggctggaatgcgcatgtcctgcgctgctggaatatgctcgcacctgcgcccaggagggcatggtcctgtacggctggactgaccactcagcatgttcccctgtgtgtcctgcaggtatggaatataggcagtgtgtgtcaccgtgtgctagaacctgccagtcgcttcatatcaatgaaatgtgtcaggaacggtgcgtggacggatgctcgtgcccggagggacaacttctcgatgagggactgtgcgtggaaagcaccgagtgcccttgtgttcactcgggaaaacggtaccccccggggacttcgctgtcacgggattgtaatacgtgtatctgccgcaactcgcagtggatctgtagcaatgaagaatgccctggagaatgtctggtcactggccagtcccactttaagtcatttgataatagatacttcactttctcaggcatctgccaatacctcctcgcccgcgattgtcaagatcattccttttccatcgtgatcgagacggtgcagtgtgcggacgatcgcgatgcggtgtgtactcggtcggtcactgtccgcctgccgggattgcataactcgctggtcaaactcaaacatggagccggggtcgcaatggacgggcaggacgtgcagctgccgctgttgaaaggcgacctgcggatccaacatacggtgaccgcgtcggtcaggctgtcctacggcgaagatctgcagatggactgggacgggagaggacggctgcttgtgaagctgtcccccgtgtacgcgggaaagacttgcggcctctgcggaaattacaatggaaaccagggcgatgattttctcaccccatcaggcttggccgagccacgggtggaagattttggtaatgcttggaagctgcatggagattgccaagaccttcagaagcagcattccgacccgtgcgcccttaacccgagaatgactcggttctctgaagaagcatgcgcggtgctgacctccccgaccttcgaggcttgccaccgggcagtctcaccgctgccataccttagaaactgccgatacgacgtctgttcatgctcggacggtcgtgagtgcctgtgcggcgccttggcgagctacgcggccgcatgcgccggaagaggagtgcgcgtggcctggagagaacctgggagatgcgagttgaattgtccgaaaggccaagtgtaccttcagtgtgggaccccgtgtaacttgacctgccggagcttgtcgtacccagacgaggaatgcaatgaggcctgtctggagggctgcttctgtccaccgggactgtacatggacgaacgcggggactgtgtccccaaagcacaatgcccatgctactacgacggcgagattttccaaccagaggatatcttctccgaccatcacaccatgtgctactgcgaggacgggttcatgcactgtaccatgtcgggagtcccaggctccctcctcccggacgcggtgctgtcatccccgctgtcccacagatccaagcggagcctgtcgtgtcggccaccgatggtgaagctggtatgccctgcagataatctgcgggccgaaggattggagtgcactaagacttgtcaaaactatgatctcgaatgcatgagcatgggatgtgtgtctggctgtctgtgcccaccagggatggtccgccacgagaaccgctgtgtggctctcgaacgctgcccatgctttcaccaaggaaaagaatatgcgccgggtgagactgtgaagatcggatgcaacacttgcgtctgtcaagaccgtaagtggaattgcaccgatcacgtgtgcgacgcgacttgctcaaccatcggcatggcgcactacttgaccttcgacgggctgaagtatctgtttcccggagaatgccagtacgttctggtgcaggactactgcggatcaaatccaggtacgttcagaatcctggtggggaataagggctgctcgcacccatcggtgaagtgcaagaagcgcgtgaccatcctggtggagggaggagagatcgaactgttcgacggcgaagtcaacgtgaaacggccaatgaaggacgaaacgcatttcgaagtggtggagtcgggacgttacatcatcctgctgctcggaaaggcgctgagtgttgtgtgggatagacacctgagcatctccgtcgttttgaaacagacttaccaagaaaaggtctgcggactttgcggaaatttcgatggaatccagaataacgatctgacttcctcaaatcttcaagtggaagaggacccagtcgacttcggaaactcctggaaggtgtcatcccagtgtgccgacactcgcaaggtccccctggacagctcgcccgccacctgccacaacaacatcatgaaacagaccatggtcgactcctcgtgccgcatactcactagcgacgtgtttcaggactgcaacaaactggtggacccagagccctacctggacgtgtgcatctacgatacctgtagctgcgaatcaatcggagactgcgcctgtttctgcgacactatcgctgcctacgcccacgtgtgcgcacagcatggaaaagtggtcacctggagaacggccaccctgtgtccccagtcgtgcgaagaaagaaatttgagagaaaatgggtacgaatgtgaatggagatacaattcgtgtgcaccggcttgtcaagtcacctgccaacatccagagccactggcatgtccagtgcagtgtgtggaaggatgtcatgcccactgtccccctggaaagatcctggacgaactgctgcaaacctgcgtggacccggaggactgcccagtatgtgaagtcgcgggacgcaggttcgcgtcaggaaaaaaggtgaccctcaacccctccgacccagagcactgccagatctgtcattgcgacgtggtgaatctgacctgcgaagcgtgccaggaaccaggcggcctggtggtccctcctactgatgcaccggtgtcccctaccaccctctatgtcgaggacatctccgagccgccgctgcatgatttctactgctcgcgcctgctggacctcgtctttctgctggacggatcaagccggttgagcgaagcagaattcgaggtgctgaaggcgtttgtcgtggacatgatggagcggctgcgcatcagccagaagtgggtgcgggtggccgttgtggaataccatgacggttcacacgcatacatcggactgaaagacagaaagcgcccgtccgaactccgacgcatcgccagccaggtgaaatatgcaggaagccaggtggccagcaccagcgaggtgcttaagtacaccctgttccagatcttttcgaagatcgacagaccggaggcgtctaggatcactttgctcctgatggcttcccaagagcctcaacgcatgtctcggaatttcgtgagatacgtccagggactgaagaagaaaaaagtgatcgtcatcccggtggggatcggaccacacgcgaatctcaagcagatccggctcatcgaaaagcaggctccggaaaacaaggctttcgtgctgtcgtcggtggatgagctggagcaacaacgcgacgaaatcgtgtcgtacctctgcgacctggcgccggaagcgcctccgccgactctgcccccggacatggcacaagtcactgtgggacccggcctgctgggagtgtccaccctgggtccgaagcggaattccatggtgctcgatgttgccttcgtgctggagggttctgacaagattggtgaggcagacttcaatcgctcgaaggaattcatggaggaagttatccagcgaatggatgtgggccaagacagcatccacgtcactgtgttgcagtactcctatatggtgaccgtggaatatccattttcggaagcccagtccaagggtgacatcctgcagcgcgtccgcgaaattcggtaccagggcgggaatcgcacgaataccggactggccctgcgctacctttccgaccactccttcctcgtgtcccaaggggaccgggaacaggctcccaacctggtttacatggtcactgggaatccagcctcagacgagatcaaacggcttccgggagatatccaggtcgtgccgatcggagtggggcctaacgcaaacgtccaagaacttgaacgcatcgggtggcctaacgcgcctatcctgatccaggatttcgaaaccctgccgagagaagccccggatctggtgctccagcgctgttgcagcggggaaggtctgcagatcccgactctgagcccggccccggactgcagtcagccgctggacgtgattttgctgctcgacggttcttcgtcattcccggcttcctacttcgatgagatgaaatcctttgccaaggccttcatttcgaaggcgaatatcgggccccggctcacccaagtgtccgtgctgcaatacggatccatcaccactatcgacgtcccctggaatgtcgtgcctgaaaaggctcacctgctgtcactggtggacgtgatgcagcgcgaggggggaccgtcccagatcggagacgctctgggattcgcagtcagatatttgacttccgagatgcacggggcaagaccgggagcatcaaaggccgtggtgatcctcgtgaccgacgtgagcgtcgactcagtcgatgctgcggccgacgctgctcgatccaatcgcgtgacggtgttcccgattgggatcggtgatcggtacgacgcggcccagctgcgaatcctcgccggaccggccggagactctaacgtggtcaaactgcagcgcatcgaggacctgccgactatggtgactctcggtaattccttcctccacaagctgtgttctggattcgtgcgcatctgcatggatgaggacggaaacgaaaagcgtccgggagacgtgtggactctgcctgaccaatgtcatactgtaacctgtcagccagatggacagactctgttgaaaagccaccgggtgaattgcgatagaggactgcggccatcgtgtccaaattcccagtcgcctgtgaaggtcgaggaaacctgcggatgtcgctggacctgcccgtgtgtgtgcactggatcgagcacccggcacattgtgacctttgatggacaaaactttaagctgactggcagctgctcatacgtgttgttccagaataaggaacaggatctcgaggtgattctgcataacggcgcctgtagccctggcgctcgccagggttgcatgaaatcaattgaagtcaagcactccgcgctctccgtcgagctccactccgacatggaggtcactgtgaatggaaggctcgtgtccgtcccctacgtgggaggaaatatggaggtgaacgtgtacggagcgatcatgcatgaagtgcgcttcaatcacctgggccacatcttcacttttacgccccagaacaacgaatttcagctgcagctcagccctaaaaccttcgcatccaagacttacggtctgtgtggcatctgcgatgagaacggagctaacgacttcatgctgcgcgacggaactgtgaccaccgattggaaaaccttggttcaggaatggaccgtgcagcgcccgggtcaaacttgccaaccaatcctggaagaacagtgtctggttccggacagctcccattgccaggtgctgctgctcccactgttcgctgaatgccataaggtgctggcaccggcaactttctacgccatttgtcagcaagactcgtgccaccaagaacaagtgtgcgaggtgatcgcatcctacgcccatttgtgcagaaccaatggagtgtgcgtggattggcgcaccccggatttctgtgccatgagctgcccaccatcacttgtgtacaaccattgcgaacatggatgcccgcggcactgcgacggcaatgtgtcctcctgcggcgatcatccctcagaaggatgcttctgcccgccggataaagtgatgctggaaggctcctgcgtgccagaagaagcgtgcactcagtgcatcggagaggatggagtgcagcaccagttccttgaggcctgggtgcctgatcatcagccgtgccagatctgcacctgcctgtcgggaagaaaggtgaactgcactacccagccatgtcccacggccaaggctccgacctgtggactgtgcgaagtggcgcgattgcgccaaaacgccgaccagtgctgtccagaatatgagtgcgtctgcgacccggtgtcctgcgatcttcctcctgtcccccactgcgagcgggggctgcagccaactctcaccaacccgggagagtgccgtccgaactttacctgcgcatgcaggaaagaggaatgcaaacgggtgtcgccaccttcctgcccaccacaccgcctgccgacccttcggaaaactcaatgttgtgatgagtatgaatgcgcgtgcaactgcgtgaattcgaccgtgtcatgtccgcttggatatctggcttcgaccgcgaccaatgactgtggctgtactactaccacttgtctgccggacaaggtgtgtgtgcataggtcgactatctacccggtgggacagttttgggaggaggggtgcgacgtgtgtacctgcaccgatatggaagatgccgtcatggggctgcgtgtggcgcagtgttcgcaaaagccgtgtgaagattcgtgtaggtcgggcttcacgtacgtcctccacgaaggagaatgctgcggacgctgcttgccgtcagcgtgcgaggtcgttaccgggagcccacgcggtgattcacaaagctcctggaagtcggtgggttcgcagtgggccagcccggaaaacccgtgcttgatcaacgagtgcgtcagagtcaaggaagaggtattcatccagcagcggaacgtctcctgcccgcagctggaagtccccgtttgcccctcgggattccagctgtcgtgcaagactagcgcttgctgcccttcctgcaggtgcgaacggatggaagcctgcatgctgaatggaactgtgataggaccgggaaaaaccgtgatgatcgacgtctgcactacttgcagatgcatggtccaggtcggggtgatctcagggttcaagctcgaatgcaggaaaaccacgtgcaatccgtgtccgctgggctataaggaagaaaacaacaccggagagtgctgcggaagatgcctgcctactgcttgcaccatccagcttcggggaggacagattatgaccctgaaacgggatgaaaccttgcaggacggatgcgatacccatttctgcaaggtgaacgagagaggggaatacttttgggaaaagcgcgtgactggttgtccaccattcgatgagcacaagtgcctcgcggagggtggaaagatcatgaagatccccggcacgtgttgcgacacttgtgaagagccagaatgcaatgatatcaccgcacgcctccagtacgtcaaggtggggtcttgcaagtccgaggtcgaagtggacatccactactgtcagggaaaatgcgccagcaaggccatgtactcgatcgacatcaacgacgtgcaagaccaatgctcctgctgttcccctacccgcactgagccgatgcaggtggcactccattgcaccaacggcagcgtcgtgtaccacgaagtgctgaatgcgatggagtgcaaatgcagcccaagaaagtgcagcaaa

SEQ ID NO: 12519 - DNA, 8439 bp, Artificial Sequence
  derived and/or modified sequence
atgattcctgcacgcttcgctggcgttctactagctttggcgctgattctgccaggcaccctctgcgccgagggcacccgtggcaggtcctccacagcccggtgctcattatttggctccgacttcgttaacacgtttgacggtagtatgtattccttcgctgggtattgctcatatctactagcaggaggctgccagaaaaggagcttcagcattattggagattttcagaatggcaaacgggtgagcctgtctgtctatctgggagagttcttcgatattcacctgttcgtgaatgggacggtaactcagggggaccagcgtgtctccatgccctatgcctccaaagggttgtacctggagaccgaggccggctactacaagctaagcggcgaggcctatgggttcgttgcaaggattgacggcagcgggaatttccaggtgctcttgtctgacagatatttcaacaagacctgcggcctctgcggaaatttcaacatttttgcggaagacgactttatgactcaagaaggaactctcacttcagatccatatgatttcgcgaattcttgggcactctcttctggagaacagtggtgcgagcgcgctagtcccccctcctctagttgcaacatctcttccggcgagatgcagaaaggcctttgggagcagtgtcagctgttgaaatctacttcagtgtttgcccggtgccacccacttgttgaccctgagcctttcgttgctttgtgcgagaaaacgttatgtgagtgtgcaggaggactggagtgtgcttgccctgccttgctggagtatgctcggacttgcgcccaggagggtatggtgttgtatggatggacagaccattcagcttgttctcccgtgtgtccggcggggatggagtatcgacagtgcgtgagtccgtgcgccagaacttgtcaatcactccatatcaacgagatgtgtcaggaaagatgcgttgacggatgtagctgtcctgaagggcagcttctggatgaaggcctgtgcgtggagagcacagagtgtccttgcgtccacagtgggaagagatatcctcccgggacctcattatcacgggattgcaacacctgtatttgccgcaattcccagtggatctgcagtaatgaggaatgcccaggcgaatgcttggttactggccagtcacacttcaagagcttcgacaatagatattttactttctcaggtatttgtcagtacctgttagctagggattgtcaagatcactccttttcaatcgtcatcgaaacggttcagtgcgcggatgaccgcgacgccgtatgtacgcgttccgtgactgttagactacccggtcttcacaactctctagtgaagctgaagcacggggccggcgtggctatggacggacaggatgttcaactccccctactgaaaggtgatcttagaatacagcacactgtcacagcgagcgtcaggttatcgtacggagaggatctccagatggactgggacggccggggtcgtctccttgttaagctgagccccgtgtatgccgggaaaacatgtggactgtgcggcaactacaatggaaaccaaggtgatgattttttgacgcctagcggccttgccgagcctagagtggaggatttcggcaacgcttggaaactgcacggcgattgtcaggacttgcagaagcaacacagtgatccttgcgcactgaacccacggatgacaagattttctgaagaggcttgtgctgtcctaaccagtcctacatttgaagcttgccatagagccgtatccccgttaccatatctgcggaactgccgatacgatgtttgttcctgttcggacggccgcgaatgtctgtgcggggcactggcctcttacgccgccgcatgcgcaggccgaggtgtacgtgtcgcgtggcgcgaaccgggacgctgtgagcttaattgtccaaaaggccaggtctatttgcaatgcggcactccctgtaacctaacttgccgcagcctctcataccccgacgaggagtgcaatgaagcttgtctcgaggggtgtttctgtccccccgggttatacatggacgaacgcggtgattgtgtgcccaaagctcagtgcccatgttactacgacggggagatcttccagcccgaggatatctttagtgaccaccatactatgtgctactgcgaggacggttttatgcattgcaccatgtccggggtgcctggcagcctgctgcccgacgctgtcctgtcgagtccgctgtcacaccgcagtaaacggtcactgtcctgtcggccaccaatggtaaagctagtatgtcccgccgacaacctccgcgccgagggtttagagtgcacaaagacttgtcagaactacgacctggaatgtatgagtatggggtgtgtatcagggtgtctgtgcccccctggaatggtgaggcacgagaataggtgtgttgcacttgagaggtgtccttgctttcatcaaggcaaggaatatgcgccaggagagaccgtgaagattggctgtaatacatgtgtgtgccaggaccgaaaatggaattgtacagaccatgtctgcgacgccacgtgcagcacaattggcatggcccactatctgacctttgacggcctgaagtatctgtttcccggcgagtgccagtacgtgctggttcaagactactgcggaagcaatccggggacctttcgcatactggtggggaataaaggttgcagtcatccttctgtgaagtgcaaaaaacgggttaccatactggtagagggcggggaaatcgagcttttcgatggagaagtgaacgtgaaacgccctatgaaggacgaaacacacttcgaggtcgtcgagtcgggacgatacattattctgctgttgggaaaggctctttcagtagtgtgggatagacatctttccatttcggtcgttctgaaacagacttatcaagaaaaggtttgtggattgtgcggtaacttcgacggcattcagaataatgatctgacctcctcaaacctgcaggttgaagaggatcctgtggattttggcaattcttggaaggtgagctcccagtgtgcggacacccgcaaagtccctctggatagcagccccgccacgtgtcacaacaatattatgaaacaaaccatggtagatagcagttgtaggattttaacaagtgacgtgttccaagattgcaataaactcgtcgatccagagccctacctagatgtgtgtatctatgatacttgtagctgcgaaagtatcggagactgtgcctgcttttgcgataccatcgcagcctacgctcatgtgtgcgctcagcatggcaaggtggtcacttggcggacagccaccctctgccctcaaagttgtgaagagagaaacctgagagagaacgggtacgaatgcgagtggcggtacaacagttgtgccccggcatgtcaggtcacgtgccagcaccccgaacccctagcgtgccctgtacagtgtgtagaaggttgccatgcccactgcccgcctgggaagattctcgacgagttgctccagacgtgtgtagacccagaggattgcccagtgtgcgaagtggccgggcgcaggttcgcctcggggaaaaaggtgacactgaacccgtctgaccctgaacactgccagatctgccattgcgacgttgtgaacctgacctgtgaggcctgccaggaaccaggagggctggtggtcccacctaccgatgcccctgtttctcctacgactctgtatgtggaggacattagcgaaccacccttacacgacttttactgttcacgcctcctggatttggtgttcctgttggatgggagttctaggctgtcagaggcggagttcgaagtcttaaaagccttcgtagtggacatgatggagcggttgcggattagccagaaatgggtgcgggtcgccgtggtagagtatcatgacggatcacacgcttatatcggcctgaaagatcggaaacgcccgtccgaattgcgtagaatcgcttcacaggtcaaatatgccggatctcaggttgcgagtacaagcgaagtactcaaatataccttgtttcagatcttttccaagatcgacaggcctgaggccagccgcattaccttgcttttgatggctagccaggagcctcagcggatgagccggaactttgtccgctatgtacaaggactgaaaaaaaagaaggtgatcgtaattcctgttggaataggccctcatgccaaccttaaacagattcgcctaatagaaaagcaggcgcccgaaaacaaggccttcgtattgtcctcggtggatgaactggaacagcaacgtgacgagatcgtatcctacctgtgtgaccttgctccagaagcccccccccctactcttccaccggacatggcacaggtcactgttggacccggtctgttgggcgtgtctaccctagggcccaagcgtaactcgatggtcctcgatgtggccttcgtgttagaagggagcgacaagattggagaggccgacttcaacaggtcaaaagaattcatggaggaggtgatccagcggatggatgtgggtcaagactccattcacgttacagttttgcagtactcgtacatggtcaccgtagagtaccccttctccgaagctcagagcaaaggagacattctgcagcgtgttcgcgagatccgttatcagggcggcaaccggacaaacacgggtctggccttaagatatctcagcgatcactctttcctcgtgtcacaaggagaccgggaacaggcccctaacctggtctacatggtgaccggaaatcccgctagcgacgagataaagaggctcccaggagacatccaggtcgtgcctattggcgtcgggcccaacgcaaacgtgcaagaactggagaggatcggatggcccaatgcccccatcctgattcaggactttgagacattgcctcgagaagcgcctgatttagtgctccagcgttgctgttccggcgaaggcctccagatcccaacactcagccctgctcccgactgtagtcagcctctcgacgttatcctcctgctggacggttcttccagtttccctgccagttatttcgatgaaatgaagtcattcgctaaggcatttatttccaaggctaatattgggcctcggctgactcaggtcagcgtcttgcagtatgggagcattacaacgattgacgtgccttggaatgtggttcccgaaaaggcccatttactcagtctggtggacgtcatgcagcgcgagggtggcccgtctcagataggggacgccctcggattcgccgtgcgctacctcacgagcgagatgcacggagcccgcccgggcgcgtcgaaagctgtcgttatactcgtgaccgacgtatcagtcgattccgtggacgcagctgctgatgcagctagaagtaatcgagtcacagtgttcccaattggcatcggtgaccggtacgacgccgctcagttgcgaatcctagctgggccggccggcgattctaatgtggtgaaacttcagcgcatcgaagacctgcccaccatggtcaccctgggaaactcatttttgcacaaactctgcagcggcttcgtgcgcatatgcatggacgaggacggcaatgagaagagaccaggagacgtgtggaccctgcccgatcagtgccacactgtgacctgtcagcctgacggacagacacttcttaagagccatagggttaattgcgatagggggctgagacccagctgccctaactcgcagagtccagtgaaggtcgaagagacatgtgggtgcagatggacttgcccctgtgtttgcaccggttcatcgactcggcatatagtgacgttcgatgggcaaaacttcaagctaaccgggtcatgttcatacgtgctcttccagaacaaggagcaggacctcgaggtgattcttcataatggtgcatgttcaccaggcgccaggcagggttgtatgaagtccatagaggtcaagcattctgcattgtccgtggagctgcactccgacatggaagtgaccgtgaatgggcgcctggtgtctgtgccttatgtcggcggcaatatggaagtgaacgtgtatggcgccataatgcatgaggtacggtttaatcacttggggcacatttttacatttacaccgcagaataatgaattccaactgcaactgtcacctaagacatttgcctccaagacttatggtttgtgtggtatttgtgacgagaacggcgccaacgatttcatgcttcgggacggcacagtgactactgattggaagacactggtgcaagaatggaccgtccagaggccaggccagacgtgccaacccatcctggaggaacagtgcctggtaccggatagctcccattgtcaggtgttgcttctgcccctatttgcggagtgtcacaaggtgctggctcccgcaactttttatgccatatgccaacaggacagctgccaccaggagcaggtgtgcgaggtgatcgcttcctatgcccatctgtgtcgcaccaatggagtttgcgtggattggcggaccccagatttttgcgccatgtcctgccctcccagccttgtctataatcattgtgagcatggatgccccaggcattgcgatggcaatgtgtcatcctgcggcgatcacccatccgagggctgcttctgccccccggataaggttatgctggagggttcatgcgtccctgaagaagcttgcacccagtgcatcggcgaggacggagtccagcaccagtttctggaggcatgggtgccagaccaccagccctgtcagatctgtacatgcctgagtggtagaaaggtcaattgtaccacgcaaccctgtcctacagcaaaagcccctacgtgcgggctatgtgaagtggcccggttacggcaaaacgcagaccaatgttgtccagagtacgaatgcgtgtgtgatcctgtgtcctgtgatcttcctcctgttccccactgcgaacgaggactccagccaaccttgactaacccaggtgagtgccgaccaaactttacttgcgcttgtaggaaggaggagtgtaagcgggtgtctccccccagctgtccaccccatagacttcccaccttgaggaaaacccagtgctgcgatgagtacgagtgtgcctgtaattgtgtgaactctacagtcagttgtcctctggggtatctggctagtaccgcaaccaatgactgtgggtgcacaactaccacgtgcctcccagataaggtgtgcgtgcaccgcagcaccatctaccccgtgggccagttctgggaggaaggttgcgatgtctgtacatgtactgacatggaggatgccgtcatgggactcagagttgcacaatgcagtcagaaaccctgtgaagattcttgtcgatccggttttacatacgttctgcatgaaggcgagtgctgcggccggtgtttgccttcagcctgcgaagtggttacagggagccccagaggagactcccaatcaagctggaagagcgtggggtcccagtgggcctcccctgagaacccctgcctgattaatgaatgtgttcgagtgaaagaggaagtttttatccaacagcgtaatgtctcttgcccccagttggaagtacccgtatgcccaagtgggttccagcttagctgcaagacctcagcttgttgtccgagctgtaggtgtgaacgtatggaagcgtgtatgcttaacgggacggtgatcggccctggcaaaaccgtcatgatagacgtctgtaccacatgtcgctgtatggtgcaggtaggggtgatatctggctttaagcttgaatgtcgcaagaccacttgcaatccatgcccgctggggtataaggaggagaataacaccggcgagtgctgtggtcggtgcctcccgacagcgtgtactattcagctgcgcggcggtcaaattatgacattgaaaagagacgagacactccaggacgggtgcgacacacacttctgcaaggtcaacgagcggggggagtatttctgggaaaagcgggtgacaggctgccccccattcgatgaacacaaatgcttggccgaaggtggaaagatcatgaaaataccagggacatgttgtgatacttgtgaagaacccgaatgcaatgatatcactgcaaggctgcagtacgtgaaggtggggtcttgtaagagcgaggtggaagtggatatccactactgccaggggaagtgtgccagcaaagccatgtactccattgatattaacgacgtgcaggaccagtgtagttgttgctcacccaccagaactgaacccatgcaagtggctctccactgcactaatggcagcgtggtttaccacgaggtgctgaacgccatggagtgcaaatgtagtccaagaaagtgctccaaa

SEQ ID NO: 12520 - DNA, 8439 bp, Artificial Sequence
  derived and/or modified sequence
atgattcctgcacgcttcgcaggtgtcctccttgcgctggccctgattctgcccggaaccctctgtgcagaaggtactcgcggacgctcctcgactgctagatgttccctgtttggtagcgacttcgtgaacacgttcgatggctctatgtactcgtttgcaggatactgttcctacctgctcgcagggggatgtcagaagcggtccttttccatcattggagattttcagaatggtaagcgagtgtcactttccgtgtaccttggagaattcttcgacattcatctcttcgtgaatggcaccgtgacccaaggggatcagagagtatcaatgccttacgccagcaagggactctaccttgaaactgaggcgggatactacaaacttagcggcgaggcctacggttttgtggcgaggatagatggatcgggaaatttccaagtgctgctttccgatcggtacttcaataagacctgtggactgtgtggtaactttaacattttcgcagaggatgactttatgactcaggaagggaccttgacctccgacccatacgattttgcaaactcgtgggcactttcgtccggtgagcagtggtgtgagcgggcttcacctccttccagctcgtgcaacatatcatcaggagagatgcaaaaaggcctgtgggaacaatgtcaactgctcaagtcgacttctgtgttcgcaagatgccacccactcgtcgatccagaaccttttgtggcgctttgtgaaaaaacgttgtgtgaatgcgcaggcggacttgaatgcgcctgtcctgccctgttggaatacgctagaacttgcgcacaagaaggaatggtgctctatggatggaccgaccattcggcttgttcgccggtctgtccagcaggtatggaatacagacaatgtgtgtcaccgtgtgcccggacttgtcaatctcttcacattaacgaaatgtgtcaagagagatgtgtcgatggatgttcatgcccagaaggtcagctgcttgatgaaggcctgtgtgtggaaagcactgaatgtccttgtgtccattcgggaaagagataccctcctggcacgagtctctcccgcgattgtaacacctgtatctgtcgcaactcccagtggatctgttcaaatgaagaatgcccaggagaatgcctggtgaccgggcagtcgcacttcaagtcctttgataacaggtactttaccttttcgggaatttgtcaataccttttggcccgcgactgtcaagatcattcattctccattgtcattgaaacggtccaatgtgcagatgatagagacgctgtgtgcactcgcagcgtgactgtgcggctgcctggtctgcataacagtctggttaagctgaaacatggagcaggagtcgcaatggacggacaagacgtgcaactccctctcctcaagggtgacctccggattcagcatactgtgaccgcatcggtgcgcctgtcgtacggcgaagatcttcagatggattgggacggcaggggacgacttcttgtcaagctgtcacctgtgtacgcaggtaagacctgcgggctgtgtggcaattacaacggaaatcaaggagacgatttcctgaccccctcaggtcttgcagagcctcgcgtggaagattttggcaatgcctggaagctgcatggtgattgtcaagatctgcaaaagcagcatagcgacccatgcgccctgaacccaaggatgacccgattttccgaagaagcctgcgcagtgctcacctcacctaccttcgaagcgtgtcatagggcagtgtctcctctcccttaccttcggaactgcagatacgatgtctgctcttgctcggatggacgcgaatgcctttgtggggcgttggcaagctacgcagccgcatgtgctggtcgcggtgtgcgggtcgcatggagggagcccggtaggtgcgaactgaactgtccaaaggggcaggtgtatcttcagtgtgggacgccttgcaacctcacgtgtcgcagcctctcgtaccctgacgaagagtgtaatgaagcctgtcttgagggctgcttctgtcccccaggactgtacatggatgaacggggagactgtgtgcctaaggcacaatgtccttgctactacgatggagagatttttcaacctgaggacattttctcggaccatcatacgatgtgttactgtgaggatgggtttatgcattgtaccatgtcgggagtgcctggctccctgctgccagacgccgtcctgtcctcgcctctgtcacacagatcaaaacggagcctttcgtgtagaccccccatggtgaaacttgtgtgtcccgcagacaatttgcgggcagagggtctggagtgcaccaagacctgccaaaactacgatctggagtgtatgtcaatgggttgtgtctccggctgcctgtgtcctccgggtatggtccgacatgaaaataggtgcgtggcacttgaacgctgcccgtgttttcatcaaggtaaggaatacgcacctggcgaaactgtgaaaattggatgcaacacctgtgtgtgccaggacagaaagtggaactgtactgatcacgtgtgtgacgctacgtgttcgaccatcggaatggcacattacctgacctttgacggactcaagtacctgtttccgggagaatgtcaatacgtcctggtgcaggactactgcggatccaatcccggaacttttcggattctcgtcggcaacaagggttgttcacatccttcggtaaaatgtaagaagcgggtcactatcttggttgaagggggagaaatcgaactttttgatggagaggtgaatgtaaagaggccaatgaaggatgaaacccactttgaggtggtggaatcaggtcgttatatcatcctcctgctcggcaaagcgctttcagtcgtgtgggatagacacctctccatttcagtggtcctgaaacaaacctaccaggagaaggtgtgcggactgtgcggaaatttcgacggaatccagaataatgatctcacttcctcaaatcttcaggtggaggaggaccctgtcgatttcgggaactcctggaaagtgtcctcacaatgcgcagatactaggaaagtgcccctggactcctcgcctgcaacctgccacaacaacatcatgaagcagaccatggtggatagtagctgtaggatcctgacctccgatgtctttcaagattgcaataaacttgtggatcctgaaccataccttgatgtgtgtatttacgacacctgctcgtgtgaaagcataggtgattgtgcatgtttttgcgataccattgcggcatacgcacatgtatgcgctcaacacggtaaagtggtgacctggcgaactgcgaccctgtgcccgcaatcctgcgaagagaggaatctgcgagaaaatgggtacgaatgtgaatggcggtataactcctgtgcccctgcatgccaagtcacttgtcagcatccagaaccactggcctgtccagtgcagtgtgtcgaaggatgccacgcacattgtcccccaggcaagatactggacgagctgcttcaaacttgcgtcgaccctgaagattgtccggtctgtgaggtcgcaggccggcggtttgcatctgggaagaaagtgaccctgaacccctccgatccagagcattgtcaaatttgtcattgtgatgttgtgaatctgacttgtgaagcgtgtcaggaacccggtggtcttgtggtgcctccgactgacgcacccgtctccccgactaccctgtacgtggaggacatttcagaaccgcctctgcacgacttttactgctcgcgactcctcgacctcgtctttctccttgatggaagcagcagactctcagaagcagaatttgaagtgctgaaagcatttgtggtcgatatgatggagagacttcgcatctcgcagaaatgggtgagagtagcagtggtggaataccacgatggatcacacgcttacattgggcttaaggatcggaagcgccctagcgagctgcgccgtatagcctcgcaggtgaagtacgcaggatcgcaggtcgcgtcgacctcggaagtccttaagtacacgttgtttcagatattctccaagatagatagaccagaagcctcccggataacccttcttcttatggcatcccaggaaccacagcgtatgtcccggaacttcgtcaggtacgtgcaaggccttaagaagaagaaggttatcgtgattccagtgggcattgggcctcatgcaaacctcaagcagattagactgattgagaagcaggctcccgaaaacaaggccttcgtgctgagctccgtggacgaacttgaacaacaacgcgacgaaattgtctcatacctttgcgatctcgcgcctgaggccccacctcccaccctcccgccagacatggctcaagttaccgtgggaccaggactgcttggagtgtcgactcttgggccaaagcggaactcgatggtgcttgatgtggcgttcgtgctcgagggatccgacaagatcggagaagcagactttaatcgcagcaaagaattcatggaagaggtgattcagcgcatggatgttgggcaggactcgatacacgtgaccgtccttcagtactcgtacatggttaccgtggagtacccttttagcgaggcacagtcgaaaggcgatattctgcaaagagtgcgggagatccgttaccaaggggggaaccgaactaacactggactcgcactgaggtacctttctgaccatagctttcttgtgtctcagggtgatcgtgaacaagcgccaaacttggtctacatggtcactggtaaccctgcatccgacgagattaagcgcctccctggtgacattcaggtggttcctattggcgtcggtcccaacgccaacgtccaggaacttgaacgcattggatggcctaacgcgccgattctgatacaagattttgaaacccttcctagagaggctccggatcttgtgcttcaaagatgctgttcaggggagggactgcagatccctactctgtccccagctcctgattgctcgcagccactggatgtgattctgcttcttgatggatcttcgagtttccctgccagctatttcgatgaaatgaaatcgtttgcgaaggcatttatcagcaaagcaaacattggtcctcgtctcacgcaagtctcggttctgcagtacggttccataactacgatcgatgttccgtggaacgtggtccctgagaaggcccatttgctgtcgcttgtcgacgtcatgcaacgcgaagggggaccgtcacagattggagatgcactgggatttgcggtgagatacctcacttcagaaatgcatggagccagacctggtgcaagcaaggcagtcgtgattcttgtcaccgacgtgtcggtggacagcgtcgatgcggcggctgacgcagcacggtctaaccgcgtgaccgtgtttcctattggcatcggtgatcggtatgatgcagcccaacttcgcattcttgcgggtcctgcaggagatagcaatgtcgtcaaacttcagagaattgaagatctccctaccatggtgaccctgggcaactcatttctgcataaactttgtagcggattcgtgcgtatctgcatggatgaggatggcaacgaaaaaagacctggagatgtgtggactcttcctgatcagtgccataccgtgacttgccagcctgacggtcagacgctgctcaagtcccaccgcgtcaactgcgacaggggactgcgcccctcgtgtcctaactcacaaagcccggtcaaggtggaggaaacttgcggttgccgatggacgtgcccttgtgtgtgcacgggatcgagcactcggcacatagtgacttttgatggtcaaaactttaagttgactgggtcctgttcatatgtgctgtttcagaacaaagagcaagacctcgaggtgatccttcataacggcgcgtgcagccctggggcaagacaaggatgtatgaagtccatcgaagtgaagcattccgctctgagcgtcgaacttcacagcgatatggaagtgaccgtgaatggcagacttgtctccgtgccatacgtgggtggtaacatggaggttaacgtgtacggagcaattatgcacgaggtgcgtttcaaccatctgggacacatctttacctttactcctcaaaacaatgaatttcagctccaactttcgcctaagactttcgccagcaagacctatggactttgtggcatctgcgacgaaaatggagccaacgatttcatgctgcgcgatggtaccgtgactactgactggaaaactctggtgcaagaatggactgtgcaacgccccggtcagacgtgtcagccaatactcgaagagcagtgtctggtgcccgatagctcgcactgccaggtcctgcttctcccgctttttgcagaatgccataaagtcctggcgcctgcgaccttttacgccatatgtcaacaggactcatgccatcaagaacaagtgtgcgaggtgatcgcatcctacgcacacctgtgtaggaccaacggtgtctgtgtcgactggagaacccccgatttttgcgcaatgtcgtgcccaccatcgctggtgtacaaccattgtgagcatggttgccctcggcattgtgatgggaacgtgagctcatgcggcgaccaccctagcgaaggatgtttctgtccacctgataaggtcatgcttgaaggaagctgtgttcccgaggaagcgtgtactcagtgtatcggtgaggacggtgtccaacatcaatttctcgaagcctgggtccctgatcaccaaccttgtcagatatgtacttgtctctcaggacgtaaagtgaattgcaccacgcaaccgtgtccaaccgccaaggcaccaacctgcggattgtgtgaagtggcgcggcttcgacagaacgcggatcagtgctgcccagaatacgaatgtgtgtgtgatcctgtcagctgcgatctcccccctgtccctcactgcgagaggggactccaaccaactcttaccaatccgggtgagtgtagacctaactttacctgcgcatgtcgcaaggaagaatgtaagcgcgtcagccctccatcatgtcctccacacagactgccgactctcagaaagacgcagtgttgtgacgagtacgaatgtgcatgtaattgtgtgaacagcactgtgtcttgtccactgggttacctggcctccactgcgaccaacgattgcggttgcacgactaccacctgtttgccagataaggtgtgtgtacatagatcgactatctaccctgtgggacaattctgggaggagggatgtgatgtgtgcacctgcaccgatatggaagatgcagtgatgggattgcgcgtcgcccaatgttcgcaaaagccttgcgaagattcgtgccggtcagggtttacctacgtgcttcacgagggcgaatgttgcggtcggtgccttccgtccgcttgtgaggtggtgactggatcgcccagaggcgattcccaatcttcttggaagagcgtgggctcgcaatgggcaagcccagaaaatccatgcctcattaatgaatgtgtgcgagtgaaggaggaagtattcatccaacagagaaacgtctcgtgtccacaactcgaagtgcccgtgtgtccatcaggatttcaactctcgtgtaagactagcgcatgctgcccgtcatgtcgctgcgagcgcatggaagcctgtatgttgaatggaactgtcattggcccaggaaagactgtgatgatcgatgtatgtaccacttgcagatgtatggtgcaggtgggcgtcatttccgggtttaaactcgagtgtcgaaaaaccacttgcaatccctgtcctctggggtacaaggaggaaaacaatactggagaatgttgtgggcgctgccttcctacggcctgtacgatccagcttcgcggaggtcaaatcatgactcttaagcgcgatgaaactcttcaagatggatgtgatactcacttctgtaaggtgaacgagagaggtgaatacttttgggaaaagagggtcactggatgtccaccattcgacgagcataagtgtcttgctgaaggagggaagattatgaaaatccctgggacctgttgcgatacctgtgaagaacctgaatgcaatgacattaccgctcgacttcagtatgtgaaggtggggtcatgtaaatcggaggttgaggtggatattcattactgtcaagggaagtgtgctagcaaagcgatgtactcgattgacattaatgatgtccaagaccaatgttcctgttgttctccaacccgtactgaacctatgcaagtggcactccattgcaccaatggttcggtcgtttaccatgaggtgttgaatgcaatggaatgtaagtgttcaccaagaaagtgtagcaag

SEQ ID NO: 12521 - DNA, 8439 bp, Artificial Sequence
  derived and/or modified sequence
atgatcccagctagatttgcaggcgttctgctcgccttagccctcattcttcctggcacattatgtgccgaggggacgcgcggaaggtcttctacagcaagatgttctctgtttgggagcgactttgtgaacacctttgatggctccatgtattcttttgcaggctactgcagctatctgcttgcagggggatgccagaaacgttcatttagcattattggcgatttccaaaatggcaagcgggtttctctgtccgtctacctgggagagttttttgacatccaccttttcgtgaacggaacagttactcagggggaccagagggtctctatgccttacgcaagtaagggactgtacctggaaacagaagctgggtattacaagctcagcggcgaagcatatggcttcgtggcacgcatcgacggaagtggcaacttccaggtactgctttcagaccggtattttaacaagacctgcggcctttgcgggaatttcaacatctttgccgaggatgatttcatgacccaggaaggaaccctcacttctgacccatacgactttgctaactcatgggcactttcgtctggagaacagtggtgtgaaagagcctcaccgcccagcagtagctgcaacataagctccggagagatgcagaaaggcttgtgggaacaatgtcagttgctgaagagcaccagcgtgttcgcacgatgtcatcccctcgtggacccggagccttttgttgctctttgtgagaagaccctgtgcgagtgcgcaggcgggttagaatgtgcctgccctgctctgttagaatacgccaggacctgcgctcaggagggaatggtgttgtacggctggaccgatcactccgcttgcagccctgtctgcccagctggcatggaatacagacagtgtgtaagcccctgtgcccgcacctgccaatcacttcacatcaatgaaatgtgccaggaaaggtgcgtggatggatgcagttgtcccgaaggacaactcctagatgaaggtctatgcgtcgagagtaccgagtgtccatgcgtgcactctggcaagcgctatccccctggcacatccctcagtcgtgactgcaacacatgcatttgtagaaactcacagtggatttgtagcaacgaggaatgccctggagagtgcttggtcacaggtcaatctcatttcaagagtttcgacaacagatactttactttcagcgggatatgtcaatacctgttggcccgtgattgccaggaccattcatttagcatcgtgatcgaaaccgtccagtgcgccgacgatagggacgcggtgtgcacgaggtctgttaccgttaggctcccaggactgcacaacagcctcgtaaagctgaagcacggagctggagttgccatggatggtcaggatgtgcaactgccactgcttaagggcgacctgagaattcaacacacagtgaccgctagcgttagacttagctacggcgaggatctgcaaatggactgggatggacgaggaaggctgctggttaagctgagtcccgtttacgcgggaaaaacgtgcggattatgtgggaattacaacggtaaccagggagacgatttcctgacccctagcggcctggctgagccgagggtcgaggactttggcaacgcttggaaactccacggcgactgccaagacctccagaaacaacatagtgacccttgtgcgctcaatccaagaatgacccgcttctcagaagaggcgtgcgcagtgttgaccagcccgacttttgaggcttgtcatcgggctgtaagtcctcttccttatttgcggaactgccgctatgatgtttgcagctgtagcgatggccgcgagtgtctctgcggggctttggcaagctacgccgcagcatgtgcgggaaggggtgtaagagttgcctggcgcgagcctggaagatgtgaacttaactgccctaaaggacaagtttacctgcagtgcggtacaccttgtaacctgacatgccgtagcctgtcttacccggacgaagaatgcaatgaggcttgcttggagggctgtttctgcccccccgggctttacatggatgagaggggcgactgtgtgccaaaagcccagtgcccttgctactatgatggcgagatcttccagccagaggatatcttttccgatcaccacacaatgtgctattgcgaggacggctttatgcactgcaccatgtcaggagtgcccgggtccctgctgcccgatgcagtcctttctagccctcttagccaccgcagtaagcgctccctgagctgcaggcctcccatggtcaaactggtctgccccgcagataatttaagagcagagggactcgaatgtacaaagacatgccaaaactatgaccttgagtgcatgagcatgggctgcgtctcaggctgcctgtgcccccctggaatggttcgacatgaaaaccggtgcgtagcactggaaagatgcccttgctttcaccagggaaaagaatacgcacctggcgagaccgtgaaaattggatgcaacacctgtgtgtgtcaagatagaaagtggaactgcaccgatcacgtctgcgatgccacatgctctaccatcggaatggcacattacctgacttttgatggattgaaatacctgttcccaggagagtgtcaatacgtactggtgcaagactattgcggaagcaatcccggcacctttcgtatcctcgtgggcaataaaggttgcagtcatccatccgtgaagtgtaaaaagcgcgtcactattctggttgagggaggggaaatcgagctttttgatggagaggtgaacgtgaaaaggccaatgaaggatgagacacattttgaggtggtggagagcggacggtatattatcctccttctgggcaaggctttgagcgtggtttgggatcggcacttgtcaatcagtgtcgtgctgaaacagacttatcaggagaaagtttgcggcctttgcggcaattttgatggcatacaaaacaatgacctcacatcttccaacttgcaagttgaggaagaccctgtggatttcggcaattcctggaaagtctcatcccagtgtgctgatacacggaaagtgccactggatagtagcccagctacctgtcacaacaacataatgaagcagacaatggtggattcctcgtgtcgcattctcaccagcgatgtctttcaggattgcaataaattggtagaccccgaaccctatcttgacgtctgtatctatgatacctgcagctgcgaaagcatcggagattgtgcttgtttttgcgataccatcgctgcttatgcacacgtatgcgcccagcatgggaaggtggtgacatggaggactgcgacactgtgtccccagtcttgtgaggaaaggaatctcagagaaaacggttatgaatgtgagtggcgctacaattcatgcgccccggcctgccaggtgacctgccaacacccagagccgctggcatgcccggttcagtgtgttgaaggatgccatgcacattgccctcctggcaagattctcgacgagctgctccagacatgcgtagatccagaggattgcccagtctgcgaggtggctggcagaaggtttgcctcagggaagaaggttacactcaatccaagcgaccctgaacattgccagatttgccactgtgatgtggtgaatctgacatgcgaggcttgtcaggaaccgggcggactggtcgttccgccaacagatgccccagtctcccctaccaccctgtacgtggaagacatcagcgagccacctctccatgacttctactgtagtaggctgctggatctggtcttccttctggacgggagtagccgcctcagcgaagcggaattcgaggtccttaaggccttcgtggtggatatgatggagagactcagaatcagccagaagtgggtcagggtagccgtcgttgagtatcacgacggatcacatgcgtacatcggcctaaaggacagaaaacgacccagtgagctgcgaagaatcgcgagccaagtcaagtacgctggctcgcaagttgcttctacgtccgaggtcctcaaatatacactctttcagattttttcaaaaattgacaggccagaggcttctaggatcacactactgctcatggctagccaagagcctcaaagaatgagcaggaatttcgtgcgctatgttcagggtcttaagaaaaagaaggtcatcgttattcccgttgggatcggcccacatgctaacctcaagcagatacggctgattgagaagcaggcgccggaaaacaaagccttcgttcttagctccgtcgacgaactggaacaacagagggatgagatcgtgagctatctttgtgatcttgccccagaggctccccctccaacacttccgcccgatatggcacaggtgactgttggcccaggactcctgggtgtctccaccctcggccctaagcgaaactcaatggtcctggatgtagccttcgttctggaaggctctgataaaatcggtgaggctgacttcaaccgctccaaagagttcatggaagaggtcattcaaaggatggatgtgggccaggattctattcatgtgacggttttacaatacagctatatggtcaccgtcgagtatcctttctcggaagcacaaagcaaaggggacatcctacagcgggtaagggaaattcgctatcaagggggaaatcgcacgaacaccggattagccctacggtatttaagcgaccactcgttcttagttagccagggtgaccgcgagcaggctcctaatcttgtatacatggtgaccggaaatccagccagcgatgagatcaaaagactgcccggggatattcaagtggtgccaattggcgtaggacccaatgctaatgtgcaggaactggaaaggatcggatggcctaatgctcccatcctgatccaagatttcgaaacacttcccagggaggcgcccgacttagtcctgcaacgctgctgcagtggggaaggcctgcagatccccaccctttcccctgcacctgactgttctcagcctttggatgtgatcctgttgttggatggttcaagcagttttcctgccagctactttgacgagatgaaatcgttcgctaaggcatttatctctaaggcgaacatcggtccaaggctgactcaggtatccgttctccaatatgggtcaattacgacaatcgacgtgccctggaatgtcgtccctgaaaaagctcaccttttgagtttggtcgatgtgatgcaacgagaggggggcccttcccagatcggggacgctttaggattcgctgtaaggtacttgacaagcgaaatgcacggggcgagaccaggagcgtccaaggccgtggttatactggtgaccgatgtctccgttgattctgttgacgccgccgctgatgccgcgcggtccaacagggtcacagtattcccaatcggcatcggagatagatatgacgcagcacaactcaggatccttgccggaccagccggagactctaatgtcgtgaagctacaacgcattgaggatctccccaccatggtcacactagggaactctttcctccacaaactgtgttctggcttcgtcaggatttgtatggatgaagatggtaatgagaagaggcccggcgacgtctggacactgcctgaccagtgtcacacggtcacctgtcagcctgacggtcaaaccctcctgaaatcacatcgggtgaactgcgatagaggattgagaccctcctgccctaactctcaaagcccggtgaaggtggaagaaacttgcggttgtagatggacttgcccttgtgtgtgtacaggctccagtactagacacatcgtgactttcgacggtcagaattttaagctgacaggaagctgttcttacgtcctgttccaaaacaaggaacaggacctggaagtgatcttgcataatggggcatgttctccaggcgccagacagggctgcatgaaatccatcgaagtaaaacactcagccctgagcgttgagctgcatagcgatatggaggttaccgtcaacggcagactcgtcagcgtcccttacgtcggaggcaacatggaagtgaacgtgtatggggctatcatgcacgaggtgcggttcaaccatcttggccatattttcacgtttaccccacagaacaatgagtttcagttgcagctgagtcctaaaacctttgccagcaagacctacggtttgtgcgggatctgcgatgagaatggcgcaaacgattttatgctcagggacggcactgttaccacggattggaaaacattggtgcaagagtggaccgtgcagaggcctggccagacatgccagcccatcctggaggaacagtgccttgtgcctgacagcagccactgccaggttttgctgctgccgctgtttgcagaatgccacaaagttctcgctccagcaacattttatgctatctgtcagcaggatagctgccatcaggagcaagtctgtgaggtcatagcttcttatgcacatctgtgcagaactaatggcgtctgtgtggactggaggactccagacttctgcgctatgagttgcccccccagcctcgtatataatcattgtgagcatgggtgtcccaggcattgtgatggcaacgtgtcttcgtgcggggaccacccctcagagggctgcttttgtcctcctgataaggtaatgctggaaggatcctgcgttcctgaggaggcatgtacccaatgcatcggcgaggacggggttcaacatcagtttctggaagcgtgggtaccggaccaccagccctgccagatttgtacatgcctgagcgggaggaaagtgaactgtaccacacagccatgtcccacagctaaagcacctacctgcggcctctgcgaagtagcaagactgaggcaaaacgccgatcagtgctgtcctgagtacgagtgcgtctgcgacccggtgtcttgtgatctcccacccgtgcctcattgcgaacgcggactccagccaaccctgactaatcctggggaatgtcgccccaactttacatgcgcatgccgcaaagaagaatgcaagagggtgtcaccaccaagctgccctccccatcggttgccaacactgcgcaaaacacagtgttgcgatgaatacgagtgtgcatgcaactgcgtgaactctaccgtctcttgcccccttgggtatttggcaagcacggcaactaatgactgcgggtgcactaccacgacttgtctgcctgataaggtctgcgtgcataggtctactatctaccctgtggggcaattctgggaggaaggctgcgatgtttgcacatgtactgacatggaagacgccgtgatgggacttagagtcgctcaatgtagtcaaaagccctgcgaagattcatgccgcagcggcttcacctacgttcttcacgagggtgagtgttgcggaaggtgcctgcccagtgcatgcgaagtggtgacaggtagtccccgcggagattcacaaagctcctggaagagcgtgggctcccaatgggcctctccagaaaacccctgcctcatcaatgagtgtgtcagagtgaaggaggaagtattcatacagcagcgcaatgtgtcatgtccccaactggaagtccctgtttgccccagcgggttccaactcagttgtaaaacttctgcctgctgcccaagctgtaggtgcgaaaggatggaagcgtgtatgcttaacggcacggtgatcgggccaggtaaaactgtcatgatcgacgtgtgcacgacctgcaggtgcatggtacaggtgggagtgatatcaggattcaagctggaatgcaggaagactacatgcaatccttgtcctctcgggtataaggaagaaaacaatacaggagagtgctgcggacggtgtctccctacagcttgcactatccagttaaggggaggtcaaattatgacactgaagcgtgacgagacattgcaggacggctgtgacacacatttctgcaaggtcaatgaaaggggtgagtacttctgggaaaagagggtcacaggctgccctccatttgatgaacataagtgtctggccgaaggcggaaaaattatgaagatccctggtacctgttgcgacacttgcgaagaacctgagtgtaacgatatcaccgcccggctccaatacgtcaaagtgggcagctgcaagagcgaagtggaagttgacatccattactgccaagggaagtgcgcttccaaagcaatgtactcaatcgacatcaatgacgtgcaagaccaatgctcctgctgttcgccgacacgaaccgagccgatgcaggtggctttgcactgcaccaacggcagtgttgtctaccacgaagtgctgaacgcaatggagtgcaaatgcagtcctagaaagtgtagcaaa

SEQ ID NO: 12522 - DNA, 8439 bp, Artificial Sequence
  derived and/or modified sequence
atgatccctgcgcggtttgccggagtgctgctcgcccttgctctgatactgcccggaacgctgtgcgctgagggaaccagaggtcggtcgagcaccgcccggtgttcgctttttggatcggactttgtgaacaccttcgacggctccatgtactcctttgcgggctactgttcgtacctcctggcgggcggatgccagaaacggagcttctccattattggtgattttcagaacggaaagcgcgtctctctgtcggtctaccttggagaattctttgatattcatcttttcgttaacggaactgtaactcagggagatcaaagggtgtcgatgccgtacgcatccaaaggactttacttggaaactgaggcaggctactacaagttgagcggagaagcgtacggattcgtcgctagaatcgacggctcgggaaacttccaagtgctgctgtcagatagatactttaacaagacctgtggcctgtgtggcaactttaacatatttgccgaagatgactttatgactcaagagggaaccctgacctcagatccttacgacttcgcaaacagctgggcactttcctccggggaacagtggtgcgaaagggcgtcgcccccatctagtagctgtaacatcagctccggtgaaatgcaaaaaggactgtgggagcagtgtcagctgctgaagtcgacgtcagtgtttgcacggtgtcatcctctcgtcgatcccgaaccgtttgtcgcgctgtgcgaaaagactctttgtgagtgcgccggaggactggaatgtgcttgtcctgcgctgcttgagtacgcacgcacttgtgcccaagagggaatggtgctttacggctggactgaccattccgcatgttcgcctgtgtgtccagctggaatggaataccggcaatgtgtcagcccatgcgcgaggacgtgtcagtcccttcacatcaatgagatgtgtcaagaacgctgtgtcgatggatgcagctgtcctgaaggacaactccttgacgaaggcctttgcgtggagagcacggagtgtccatgtgtgcactcagggaaacgctaccctcccggtacctcgctcagccgcgattgtaacacgtgcatttgcagaaattcccagtggatctgttcgaatgaagaatgccccggtgaatgcctggtgactggacaatcgcactttaagtcctttgataaccgctactttactttctccggtatatgccagtaccttctggcgagggattgccaagatcactcatttagcattgtgatcgaaaccgtacaatgtgcagatgatcgggacgccgtgtgcacccgttcggtgaccgtacgactccccggactccataactcgctggtcaagttgaagcatggagcaggggtggcaatggacggacaggacgtccaactcccacttcttaagggggatctgagaattcagcataccgtgaccgcatctgtcagactttcatacggagaagatctgcagatggattgggatgggagagggcggctccttgttaaactttcgcctgtgtacgcaggtaagacctgtggactttgtggcaattacaatggcaatcaaggtgacgattttctgactccttcgggtctggccgagccaagagtggaagatttcggcaatgcctggaaacttcatggagactgtcaggatcttcaaaagcaacattccgacccatgtgcactcaaccccagaatgacccgctttagcgaagaagcctgtgctgtcctgactagcccaacctttgaggcatgtcatcgggcggtgagcccactgccctacctgagaaactgtcgctacgatgtctgttcatgttcggatggccgtgaatgcctgtgtggcgcactcgcatcgtacgcagcagcatgcgccggaaggggagtgagagtggcatggcgtgagccagggcgatgcgaactcaactgtccgaaaggacaggtgtaccttcaatgtggaaccccttgtaatcttacttgtcggtcgcttagctatcctgatgaagagtgcaacgaagcctgtcttgagggatgtttctgtccacctggactttacatggacgaacgcggtgactgcgtgcctaaagcacagtgcccatgttactacgacggtgaaatcttccaacctgaagatatctttagcgatcatcatactatgtgttactgtgaagatggctttatgcattgcaccatgtcgggtgtcccaggatcgctcctgccggatgcggtcctgtcatcgcctctgtcccataggtccaagagatccctgagttgcaggccaccgatggtcaagttggtgtgtccagccgataacctgagggcagaaggacttgaatgcaccaagacgtgtcagaattacgatctggagtgcatgtcgatgggatgcgtgagcggatgcctgtgcccgcctggtatggttcgtcatgagaacaggtgtgtcgctctggaaagatgcccttgttttcaccaaggaaaggaatacgctccaggagagactgtgaagatcggctgcaatacttgtgtctgtcaagatcggaagtggaactgcaccgatcacgtgtgtgatgcaacttgttcgaccattggcatggcccattacctgacttttgatggcctgaagtacttgtttccgggtgagtgccagtatgtgcttgttcaggactactgtggatctaaccccggaacgtttcgaatcctggttggtaacaagggttgctcgcaccctagcgtgaaatgtaagaaaagagtgactatcctggtcgaaggaggagagattgaactttttgatggcgaagtaaacgtgaagcggccaatgaaggatgaaacccatttcgaagtggtggaatccgggcgttacataattctgttgcttgggaaggcactttcggtcgtctgggatcggcacctttccatttcagtggtccttaaacagacctaccaagaaaaggtgtgcgggctttgtggtaactttgatggcattcagaataacgatctgactagctcaaacctccaggtggaggaggaccctgtcgatttcggaaactcgtggaaagtgtcctcgcagtgtgcagatactcgcaaggtgccccttgactcatcccctgccacctgtcataacaacattatgaaacagaccatggtggattcgtcatgcagaatccttacttccgatgtgttccaagattgtaacaagctcgttgatcccgaaccctacttggacgtgtgtatttacgacacttgttcctgtgaatcaattggagattgtgcatgtttctgcgataccattgccgcctacgcacatgtgtgtgcacaacatgggaaagtggtaacttggcgcactgcaaccctttgtccacaatcctgtgaggaacgcaacctgagagaaaatggatacgaatgtgaatggagatacaattcgtgcgcacctgcctgtcaagtcacctgccagcaccccgagcccctggcttgcccagtccaatgtgtcgaggggtgtcatgctcattgtccccctggaaagattcttgacgaacttctccaaacctgcgtcgatcctgaggattgtcctgtgtgtgaggtggccgggagaaggtttgccagcggaaagaaagtcaccctcaacccaagcgacccggaacattgtcaaatttgccactgtgacgtggtgaatttgacgtgcgaagcatgccaagaaccaggaggacttgtggtgccacccactgacgcacctgtttctcccactaccctgtacgtggaagatatttccgaacctcccctgcatgatttctactgctcccggctcctggatcttgtgtttctgctggacggttcgtcgcgcctttcagaagcagaatttgaggtgctgaaggcctttgttgtggacatgatggaaagactgcgtatctcccaaaagtgggtgagggtggcagtggtggaataccacgacggtagccacgcctacattgggcttaaagatcgtaagcggccttcggagctgcgtcgaatcgcatcgcaggtcaaatacgcagggagccaagtggcatcgacctccgaagtcctgaaatacaccctgtttcagatattcagtaagattgaccggcccgaggcatccagaattactctgctcctcatggcatcccaagaaccgcagagaatgtcgagaaacttcgttagatacgtccagggattgaaaaagaagaaggtcattgtgatccccgtgggcattggaccacatgcaaacctgaagcaaattcgactgatcgaaaagcaagcaccagagaataaggcattcgtgctcagctcagtggacgaacttgagcagcaacgggacgagatcgtgtcctatttgtgcgacctcgcaccagaggcccctcctcctacccttcctcccgacatggcacaggtcactgtgggtccaggccttcttggtgtctccacccttggaccaaagagaaattcgatggtgctggatgtcgcatttgttctggaagggagcgacaaaatcggcgaagcggatttcaatcggagcaaggagttcatggaagaagtcattcaacgcatggatgtgggccaagattctattcatgtgacggttctgcaatactcgtacatggtgacggtggaataccccttttcagaggcacaaagcaagggtgacatactccaaagggtgcgcgagattcgctatcaaggtggaaaccgcaccaataccggtctggcactccggtacttgagcgatcactcctttctggtcagccagggagatcgggaacaggccccaaacctcgtgtatatggtgactggaaacccagcatccgatgagattaagcgcttgcctggcgatatacaagtggtgccaatcggagtcggtccaaatgcaaacgtgcaggagctggaacgcattggatggccaaacgctcctatattgatccaagatttcgaaactctgcccagagaagcacctgatctcgtgcttcagcgatgttgtagcggtgaaggcctgcagattccgactctgtcacctgcacctgattgttcacaaccactcgacgtcatactgctcctggacggcagctcgtcgtttcctgcgagctactttgacgaaatgaagagttttgcaaaggcatttatctccaaagccaatataggaccacgactcactcaggtgtcggtcctccagtacggatcaatcaccacgatcgatgtcccatggaacgtggtccctgaaaaggcgcatctgttgtccctcgtggatgtgatgcagagagagggaggtccttcgcagattggagacgcacttggattcgcggtgcggtacctgacgagcgaaatgcacggagcccgtcctggtgcgtcgaaggccgtcgtgattttggtgactgacgtgtccgtggactctgtcgatgcagccgcggatgcagcccgctctaaccgtgtcacggtgttcccaattggaattggggacaggtacgatgcggcgcaattgagaatcctggcaggaccagcaggtgatagcaacgtcgtgaaactgcaaaggatcgaggaccttccaacgatggtgaccctcggaaactcatttttgcacaaattgtgttcgggattcgtgcgcatctgtatggacgaagatggcaatgaaaagcgccccggcgatgtttggactctgcccgaccaatgtcataccgttacctgtcaacctgatggtcagaccctgctgaaaagccaccgcgtgaactgtgatcgagggttgcgcccgtcctgtcccaactcgcaatctcctgtgaaggttgaggaaacctgcggttgtaggtggacctgcccatgtgtgtgtaccggctcgtccacgaggcatattgtcacttttgacgggcagaatttcaaacttacgggatcatgttcgtacgtgctttttcagaataaagaacaagatctggaagtgatcctgcacaacggcgcatgtagcccaggtgcacgccagggttgcatgaagtcgatcgaagtgaagcactcggcactgtccgtcgaactccattcggatatggaagttaccgtgaacggaaggttggtttccgtgccttacgtgggtgggaacatggaggtcaacgtctatggagccattatgcacgaagtgagattcaatcatctgggccatatcttcacctttacgccccaaaacaatgaatttcaactgcagctgagcccaaagacttttgcctcaaagacgtacgggctttgcggtatttgcgacgagaatggagccaacgactttatgcttagggatggaactgtgacgactgattggaaaacccttgtgcaggagtggactgtccaaagaccgggtcagacttgtcaacccattctggaggagcaatgtctggtgcctgatagctcgcattgtcaggtccttctgctgccactctttgcagagtgccacaaggtcctggccccagccactttctacgccatctgccagcaagattcctgccatcaggagcaggtgtgcgaggtgatcgcgtcctacgcgcacctgtgcagaactaacggtgtgtgtgtcgattggcgcaccccagatttttgtgcgatgtcgtgtcctcctagccttgtgtacaatcattgcgaacatggttgtccccgccactgcgacgggaacgtgagctcctgcggcgaccacccgagcgaaggatgtttttgccctcccgacaaggtgatgctcgaaggatcgtgcgtgcccgaagaagcatgcactcagtgcataggcgaggacggcgtccaacaccaattcctggaggcatgggtccctgatcatcaaccctgccagatttgtacttgtctgagcggtcgaaaggtgaactgtactacccaaccttgtccaactgctaaagcccctacttgtggcttgtgtgaagtggcgagattgcggcaaaatgcagatcaatgctgtccggagtacgaatgtgtgtgtgatccagtgtcctgcgatttgcctcctgttcctcattgcgagcgaggccttcaacctactctgaccaatcctggggaatgccgtccaaatttcacctgtgcatgtaggaaagaagaatgtaagagagtgtcgcctccatcctgtcctcctcaccgccttcctacccttagaaagacgcagtgctgtgatgaatacgaatgtgcgtgcaactgtgtgaactcgaccgtgtcctgtcccctgggttacctcgcgtctacggccaccaatgattgtggctgcaccactactacttgtctgcccgataaggtctgtgtccacagaagcactatctacccagtgggtcaattttgggaagaggggtgtgatgtgtgtacctgtaccgacatggaagatgcggttatgggactccgggtggcacagtgctcgcaaaagccatgtgaagattcatgccggagcggatttacctacgtgctccatgagggagaatgctgtgggcggtgtctcccctcggcatgtgaagttgtgaccggcagccctagaggcgattcccaaagctcctggaagtctgtgggaagccaatgggcatccccagagaacccttgcctgataaacgaatgtgtgcgtgtcaaagaggaagtgtttatccagcagcgcaatgtctcgtgtccgcagctggaggtgccagtgtgcccgtcaggatttcaactttcttgcaagacctcggcatgttgtccttcctgtcgatgcgagcgaatggaagcctgtatgctgaacggaactgtgattggacccggcaaaaccgtaatgatcgatgtctgtaccacctgtcgttgtatggtgcaggtgggagtgatttccggtttcaagttggagtgtagaaagactacctgtaacccttgcccactcggatataaggaagagaacaacactggtgagtgttgcggccgttgtctccccaccgcctgtaccattcaacttcgcggaggtcaaatcatgactctgaagcgcgacgaaactcttcaggatggttgtgatacgcacttttgcaaggttaatgaacgtggagaatacttctgggaaaagagggttaccgggtgtccgccctttgatgaacacaaatgtctggccgaaggaggtaagatcatgaaaatccccggaacttgctgtgatacctgcgaagaaccagaatgtaatgacatcaccgcccggctccaatacgttaaggtgggctcgtgcaagtccgaagtggaagtggacattcattattgtcaaggcaagtgtgcctctaaagcaatgtactcgatcgacattaacgatgtgcaggaccaatgctcgtgctgttccccaacccggactgagcccatgcaggtcgccctgcattgtaccaatggttcggtcgtctaccacgaggtcctcaatgccatggagtgtaaatgttcgcctcgcaagtgttcgaag

SEQ ID NO: 12523 - DNA, 8439 bp, Artificial Sequence
  derived and/or modified sequence
atgatcccagcccgattcgctggggtgctgctggccctggctttgatccttcccggtaccttgtgcgccgaggggacccgcggtcggagttccaccgcccggtgcagcttgttcgggtctgacttcgtgaataccttcgatggttcgatgtattccttcgctggctactgctcatatctgctcgctggtgggtgtcagaaacgcagcttttccatcataggtgactttcagaatgggaagcgggtgtccctgtctgtgtatctcggagagttctttgatatacatctttttgtgaacggaacggtgacacagggcgatcagcgggtatctatgccttacgcctccaaggggctgtaccttgagaccgaggccggttattacaagttatccggggaggcatacggctttgtggcgaggatcgacgggtcgggaaacttccaagtactgctgagcgatcgctacttcaataagacctgcggcctgtgcgggaacttcaatatctttgcagaggatgactttatgacacaagaagggacactgacatctgacccatacgattttgctaacagctgggcgctcagctccggcgaacagtggtgtgagagggcctcccctccttcttcctcttgtaacatttcgtctggagagatgcaaaagggactgtgggaacagtgccagctactgaagtctacttcggtgttcgcccggtgtcatcccttagttgaccccgaaccttttgtggctttgtgcgagaagaccctttgcgagtgtgctggggggctggaatgcgcctgtcccgcgttactagagtacgcccgaacctgcgcacaggaggggatggtcctctacggctggaccgaccacagtgcctgctctcctgtctgtcccgcgggcatggaatataggcagtgcgtctctccctgtgctcgtacctgtcagtccctgcacattaatgaaatgtgccaggagcggtgtgtagatggctgttcatgcccggaagggcagcttcttgatgaggggttgtgtgtggaaagcaccgagtgcccttgtgtgcattccggtaaacggtatccgccgggaacttctctatcccgggattgcaacacctgcatttgccgtaatagtcaatggatttgttccaatgaagaatgccctggcgaatgcctggttactggacagagtcacttcaagtcatttgataatcgatacttcacatttagcggcatttgccagtatctgctggctcgcgattgtcaggaccacagtttctcaatagtgatcgagacagtgcaatgcgccgatgacagagatgccgtatgcactaggtctgttaccgtgcggcttcctggactccacaactccctggtgaagttgaaacacggcgctggagttgccatggacggtcaggacgtacagctgccactgctcaaaggcgatctgagaattcaacatacagtgactgcctcagtccggttgagttacggagaagacttgcagatggattgggacggacgcggaaggctgttggtaaaattgtcgccagtgtatgccgggaagacgtgtggcctgtgcgggaattacaatggaaatcagggcgatgacttcctgacacctagcggattggcagaaccgagggtggaggatttcggaaacgcttggaaactgcatggcgattgtcaggatctgcagaagcagcacagtgacccctgcgccttaaatccccgcatgaccaggtttagtgaagaagcatgcgccgttctcactagccctacattcgaagcgtgtcaccgtgccgttagtcccctgccttatctgcggaactgtagatatgacgtctgtagctgcagtgatgggcgtgaatgcttgtgtggcgctctcgcctcgtatgccgctgcttgtgccggccggggggtcagggtagcatggagggagcctgggcgctgcgagcttaactgtcctaaaggccaagtgtacctccagtgcggcactccgtgcaatctgacttgccgaagcctatcttatccagacgaggagtgtaatgaagcgtgcctggagggatgtttttgtcctcccggactatacatggatgagagaggagattgtgtgcctaaagcgcaatgcccctgctactatgacggtgaaatttttcagccagaggatatttttagcgaccaccataccatgtgttattgtgaggacggtttcatgcactgcaccatgtcaggcgtacccggcagtctcttgcccgacgctgtgctgtcctcccccctgtcccatagatctaagagatccctgtcctgtcgtccacccatggtgaagctggtatgtccggccgacaatttgagggccgaaggtctggaatgcactaaaacctgccagaactacgacctggaatgcatgtcaatgggttgcgtgtctgggtgtttatgtccccccggcatggtaagacacgagaacagatgtgtggctctcgaacgttgtccttgtttccaccagggcaaggaatacgcccccggcgaaaccgttaagattgggtgcaacacctgcgtgtgccaggatcgcaaatggaactgtacagaccatgtttgcgacgctacttgctctaccatcggaatggcacattacctgacgtttgatggactaaaatacctgtttcctggagagtgccaatatgtgttggtccaggattattgcggcagcaacccagggactttccgaatcctcgtggggaataagggttgctcccacccttcagtgaagtgcaagaaaagagtgacgatcctggttgaaggaggagagattgagttgtttgatggggaggttaacgtgaaaaggcctatgaaagatgaaacacatttcgaggtggtagagtccggcaggtacattatcttgctgttgggaaaggcgctgtccgttgtatgggaccggcatctgtctatcagtgtggtgctgaagcagacttaccaggaaaaggtctgtgggctatgcgggaacttcgacggtatccagaataacgacctgacatcaagcaacttacaggtggaggaggaccccgtggacttcgggaattcctggaaggtctcatcgcaatgtgccgatactcggaaggtgcctctggattcctctccagccacctgccacaacaacatcatgaaacagacaatggttgacagctcgtgtcggattttaaccagcgacgtgttccaggactgtaataagctggtggaccccgagccatatctggacgtatgcatctacgacacctgcagctgtgaatcaattggcgattgcgcatgtttttgcgatactatcgccgcatatgcccatgtatgtgcacagcacggcaaggtggtaacttggcgaacggctacactgtgtccccagtcgtgcgaggagagaaacctgcgcgaaaacggatacgagtgtgaatggcgctataactcttgtgcccccgcctgccaagtgacctgccagcatcccgagcccttggcctgcccagttcaatgtgtggagggctgccatgctcattgccctcctgggaagatcctagatgagctgctgcagacatgcgtagacccagaagactgcccagtctgtgaagtagctggcaggaggttcgcctccggtaaaaaggttactcttaatccctcagatcctgaacattgccaaatctgtcactgtgacgtggtgaatctcacatgcgaggcttgccaagagccaggaggcttggtggtgccgcctaccgatgctccagtctcccctaccaccctgtatgtggaagacatcagcgagcctccactccacgacttctattgcagtcgtttgctggatcttgtcttcttgctagatgggtcctctaggttgtccgaagctgaattcgaggtactcaaggccttcgttgtcgatatgatggaacgcctcagaatatcccagaagtgggtgagagttgccgtagtcgaatatcacgacggatcccatgcctacattggcctgaaggaccggaagaggccttccgaactgcgtagaattgccagccaggtaaagtatgctggcagccaagtggcgagcacatccgaggtcctaaagtacacactgtttcaaatcttttccaagattgatcggcctgaggcctccaggataacgctcctgctcatggcatcgcaggaaccacagaggatgtctcggaacttcgtgcgctatgtgcaagggcttaagaagaagaaagtgattgtcatcccagtcggcattggcccccatgccaacctgaaacagatccgcctcattgaaaaacaggcccccgagaacaaggcttttgtgctgtcctcagtcgacgagttggagcagcaacgggatgagatcgtcagctatctctgcgacctggcacccgaagcaccacctcctacccttccccctgatatggcccaagtgacagtgggtccaggcctgctgggagtgtctacactcggacctaaacgtaattccatggtcttggacgtcgcgtttgtcttggaggggtctgacaagatcggtgaggcagatttcaatcggagtaaggagttcatggaagaagtcatccagcggatggatgtcgggcaggacagtatccatgttacggtgttgcagtacagttatatggtaacagtggaatatcctttttctgaagcccagtccaagggggacatcctgcagagggtgcgagagatcagataccagggcggtaaccgcacaaacaccgggctggccctgcggtatctgtcagatcacagttttttggtatctcaaggagacagagaacaggcccccaatctggtgtatatggtgacaggaaaccccgcctccgacgaaatcaagcgcctccctggggacattcaagtcgtgccgatcggggtgggacccaatgccaatgtgcaagaactcgagagaattggctggcccaatgccccaatcctaatccaagattttgagacattgccccgtgaggcaccggacctggtattgcaacggtgttgcagtggtgaggggctgcagatccctactctgtctcctgcgccagattgtagccagccgcttgatgtgatactgctattggacggcagcagttcctttccagccagctactttgacgagatgaaatccttcgcgaaggccttcatcagcaaggccaacatcggtccccgcctgacacaggtgtccgtcctgcagtacgggagtattactaccatcgatgtaccctggaatgtggtgcctgagaaggctcatctcttgagcctggtggatgtcatgcaaagggaggggggacctagtcagatcggggatgcgctcggattcgcggtacgttatttgacatccgaaatgcatggcgctcgccccggcgccagcaaagccgtggtgattctggtcaccgatgtcagcgtcgactccgtggacgccgctgctgatgcggctcgatcgaatcgggttaccgtgtttccgatcggcatcggagaccgctacgatgctgctcagttgaggatcctcgccgggccagcgggagacagcaatgtagtgaagctgcagcgcatcgaggatttgccgaccatggtgaccttaggcaactccttcctacacaagctgtgctccggtttcgtgcgaatttgtatggatgaagacggcaatgagaagcgcccgggcgacgtgtggaccctcccggatcagtgtcatacagtgacctgtcagcccgacggtcagacattgctgaagtcgcacagggtcaactgcgacaggggcctgagaccatcctgccccaacagccagagccctgtaaaagtcgaggagacttgtgggtgtcgatggacgtgcccctgcgtctgcactggtagtagtaccagacatatcgtcacttttgacggacagaactttaagttgacaggctcttgctcgtacgtgctgtttcaaaacaaagagcaggatctggaagttattctccacaacggagcttgcagccccggagccaggcaagggtgcatgaaatcaatcgaagtgaagcacagtgccctgtcagtggaactgcactccgatatggaagtgaccgtgaacggacggctggtatctgtgccctacgtgggcgggaatatggaggtgaatgtctatggggccatcatgcatgaggtccggttcaatcacttaggccatatctttacctttactcctcaaaataatgagtttcagctccagttgtcccctaaaacctttgccagcaagacctacgggctgtgcgggatctgcgatgaaaatggagccaatgacttcatgctgcgggatggcactgttaccaccgattggaagaccctcgtgcaggaatggacagtgcagcgcccaggccagacttgccaaccaatccttgaagaacaatgtctggtacccgactccagtcactgccaagtgctcttactgccactgttcgcagagtgtcacaaggttttggcacctgcgacattctatgctatatgccaacaggacagctgtcaccaggaacaggtttgtgaggtgattgcaagctacgcgcatttgtgcaggaccaatggagtgtgtgtcgattggcgtactccagacttttgtgcgatgagctgccccccttccctcgtgtacaaccactgcgagcacgggtgcccccgccactgtgacgggaatgtaagtagctgcggcgatcatccatctgagggttgtttttgccctcccgataaggtaatgctcgaagggagctgtgtccctgaggaggcgtgcactcagtgcataggagaagatggagtgcagcatcagttcttggaggcatgggtgccagatcaccagccatgtcagatttgcacatgtctctccggtagaaaggtgaattgcaccactcagccatgtcccaccgccaaagcgcctacttgtggtctctgtgaggtggcccgcctcaggcaaaatgccgaccagtgctgtcctgagtatgagtgtgtgtgtgatcctgtttcgtgtgacctgccgcccgtccctcattgcgaaagagggctgcaacctacactgacaaacccaggggagtgcagacctaattttacctgcgcgtgccgcaaagaagaatgtaagcgtgtatctcctccctcttgccccccgcaccggttacctacactaaggaaaacacaatgctgcgacgagtatgagtgtgcatgtaattgcgttaattcaaccgtgtcctgcccgctggggtatcttgccagcactgcgacaaacgactgcggatgcacgactactacatgcctgcccgacaaggtctgtgtgcaccgctctaccatctaccctgtcgggcaattctgggaggagggctgcgacgtctgcacatgtacggacatggaagacgccgttatgggcctgcgggtcgctcagtgctcccaaaagccctgtgaggattcctgcaggtcaggatttacttacgtcctccacgaaggggagtgttgtggacggtgtctgcctagtgcttgcgaggtggtgacaggtagtccgcgcggcgatagccagagctcttggaagagtgttggaagccagtgggcgtcacctgagaatccatgcctgataaacgaatgtgtgcgcgtgaaggaggaggtgttcatccaacaaaggaatgtcagctgcccccaactggaggtgccagtctgtccctctggttttcagctcagctgcaagacatctgcttgttgtccttcctgccggtgtgagcgcatggaggcatgcatgctgaatggcaccgtgatcggacccggcaagactgtgatgatagacgtgtgcactacttgtcggtgcatggtgcaggttggagtgatcagtgggttcaagctggaatgtaggaagacaacatgtaatccttgccctctgggatacaaggaggagaacaatacaggcgaatgttgtgggaggtgccttcccactgcttgcacgatccagcttaggggtggacagataatgacccttaaacgggacgagacgttacaggacggttgcgatacccacttttgtaaggtaaacgaaaggggcgaatacttctgggaaaagagggtgaccggatgcccacctttcgatgagcataagtgcctcgccgaggggggcaaaattatgaagattccggggacttgctgcgacacatgtgaggaaccggagtgcaacgacataactgctcgacttcagtacgtgaaggtgggatcttgtaaaagcgaagttgaagtcgacatccattattgtcagggaaagtgcgctagtaaggccatgtactccattgacatcaacgacgttcaggaccaatgctcatgctgctcacctacacgtactgagccaatgcaggtcgcactacactgtactaacggatcagtggtctaccatgaggtgctcaacgctatggagtgcaagtgtagcccccgcaagtgcagtaag

SEQ ID NO: 12524 - DNA, 8439 bp, Artificial Sequence
  derived and/or modified sequence
atgattcccgcgcggtttgccggagtattgctggccctggcactgatccttcccggaacactgtgtgctgaaggcaccagggggcggagctccacggcccggtgcagcctgttcggcagcgatttcgtaaataccttcgatggaagtatgtatagctttgcgggttactgttcatacctgctggctgggggctgtcagaagagaagctttagcatcatcggagatttccagaacggaaaacgagtgagtctttccgtgtacctgggcgagttcttcgacatccatctctttgtgaacgggacagtgactcagggcgatcagcgagtttcaatgccttacgcctcaaagggcctctatcttgagacagaagcgggctactataaactcagtggcgaagcatacggctttgtggcccgcatcgatggatcagggaatttccaggtgctgcttagtgaccgctatttcaataaaacctgcggactgtgcggcaatttcaatatcttcgcagaggatgatttcatgacccaggaaggtacgctcacttctgatccctacgactttgctaactcatgggcactgtcctctggcgagcagtggtgtgagagggcatcacccccctcttcctcatgcaacattagtagcggcgagatgcaaaaggggctctgggagcagtgtcaactgctgaaatctacctcagtatttgcaaggtgtcaccccctggtggatccggagccttttgtcgccttgtgtgagaagaccctctgtgagtgcgccggggggctcgaatgtgcctgtcccgccttgctcgagtacgccaggacatgcgcccaggagggtatggttctctacggctggaccgatcactccgcttgttctccggtgtgcccagctgggatggagtaccgacagtgtgtttcaccatgtgctagaacctgccagtccctgcacattaacgagatgtgccaggaaaggtgcgtcgatggatgtagttgccctgaggggcagcttcttgacgagggcctctgtgttgagtctacagagtgcccgtgcgtccattctggcaagagatatccaccaggtacaagcctcagcagagattgtaatacatgtatttgccgcaacagtcagtggatttgctctaatgaggagtgtccgggggagtgccttgtcaccggtcagtctcacttcaaatcatttgacaacagatatttcacatttagtggcatttgccagtaccttctggctagggactgtcaggatcacagcttcagcattgttattgagacagtacagtgcgcagatgacagggatgcagtgtgcacaagatcagtgacggtaagactgcctgggttgcataacagcctggtcaagctgaaacatggtgctggcgtagccatggacggtcaagatgtgcaacttcctctcttgaaaggcgacctccgaatacagcacaccgtgacggcctccgtgaggcttagttacggggaggaccttcagatggattgggacggtagaggcagacttctggtcaagctgtcccccgtgtatgctggcaagacatgtgggctttgtgggaattataacgggaaccagggagacgatttcttgacaccctccgggcttgcagaacctcgagtcgaggacttcggaaatgcttggaaattgcatggtgactgccaggacctgcagaagcaacactcagacccctgtgcactcaatcctcggatgacaagattcagtgaggaagcgtgtgccgtgctgacttcccccacttttgaggcctgtcaccgcgcagtgagccctctgccctacctgaggaattgcaggtacgatgtctgttcctgttcagacggccgggagtgtctttgtggagccctcgccagttacgcggccgcctgtgctggcagaggcgtgagggttgcctggcgcgaacccggtcgctgcgagctcaattgtcctaaaggccaagtgtacctgcagtgcggaacgccctgcaatcttacctgtcgctctctgtcttatccagatgaggaatgcaacgaagcctgcctggaaggttgcttctgtccgcccggtctgtacatggacgaacggggggactgcgtgccaaaggcccagtgtccttgctactatgacggcgagatcttccaaccagaggatatcttcagcgatcatcacaccatgtgctattgcgaagatggtttcatgcactgtaccatgtctggcgttccaggcagcctgctgccagatgccgtgctcagttctcctttgagtcatcgatccaagcgctcactgagctgccggccacctatggtaaaattggtgtgccccgccgataatctgagggctgagggcttggagtgcacaaagacttgccagaattatgatcttgaatgtatgtccatgggttgcgtctcaggatgcttgtgccctcccggcatggtgagacatgagaataggtgcgtggctctcgagcggtgcccttgtttccaccaggggaaagagtacgcccccggcgagactgtgaaaatcggatgtaacacgtgcgtatgccaggatcgcaagtggaactgcactgaccacgtttgtgacgctacttgtagcacgattgggatggcccactacctcacgttcgacggactgaagtatctcttccctggggagtgtcagtatgtgctggtccaggattactgcggctcaaaccccggcactttccgaattcttgtagggaacaaaggctgttcccaccctagcgtgaagtgcaagaagagagtaactattctggtcgaagggggagagatagagctttttgatggcgaggtcaatgtgaaacgacccatgaaggatgagactcacttcgaggtggtagagtccggacgctacatcatccttttgcttggtaaggccttgtctgtggtgtgggacagacacctctccatatctgtggtgctgaagcagacctatcaggagaaggtgtgtgggctgtgcggtaatttcgatggaatccagaacaacgacctcacatcaagcaacctccaggtcgaggaagaccctgtggacttcggcaactcttggaaggttagctcacaatgcgctgatacacgcaaagtcccactggatagcagcccggctacgtgtcacaataatataatgaaacagacaatggtggactctagttgtagaatcctgacatcagatgtattccaagattgtaacaagctcgttgatccggaaccatacttggacgtgtgcatctacgatacatgcagctgcgagtccataggggattgtgcatgtttttgtgatacgatcgccgcttatgcccatgtctgtgcgcagcacgggaaagtcgtcacttggagaaccgccactctgtgcccacaaagctgcgaagaacgcaaccttagggaaaacggatacgaatgcgaatggcgatacaacagttgtgccccagcgtgtcaggtgacttgtcaacatcccgaacctctcgcatgcccagtccagtgcgttgaaggctgccacgctcattgtccgcccggcaagatactcgatgagcttttgcagacgtgcgtggacccagaggattgcccagtatgcgaggtggccggcagacgcttcgcctcaggtaagaaggttaccttgaatcctagtgatcctgagcactgtcagatctgtcactgtgatgtcgtgaatctcacatgcgaggcctgtcaagagcccggcggcttggtggtgcccccgacagatgcccctgtgtcaccaacgaccttgtacgttgaggacatctctgaaccacctcttcacgacttttactgctcccgactgctggatcttgtgtttctgcttgacgggtcctcccgactgtccgaggcagagtttgaggtcctgaaagcattcgtcgtcgacatgatggagagactcaggatctctcagaagtgggtgagagtggctgtggtggaatatcacgacggatcacatgcctacatcgggcttaaggataggaagagaccatccgaacttaggcgaattgctagtcaggtcaaatacgcagggagccaggtcgcgagcactagtgaagtgttgaagtacacattgttccagatattctccaagatcgatcgcccagaagcatccaggataacccttctgcttatggcgagccaggagccccaaaggatgagcagaaattttgtgcggtacgtacagggtcttaagaagaagaaggtaatagtcatccccgtcggtatcggcccacacgcaaaccttaagcaaattcgcctgatcgaaaagcaagcacctgagaacaaggcctttgtgctgagctctgtcgacgaactggagcagcaaagggatgagatagtcagctacctgtgcgacctggctccggaggccccaccacccaccttgcccccagatatggcccaggtgacagtcggccccggactgctgggtgtcagtacactgggcccaaagcgcaattcaatggtcctggatgtagccttcgtcctcgagggaagcgacaagatcggagaagcggactttaaccggtctaaggaatttatggaggaggtaatccagagaatggacgtcgggcaggattcaatccacgtaactgtgctgcagtacagttatatggtaacagtagagtatcccttcagcgaagcgcagtccaaaggggacattttgcaacgggttcgcgagatcaggtaccagggcgggaataggacaaacaccggactggcccttcgctatctgtctgaccactcctttctggtgagccagggagaccgggaacaggcccctaatctggtgtatatggtgacaggaaacccggcctcagatgagattaaaaggctgcctggggatatacaggtggtgccaattggggtggggcccaacgccaatgtgcaggagctcgaacgcatcgggtggccaaacgcccccatactgattcaagactttgaaacactgcctcgagaagcccctgacttggtcctgcagcgctgctgttccggggaaggtttgcagatccccaccctgagccctgcaccggattgcagccagccactggacgttatcctgttgcttgatggtagctcatcatttcccgcctcttacttcgacgaaatgaagtcttttgccaaagcgtttatttcaaaggcaaatattggccccagactcacccaggtgagtgtccttcaatacggcagcattactaccatcgacgtgccttggaatgttgtgccagaaaaagcacatctgcttagtcttgttgacgtgatgcagcgcgaaggtggtccctctcaaattggcgatgccctcgggttcgcggttagatatctgacctccgagatgcacggtgcccggcccggcgcctctaaggcagttgtgatactggtgacggatgtatcagttgacagcgtggacgcggccgcggacgcagccaggagtaatagggtaaccgtttttccaatcgggattggcgacaggtatgatgccgcacagctgaggatactggccgggcccgccggagatagcaacgtcgtcaagctgcaaagaatcgaggaccttccaactatggttacactcggcaacagcttcctgcataagctctgtagtggattcgttcgcatttgcatggacgaggatggaaacgagaagagacccggtgacgtgtggacactccccgatcagtgccacacagtcacctgccagccagacggccagaccctgttgaagtcccaccgagttaactgcgatcgagggctgcggcctagctgtcctaactctcaatcaccggtgaaagtggaggagacttgtggatgtaggtggacttgcccatgcgtgtgcactggctccagcacacgccatatcgtgacattcgacggccagaactttaagctgaccgggagctgttcctacgtgttgttccaaaacaaggaacaggacctggaggtgattctccacaacggcgcttgttccccaggagcccgacagggatgtatgaaatctattgaggtgaagcattctgccctgtctgtggagctgcattctgacatggaggtcacggtgaatgggagactggtgagcgtgccttacgtcggagggaatatggaagtaaacgtgtacggcgccattatgcacgaggtcaggttcaaccacttggggcacattttcaccttcaccccacagaacaatgagttccaactgcagctctctcctaaaaccttcgcctctaaaacgtatggcttgtgtgggatctgtgatgaaaacggcgctaacgatttcatgttgagggatggaacagtcactaccgactggaaaactctggtccaagagtggaccgtgcaaaggcccggccaaacctgccaacctatcctggaggaacagtgtttggtgcccgactcatcacactgccaggtgttgctgctgcctctgttcgctgaatgtcacaaggttctggctccagccactttttacgccatttgccagcaggatagctgccaccaggaacaggtatgtgaggtcattgccagctatgcccacttgtgccgcaccaacggagtgtgtgtggactggcgcacacccgacttttgtgccatgagctgcccaccttctctggtgtataaccactgtgagcacggctgtccaaggcactgcgacgggaacgtgtcaagttgtggtgaccacccttccgaggggtgcttctgccccccagataaggtgatgctcgagggcagttgtgtgccagaggaggcctgcacgcagtgcatcggagaagacggcgttcagcatcagtttcttgaagcatgggtacctgaccatcagccttgtcagatttgcacgtgtctgtccggaaggaaagttaattgcacaactcagccatgtcccacagccaaggcccctacttgtggcctttgtgaagttgcccggctgagacagaacgcagaccagtgctgtccggagtatgagtgtgtttgtgacccagtctcctgtgatctcccaccggttccccattgtgagagagggttgcagccaaccctgactaatccaggagagtgtaggcctaactttacttgcgcatgccgcaaagaggagtgtaaaagagtaagcccgccatcctgtccccctcaccggttgcctacactgcgcaagacgcaatgttgtgacgagtacgaatgtgcttgcaattgcgtaaacagcacagttagctgccctctggggtatctggcttccactgccacaaacgactgcgggtgcacaactacaacctgtttgcctgacaaggtgtgtgtacaccggtctacgatttaccctgttgggcagttctgggaggaaggatgcgatgtctgtacatgtaccgatatggaggacgcagttatggggctgcgggtggcacagtgttctcagaagccatgcgaagattcatgtcggagtggattcacatacgtcctgcacgagggagagtgttgcggccgctgcctccccagtgcttgtgaagtcgtgaccggaagcccccggggcgatagtcaatcttcttggaaaagtgtcggcagccagtgggcctcccctgagaatccttgtctcattaacgagtgcgtgagagtgaaagaggaagtctttattcagcaaagaaacgtgtcctgtccacagctggaagttccagtctgcccttccggcttccagctgagctgcaagacgagtgcctgttgcccttcctgcagatgtgaaagaatggaggcttgtatgctgaatggcacagtcattggacccggaaagacagtgatgatcgacgtgtgtacaacctgcagatgtatggtacaggtcggggtgattagtgggtttaagctcgaatgccgaaagacaacatgtaacccatgtcccctgggatacaaagaggagaataacaccggcgaatgttgcggtcggtgcctcccaacggcctgtaccatccagcttcgcggcggacaaatcatgacgctgaagcgcgacgaaactttgcaggacggctgcgacactcacttctgtaaagtaaacgagcgaggggaatatttctgggaaaagcgggtgactggttgtccccccttcgacgaacataaatgcctggcagagggaggaaagataatgaagattcccggcacatgctgcgacacatgtgaggagccagaatgtaatgacattaccgctcgactgcagtatgttaaggtgggttcttgtaagtcagaggtggaggtcgatatccattactgtcaaggtaaatgtgcgtctaaggctatgtactccatcgacataaacgacgttcaggaccagtgttcctgttgttcaccgacacgaacagagccaatgcaggtggcactccactgcaccaatggatctgtggtctatcatgaggtactgaatgcaatggagtgtaagtgctccccccgcaaatgcagtaaa

SEQ ID NO: 12525 - DNA, 8439 bp, Artificial Sequence
  derived and/or modified sequence
atgataccagctaggtttgccggtgttctcctggctcttgccctgatccttcctggaactctttgtgcggaaggcactcgaggccgttcatcgactgcacgctgttccctctttggctccgactttgtgaacactttcgatgggtcaatgtactcgtttgcgggatactgttcatacctccttgccgggggttgtcaaaagcgttcgttttcgattattggagacttccaaaacggaaaaagagtgtcactctcagtgtacctcggcgagttctttgacatccatctcttcgtgaatggcactgtcacccagggtgaccagcgtgtttcgatgccctatgcgtcgaagggtctttacctggaaaccgaggcaggatactacaagctgtcgggcgaggcgtacgggtttgtggccaggatcgatggatcaggtaatttccaagtgctgctgtcagacagatacttcaataagacttgcgggctttgcggaaactttaacatattcgctgaggatgatttcatgactcaagagggaaccctgacctccgacccctacgactttgccaactcatgggccctgtcctccggtgagcagtggtgcgaaagggccagccccccttcatcctcgtgtaacatttcgtccggggaaatgcagaaaggcctgtgggaacagtgccaactgcttaagagcacctccgttttcgcccgctgccacccactcgtcgatccagaaccgtttgtggcactgtgcgagaaaaccctttgtgagtgcgcgggcggactggagtgtgcctgtccggcgttgctggaatacgcccgcacgtgcgcccaagaaggcatggtgttgtacggatggactgatcactcagcatgctctccggtgtgtcctgcgggcatggaataccgtcagtgcgtgagtccatgtgcccgcacctgtcagtcgttgcacatcaatgaaatgtgtcaggagaggtgcgtcgatggttgctcctgcccagaaggccaactgctggatgaaggactctgcgtggaatcaaccgaatgcccctgcgtgcatagcggtaagcggtatccgcctggcaccagccttagccgcgattgcaacacttgtatctgccgaaactcccagtggatctgttcaaacgaagagtgtccaggtgaatgtcttgtcacgggtcaatcccactttaagagcttcgataaccgctactttacctttagcggtatctgtcagtacctgctcgcacgggattgtcaggatcattcgttttctatcgtgatcgaaactgtgcaatgtgccgacgatagagacgcagtgtgtactaggtcagtcacggtgcgcctgcctggactgcacaatagccttgtgaaacttaaacacggcgcgggagtggcaatggacggacaagatgtgcagctgccacttctgaagggagatctgcggatccaacatactgtcaccgcgtcagtgagactgtcgtacggcgaagatcttcagatggactgggatggtagaggacggcttttggtcaagctctccccagtctacgcaggcaaaacttgtggactttgcggcaactataacggaaaccagggtgacgattttctcaccccctcaggtcttgcagaacctagagtggaggactttgggaacgcatggaagttgcatggtgattgccaggatttgcagaagcagcattcggatccttgtgcactcaaccctcgcatgactagatttagcgaagaagcgtgtgcagtcctgactagcccgaccttcgaggcatgtcacagggcggtgtccccactgccttaccttcgaaattgccgatacgacgtgtgttcctgttccgacggtagagaatgcctgtgtggcgcactggcttcctacgcagccgcctgtgctggacggggcgtgcgggtggcctggcgtgaacctggacggtgtgaacttaattgtcccaaagggcaagtctacctgcaatgcggtactccctgtaacctgacgtgtagatcgttgtcgtaccctgatgaagaatgtaacgaggcctgtcttgaaggttgcttctgccctcctggactgtacatggacgaacggggtgactgtgtcccaaaggcacagtgtccatgttactacgatggagaaatctttcaacccgaggacattttcagtgatcatcacaccatgtgttactgcgaggatggattcatgcactgtaccatgtcgggtgtcccaggatccctcctgcctgatgccgtgctttcaagccctctgtcccatcggagcaagagatccctgagctgtagaccccctatggtgaaactggtgtgtccagcagataatctcagagcggaaggtttggaatgtaccaaaacttgtcaaaactacgatctggagtgcatgtcgatgggctgtgtctcaggatgtctgtgcccgccgggtatggtgcggcacgaaaataggtgcgtggcacttgaacggtgtccatgcttccaccaaggtaaagaatacgcacctggtgaaactgtgaaaattggatgtaacacctgcgtgtgtcaggaccgcaaatggaactgtaccgaccatgtctgtgacgccacctgctccactattggcatggcccactaccttacttttgatggcctcaagtacctgttcccgggtgaatgtcaatacgtcctggtccaagattactgcgggtcgaatcctggaaccttcagaattctcgtgggaaacaaaggttgctcgcatccttccgtgaaatgcaaaaaacgtgtgaccattctcgtggaaggaggggaaatcgaactttttgacggagaagtcaacgtgaagcgcccaatgaaagatgaaacgcatttcgaagtcgtggaaagcggtagatacatcatcctcctgctgggaaaggccctgtccgtcgtgtgggatagacatctgtcgataagcgtcgtcttgaaacagacctatcaagaaaaggtgtgcggcctgtgtggaaactttgacggtattcaaaacaacgacctgacctcgtccaatctccaagtggaggaggaccctgtggacttcgggaacagctggaaagtgagcagccaatgtgcagatactaggaaggtacctcttgactcctcaccggccacttgtcacaacaatatcatgaaacaaaccatggtggattcgtcctgtcgaatccttacgtccgacgtgtttcaagattgtaataagctggttgatccagaaccataccttgacgtgtgtatctacgacacctgttcatgtgaatccattggagactgcgcatgtttttgtgacaccattgcagcttacgcacatgtgtgcgcacagcacggtaaggtcgttacctggcggaccgcgactctttgtccccagtcatgtgaggaacggaatttgagggaaaatgggtacgaatgcgagtggaggtataactcatgtgcccctgcatgccaagtcacgtgtcaacatcctgagcccctcgcgtgtccagtgcaatgtgtcgaaggttgtcatgcacattgtcctccaggcaaaattcttgacgagctccttcagacttgcgtggatccagaggattgcccggtgtgtgaagtggccggtaggagatttgcatccgggaagaaagtgactctgaatccaagcgatcctgagcattgtcaaatttgtcattgtgatgtcgtgaatctgacttgtgaggcttgtcaggaacctggaggtttggtggtgcctcctaccgacgctcctgtctcgccaactactctttacgtggaggacatttccgaacctcccctgcatgatttctattgtagccgtctgcttgaccttgtgtttctccttgatggttcttcgcggctttcggaagctgaatttgaagtgttgaaggcatttgtcgtcgatatgatggaaaggcttcgtatatcgcaaaagtgggtgcgggtagccgtcgtggaataccacgatggatcccatgcttacattggacttaaggaccgaaagcgaccaagcgaactccgacgaattgcatcacaagtgaagtacgcaggttcccaggtggcatctacttctgaagtgctcaaatacactctcttccagattttctcaaagatcgaccgccccgaggcctcgaggattaccttgctcctgatggctagccaggagcctcagcgcatgtccaggaactttgtcagatatgtgcagggactcaagaaaaagaaagtgattgtgattcctgtgggtattggaccccatgcaaacttgaaacagattaggttgatcgagaagcaggccccagaaaacaaggcgtttgtgctgtcgagcgtggatgaactcgagcaacagagggacgaaattgtgtcatacctgtgcgatttggctcccgaggccccaccacctacgctcccacctgatatggcccaagtcaccgtgggccctggtttgctgggagtgtcaaccctgggacccaagagaaatagcatggttcttgatgtcgcatttgttcttgaaggctcggataagattggcgaagcagatttcaacagaagcaaggagtttatggaagaagttatacaacggatggatgtgggacaggattcgatccacgtgactgtgttgcagtactcatacatggtcactgtggaataccctttctcggaggcccaaagcaaaggagacatcttgcaacgcgtgagagaaatccgataccagggaggcaacaggactaatactggactcgctctgcgctatctgtcggatcacagcttcctggtgagccaaggtgatcgggaacaagcaccaaatcttgtgtacatggtgacgggtaaccctgcatctgatgagataaagagactgcctggtgatattcaggtggtgcctattggagtgggtcccaatgcaaacgtgcaagagctggagcgcatcggctggccaaacgccccaatcctgattcaggactttgaaactctcccccgagaggcacctgatctggtgcttcagagatgctgttcgggagagggccttcagattccaactctcagccccgcccccgattgttcacaaccattggatgtgattctgctcctggatggatcatcgtcgtttccagcatcatacttcgacgagatgaaatcatttgccaaagcctttatctccaaggcaaacataggtcctcgccttacccaggtgtcggtgcttcagtatggatcgatcaccaccattgatgtgccatggaacgtcgtgcctgaaaaagctcatcttctgtcgctggtcgatgtgatgcaaagagagggcggaccttcacaaattggagatgcacttggattcgcagtgcggtacctgacgtcggagatgcatggtgcacggccaggggcctccaaggcagtcgtgatcctcgtgaccgatgtctccgtggatagtgtcgacgccgccgcagacgcagctcgctcgaatcgagtgaccgtgttcccaattggaatcggagatcgatacgatgcggcacaactccggatactcgctggacctgcgggagatagcaacgtagtgaagctgcagaggatagaagatcttcctaccatggtgacccttggaaactcctttctgcataagctctgcagcggatttgtgaggatctgtatggatgaagatggcaatgaaaagcgcccaggagatgtttggaccctccccgatcagtgccatactgtcacttgtcaacctgatggacagaccctgctgaaatcccatcgtgtgaactgtgatcggggcctccgacccagctgtcccaattcgcaatcaccggtgaaagtggaggagacttgtggatgtagatggacttgcccgtgcgtgtgcactggctcgtcaacccgtcacatcgtgacttttgacggacaaaactttaagctcactggctcgtgttcctacgtgctctttcagaataaggagcaagacctggaagtgattttgcataacggagcatgttcaccgggcgcgagacaaggttgcatgaagtcgattgaggtgaaacattcagccctgtcggtcgagctccactcagacatggaggtgactgtgaatgggagactggtgtccgtgccgtacgttggaggaaatatggaagtgaacgtgtacggagcaattatgcatgaagtgcggttcaaccacctgggccacattttcacctttaccccccaaaacaacgaatttcagctccagctttcgccaaagacctttgcatcgaaaacttacggactgtgtggtatttgcgatgaaaatggcgcgaacgatttcatgcttcgagatgggactgtcaccaccgattggaaaacgctggtccaagaatggaccgtgcaaaggcccggacagacttgtcagcctattcttgaagagcagtgtcttgtcccagattccagccattgtcaggtgcttcttcttccattgtttgcagaatgccataaggtgcttgcaccagccactttttacgcaatctgccagcaggactcctgtcatcaggaacaagtgtgtgaggtcatcgcttcctatgcacatctttgcagaactaacggagtgtgtgtggattggagaactcctgatttttgtgccatgtcctgcccaccatcacttgtgtacaaccattgtgaacatgggtgtcctcggcactgtgatggcaatgtatcgtcctgtggcgaccacccaagcgaggggtgcttttgccccccagacaaagttatgcttgagggatcttgtgtgccagaggaagcatgtacgcaatgtatcggagaagatggtgtgcagcatcagtttcttgaagcatgggtgccagaccatcaaccctgccaaatttgtacctgcctttcaggtcgaaaggtgaactgtacgactcagccttgtccgaccgcgaaggcccccacttgtggactgtgcgaagtggcccggcttagacagaacgcggaccaatgttgccctgagtacgaatgcgtctgcgaccccgtgtcatgtgacctgccacctgtcccgcattgtgaacgtggtttgcagcctactctgaccaaccctggtgagtgcagacccaatttcacctgtgcatgtcgtaaagaagagtgtaagcgggtgagccctccttcatgtcctccacaccgcctccccaccctcagaaagacccagtgttgcgacgaatacgaatgtgcatgtaattgtgtcaactcgaccgtcagctgcccattggggtacctggcatcgactgcgaccaacgattgcggatgtaccaccaccacttgtctgcctgacaaagtgtgtgttcaccgttcaactatttaccctgtgggacaattttgggaggaagggtgcgatgtctgcacctgtactgacatggaagatgccgtgatgggactccgtgtcgctcagtgtagccaaaaaccatgcgaagattcctgcagatccggattcacttacgtgctgcatgagggggaatgttgtggtcgatgtctcccatccgcatgtgaggtggtgaccggaagcccacgcggagactcacaatcatcgtggaaatcggtcggtagccagtgggcgtcaccagaaaacccttgcctgattaacgaatgcgtccgagtgaaggaggaagtgtttattcaacaaaggaatgtgtcgtgccctcagctcgaagtgccagtctgtcctagcggttttcagctgtcgtgcaaaacttccgcatgctgcccaagctgccggtgtgaacggatggaggcctgcatgctgaatggaaccgtgattggaccaggtaagaccgtcatgattgacgtttgtactacgtgccgctgcatggtgcaagtcggtgtgattagcggtttcaaacttgaatgtcgtaagaccacctgtaacccatgtccgttgggatacaaggaggaaaacaacacgggagagtgctgcggaagatgcttgccaaccgcatgcactatccagctgcgtggcggacaaatcatgaccctcaaaagagacgagactctgcaagacggatgtgacactcacttttgcaaagtgaatgaaagaggagagtatttctgggaaaagcgcgtgactggttgtccgccttttgacgaacacaagtgtttggcagagggcggcaagatcatgaaaatccctgggacttgttgtgacacttgcgaagaacccgaatgtaatgacattactgcacgccttcagtacgtgaaggtcggatcctgtaaatcagaggtcgaggtcgatattcattactgccaaggcaaatgcgcatcaaaggcaatgtactcgattgacattaatgatgtgcaggatcaatgttcgtgttgtagccccaccaggacggaaccaatgcaagtggctcttcactgtaccaatgggagcgtcgtctaccatgaagtccttaacgcaatggagtgtaagtgtagcccaagaaagtgtagcaaa

SEQ ID NO: 12526 - DNA, 8439 bp, Artificial Sequence
  derived and/or modified sequence
atgatcccggccagatttgcaggagtgcttctggccctggccctgattttgcccgggaccctgtgcgctgaggggacccgaggacgctcgtccactgcccggtgctcgctgttcgggtcggacttcgtcaataccttcgatggatccatgtactcgtttgcgggatactgctcctaccttctggcaggcggctgccaaaagcgcagcttctcgatcattggagatttccagaacggcaagcgggtgtcactgagcgtctacctcggggagttctttgatatccacctctttgtcaatggaacggtcacccagggcgaccaacgagtctcgatgccgtacgcttcaaagggcctgtacttggaaaccgaagctggttattacaagttgtcgggggaagcatacggattcgtggcgcgcatcgacggcagcggcaactttcaagtgctcctctcggacagatatttcaacaagacctgcggactgtgtgggaactttaacatctttgcggaggacgactttatgacccaggaaggtaccctgactagcgacccgtatgatttcgcaaatagctgggcgctctcttccggcgaacagtggtgtgaacgcgcctccccaccttcatcgagctgcaatatcagctcgggagagatgcagaagggactgtgggaacagtgccaactgctcaaatctacctcggtgttcgctcgctgccacccactcgtggatccggagccgttcgtcgcactctgtgaaaagaccttgtgcgaatgcgcaggcggactggagtgcgcctgcccagccctgctcgaatacgctcggacctgcgcccaagagggcatggtgctctacggttggactgatcattccgcttgttcaccggtgtgcccggcgggtatggaataccggcaatgcgtttcgccctgcgcgcggacgtgccagagcctgcacataaacgaaatgtgccaggagcgctgcgtcgacggctgttcgtgcccggaaggacagctgctggacgaaggactgtgcgtcgagtccaccgagtgcccgtgtgtacattcaggaaagaggtacccgccgggaacctctctgtccagagattgcaatacctgcatctgtagaaactcccagtggatctgctcaaatgaggagtgccccggtgagtgcctggtgaccggacaaagccactttaagtcgttcgataatagatatttcactttctccggaatctgccagtacctgctggcccgcgactgtcaagaccattccttctcaattgtgatcgaaaccgtgcaatgtgcagacgacagggatgcggtgtgcactcggtcggtcactgtgcggctcccgggcctgcataattcgctggtgaagctgaagcacggcgccggagtggcgatggacggacaggatgtgcagctgccgcttctgaaaggagatctgcggatccaacacaccgtgaccgcaagcgtacgtctctcctacggagaggacttgcagatggattgggacggcagaggaaggctcctggtgaagctctcgccggtctacgccggaaaaacgtgcgggttgtgcggcaactataatgggaaccagggcgacgactttctgaccccatcaggcctggcggagccgcgggtggaggacttcggtaacgcctggaaactgcacggagactgccaggacctccagaagcagcactccgacccgtgcgcgctgaatccacgcatgacgagattctcggaggaggcctgtgcagtccttacctcccctaccttcgaggcttgtcaccgcgctgtttccccgctgccataccttcggaactgccggtacgacgtgtgctcatgttccgatggccgcgaatgcctgtgcggcgctttggcctcctatgctgctgcgtgcgccggccgcggagtgagagttgcgtggcgcgagccaggccgctgcgaacttaattgcccgaaaggacaagtgtacctgcagtgcggaaccccttgtaacctgacctgccgctcattgtcataccccgatgaagaatgcaacgaggcatgcctggaaggttgtttctgccccccggggttgtacatggacgaaagaggagattgcgtccccaaggcccagtgcccatgctactacgacggcgaaatcttccagccagaggacatcttttcagatcatcacactatgtgctactgcgaggacggattcatgcactgtactatgtcgggagtcccgggatcactcctgcccgacgccgtgctgtcgtcaccgctgtcgcataggagcaaacgctccttgtcatgccgcccgccgatggtcaaacttgtgtgtccggcggataacctgagggccgagggccttgaatgcacgaaaacgtgtcagaactacgacttggaatgcatgtccatggggtgtgtgtcaggatgcttgtgcccacctggaatggtccgccatgaaaaccgctgtgtcgctctggagcggtgcccatgcttccaccagggaaaggagtacgcaccgggcgaaaccgtgaagatcggttgcaacacttgtgtctgccaggatagaaagtggaactgtaccgaccacgtgtgcgatgccacctgctcgaccatcgggatggctcattacctgacttttgacgggctgaagtacctgtttccgggggaatgtcagtacgtcctggtgcaggactactgcggatcgaatccaggtacttttagaatcctggtggggaataagggctgctcccatccgagcgtgaagtgcaagaagcgggtcactatcctcgtggaaggcggagagatcgaactcttcgacggtgaagtgaacgtgaaaagaccgatgaaggatgaaacccactttgaggttgtggagtcgggccgctacatcatcctcctgctgggtaaagcactgagcgtggtgtgggaccgacacctgtcgatcagcgtcgtgctcaagcagacttaccaggaaaaggtttgcggattgtgtggaaatttcgacggaattcagaataacgacttgacgagctccaacctccaggtggaggaagatcctgtggacttcgggaattcctggaaagtgtccagccaatgtgccgatacgcgcaaggtgcccctcgactccagtccggcgacctgccataacaacatcatgaagcaaacgatggtggactcgtcgtgcagaatcctgacgtctgacgtgttccaggattgtaacaaactcgttgaccctgagccgtacctggacgtgtgcatctacgacacctgcagctgtgagtcgatcggtgactgcgcgtgcttttgcgacaccatcgcggcctacgcccatgtgtgcgcccagcatggaaaggtggtgacttggcgcaccgcaaccctgtgtccacaatcgtgcgaagagcggaacctgagggagaacggatacgagtgcgagtggaggtacaactcctgcgcaccagcttgtcaggtgacttgccagcaccctgagcccctggcgtgccctgtccaatgcgtcgagggatgccatgcacactgccccccagggaagatcctcgatgaactcctgcagacctgtgtggacccagaggattgccctgtttgtgaagtggctgggcgccggttcgccagtggaaagaaagtgaccctcaacccatccgacccggaacattgtcagatttgccattgtgatgtggtcaacctgacgtgcgaggcgtgccaagagcccggcgggttggtggtcccgccgaccgacgcacccgtgtcgcctaccaccttgtacgtggaagatatctccgaaccgccactccatgacttctactgctcacgcttgctggatcttgtgttcctgctggatgggtccagcaggctttctgaagccgaattcgaagtgctgaaggcattcgtggtggatatgatggaaagactgagaatctcgcagaagtgggtcagggtggcagtggtggagtaccatgatggatcacatgcctacataggactgaaggacaggaaaagaccatcagaactgagaagaatcgcatcacaggtgaaatacgcaggaagccaggtggcttcgacttctgaagtcctgaagtacactctgttccagatcttctcaaagatcgaccggccagaagcgtcgcgaatcactctgctgctgatggcctcgcaggagccacagcgcatgtcgaggaacttcgtccggtacgtgcaaggcctgaaaaagaagaaggtcatcgtcatccctgtgggaatcggaccacacgccaacttgaagcagatccggcttatcgagaagcaggccccagagaataaggcctttgtgctgtcctcggtggatgagttggagcagcagagggacgagatcgtgagctacctgtgcgatctcgcacctgaagcgccaccgcctaccctgccaccagacatggctcaggtgacggttggcccaggactgctgggagtgtcaaccctgggaccgaaacgcaacagcatggtgctggacgtggcattcgtgctcgaggggagcgataagatcggcgaggcagactttaatcgctccaaagaattcatggaagaggtcatccaacggatggatgtcggccaggattcgatccacgtgaccgtgctgcagtactcctacatggtcactgtcgaatacccgttctcagaggctcaatcgaaaggcgacatcctgcagcgggtgcgagagatccgctaccaaggaggaaaccgcactaatactggactcgctctgcgctacctgtcggaccactccttcctcgtttcgcaaggagacagagagcaggcgccgaacctggtgtacatggtgaccggaaaccccgcgagcgacgaaatcaaaagactgcctggggacattcaggttgtgcccatcggggtgggtcccaacgccaacgtgcaggagcttgaacgcatcggatggccgaacgctccaattctcatccaagacttcgagactctgccgcgggaggccccagacctcgtgcttcagaggtgttgctccggtgagggcctccaaataccgaccttgagcccagcccccgactgctcccaacccctcgacgtgatcctgctgcttgatggctcttcgtcctttccggcctcctactttgacgaaatgaaatccttcgcaaaggccttcatctccaaggctaacatcggaccgcgcctcactcaggtgtccgtgctccaatacggatcgatcaccaccatcgacgtcccatggaacgtggtgccagagaaagctcaccttctctcactcgtggacgtgatgcaacgggaggggggaccgtcgcagatcggcgacgctctcggcttcgccgtgcggtacctgacctccgaaatgcatggcgcacgcccgggggcatcaaaggcagtggtcatcctggtgaccgacgtctctgtggattcggtggatgcggcagctgacgcagccagatcaaaccgggttaccgtgttcccgatcggaatcggcgacagatacgatgcggcccagctccgcatcttggccggcccggctggagacagcaacgtggtcaagctccaacggatcgaggatctgccaactatggtgacgctgggaaacagcttccttcacaaactgtgctccggctttgtcagaatctgtatggatgaagatggtaatgaaaagcgcccgggagatgtgtggaccctcccggaccagtgccacacggtcacttgccagccggacggtcaaaccctgctgaaatcacacagggtcaactgcgatcgaggcctgcggccatcctgcccaaactcacagtcaccggtcaaggtcgaagaaacttgtggatgccggtggacgtgtccatgcgtgtgcaccggctcctcaactagacatatcgtgacctttgacggccagaatttcaagctcactggatcctgttcgtacgtcctttttcaaaacaaggagcaagatctggaggtgattttgcacaacggagcctgttcccctggcgcgcggcaagggtgcatgaaaagcatcgaggtcaagcacagcgctctgagcgtcgaactgcacagcgacatggaggtgaccgttaatgggagactcgtgtcagtgccatacgtcgggggaaatatggaggtaaacgtgtatggggcgatcatgcacgaagtgcggtttaatcatctgggacatatcttcactttcactccacagaacaatgagttccagctccaattgtcgcccaagacctttgcctcaaaaacctacggcctctgcggaatctgcgatgaaaacggcgccaacgacttcatgctcagagatggaaccgtaacgaccgattggaaaactcttgtccaggaatggactgtccagcggcctggacagacttgccagcctatcctggaggagcagtgcctggtgccggactcctctcactgccaagtcctcctgctgccgctgtttgcagagtgtcacaaggtcctggcccccgcgaccttttacgccatctgccagcaggattcgtgtcatcaggagcaagtgtgcgaagtcatcgcctcttacgcacatttgtgcagaactaatggagtgtgcgtcgactggcgcactccggacttctgcgctatgtcctgtccgccgtcgctggtctataatcactgcgaacacggctgtcctcgccactgcgacggaaacgtgtcctcatgtggtgaccacccatccgaaggatgtttctgcccgccggataaagtcatgcttgaaggatcctgcgtgccggaggaagcgtgtactcagtgcatcggagaggatggagtgcagcaccagtttcttgaggcgtgggtgcctgatcaccaaccgtgccaaatttgcacctgcctgagcgggaggaaggtgaactgtaccacccaaccgtgcccaacggctaaggccccaacttgtggtctgtgcgaggtggccaggctccgccaaaacgccgaccaatgctgcccggaatatgagtgcgtgtgtgatccagtgtcgtgtgatctcccacctgtgccgcactgcgaacgcggcctccaacccaccctgactaatccgggagagtgcagaccgaactttacctgcgcctgccgaaaagaagaatgtaagcgggtcagcccgccttcgtgccccccgcataggctgccaactttgcgtaagactcaatgctgcgatgaatacgaatgtgcctgcaactgtgtcaacagcaccgtgtcctgtcctctgggatacctggcctccactgcaacgaacgattgcggctgcactactactacctgtctgccagacaaggtttgcgtgcatcggtcaactatctacccggtgggccagttttgggaagaaggatgcgacgtctgcacttgtaccgacatggaggatgcagtcatgggactccgggttgcccagtgttcacagaagccgtgcgaagattcttgcagatcaggattcacgtacgtgctgcatgagggcgaatgctgcggccgctgcctgccatccgcctgcgaggtcgtcactggatccccacggggagattcgcagtccagctggaaaagcgtcggatcccagtgggcgtcccctgagaatccttgcctgattaatgagtgcgtgcgggtgaaagaagaggtgttcattcagcagaggaacgtctcctgcccgcaacttgaagtccctgtctgcccatcaggcttccaactgagctgcaagacttccgcatgctgcccgtcatgccggtgcgagcggatggaagcctgcatgttgaacggaacggtgatcggtcccggcaaaaccgtgatgatcgatgtgtgcaccacttgtagatgcatggtgcaagtgggagtgatctccgggtttaagctcgagtgtagaaagactacttgtaacccatgcccgctgggttacaaggaggagaataacaccggagaatgctgtggacggtgcctgccgaccgcgtgcaccatccagctgcggggtgggcagatcatgacgctgaaacgggatgaaaccctgcaagacggttgcgatactcacttctgtaaggtgaacgagcggggagagtacttctgggagaagagggtaactggttgcccaccattcgatgagcataaatgcctggccgagggagggaagattatgaagattcctggaacctgctgcgacacctgtgaggaacccgagtgcaatgatatcactgcgcgcctccagtacgtcaaagtggggtcctgcaagtccgaagtcgaggtggacatccattattgccaaggaaagtgcgccagcaaagccatgtacagcatcgacatcaatgacgtgcaagatcagtgtagctgttgctcgccgacccggaccgagccgatgcaggtggcattgcattgcaccaacggaagcgtggtgtaccacgaggtcctgaacgccatggaatgcaagtgctcaccgcggaagtgcagcaag

SEQ ID NO: 12527 - DNA, 8439 bp, Artificial Sequence
  derived and/or modified sequence
atgatccctgcccgttttgcaggtgtgctgttagccctggcgttgatcttgcccggaactttgtgtgcggaggggacccgagggagatcctcaacagcgaggtgttcattgtttggttccgactttgtaaataccttcgatgggagcatgtacagctttgcaggatattgcagttacctccttgccgggggatgccagaaacggtccttcagcataattggtgacttccagaacggcaagagagtgagcttaagtgtgtatctgggggagttttttgatattcacctgttcgtcaatgggactgtgacacaaggggatcaacgagttagtatgccttatgcgtcgaagggtctgtatctagagactgaggccggctattacaagctgagcggtgaagcatatggatttgtggctcgtatcgatggctccggcaattttcaggttcttcttagtgaccgatacttcaataagacttgcggcttgtgtggcaactttaacatttttgcagaagacgattttatgacccaggagggcaccctgactagtgatccatacgactttgccaattcttgggcgttgtctagcggcgaacaatggtgcgagcgggcgtcgcccccctccagctcgtgtaacatcagctccggagaaatgcagaagggactgtgggaacagtgccagctgctgaagtccacctccgttttcgcaaggtgtcaccctcttgtggatccagagccgttcgtggccctgtgcgaaaagactctttgtgagtgtgccggtgggctggagtgtgcgtgtcccgctctgctggagtacgcccggacatgcgctcaggagggcatggtgctctacggctggaccgatcatagtgcatgcagcccggtttgccccgccggaatggaataccgccagtgtgtgagtccctgcgctaggacctgccagtctctacatatcaacgaaatgtgtcaggagcgctgcgtggacggttgcagctgcccagagggccagctgctggatgaaggattatgcgtggagtcaaccgaatgcccatgtgtgcatagcggaaagagatacccacccggtaccagcctgtccagggactgtaatacgtgtatatgcaggaattcacaatggatttgctccaacgaagagtgtcccggcgagtgcctcgttaccgggcagagtcactttaagagttttgacaacaggtattttacattctctggcatttgccagtatctgctcgctcgcgactgtcaggaccattctttctctattgtcatcgaaactgtgcagtgtgcagatgaccgagacgcggtctgtaccagatctgtgacagttcgactgcccggcctgcataattctctcgttaagctcaagcacggtgcgggcgtggctatggacggccaggacgtgcaactaccccttttaaaaggcgacctacgcatacaacacacagtgactgcttccgtgaggctctcatatggcgaggacctgcaaatggactgggacggcagggggagactgcttgtaaaactcagtcccgtctatgcggggaaaacatgtggcctgtgcggcaactacaacggaaatcagggcgatgacttcctcacaccctcagggctggcggaacccagagtcgaagatttcgggaatgcatggaaactgcacggcgactgtcaagatctgcaaaagcagcactcagatccatgcgctttgaaccctcgtatgacacgcttttcagaggaggcctgtgcagtgttaacctctcctactttcgaggcatgccatagggcagtgagccccctgccatacttacggaactgcaggtacgacgtgtgttcctgttcggatggaagagagtgtctttgtggcgccctagcctcttatgctgccgcatgtgcaggccggggcgttcgtgttgcctggagggaacctggtcggtgtgagctgaattgccctaaggggcaggtgtatctgcagtgcggcaccccctgtaacttgacttgccgcagcctttcatatccagatgaggaatgcaacgaagcttgtctcgaggggtgtttctgtccccccgggctgtatatggatgaaaggggagattgcgtgccaaaggctcagtgtccttgttactatgacggtgagattttccagcctgaagacatttttagcgaccatcacacgatgtgctattgtgaagacggatttatgcattgtacaatgtcaggggtgcctggcagcctcttgccggacgcagtgctaagcagccccctgtctcatcgtagtaaacgttctcttagctgcaggccacccatggttaaacttgtgtgcccagccgacaatttacgcgcagaaggactggagtgcaccaaaacctgccagaattacgatttggagtgtatgtccatgggctgcgtgtcaggatgcctctgcccacccggcatggtccgtcacgagaacaggtgcgtcgcactcgaaagatgcccctgtttccatcagggcaaagagtacgctccgggggagactgttaagatagggtgtaacacctgtgtgtgtcaggatcgaaaatggaactgcacagatcacgtgtgtgacgccacatgcagcaccataggaatggctcactatctgaccttcgacgggctcaaatacttattcccgggggaatgccagtatgtcctggtccaggactattgtggctctaatccaggaacgttcagaattttggtcgggaacaagggatgttcccatcccagcgtcaaatgcaagaaaagagtgactatacttgtggaggggggcgaaatcgagctgttcgacggagaggtcaatgttaagcggcctatgaaagacgagactcatttcgaagtggtagaaagtggcaggtacattatcctgctacttggcaaggcgctctcagtggtgtgggatcggcatctgagcataagtgtagtgctgaagcaaacttaccaggagaaagtttgtgggctgtgtgggaactttgacggtattcaaaacaatgacctaacgtcttccaacctgcaggtggaagaggatcccgtggattttggcaacagctggaaggttagctcccaatgcgcggacactagaaaagtcccattagattcttcacccgccacctgccataacaatataatgaaacagaccatggtggacagtagctgcagaattctgacgtcggacgtcttccaggactgtaacaaattggtcgatcctgaaccgtatctcgacgtgtgcatttatgatacctgcagttgcgaatccatcggtgattgtgcttgcttctgtgacaccatcgccgcgtacgcccacgtttgtgcgcagcacgggaaggttgttacatggaggactgccactttgtgcccgcagtcgtgcgaggagagaaatttgagggaaaatgggtatgaatgcgagtggcgctacaactcttgcgcccccgcgtgtcaggtgacgtgccagcatcccgagcccctagcctgccctgttcaatgcgtagaaggatgccatgcccattgtccccccgggaagatactggatgagctcctccaaacgtgtgtcgatccggaagactgtccagtttgtgaggtcgctggacggcgctttgcgtcgggcaaaaaagtgacacttaatccgtccgatcccgaacactgccaaatctgtcattgcgatgtcgtcaatttgacatgcgaggcatgccaagaaccaggcggcttagtggtgccccctaccgacgcccccgtaagccctaccacgttgtatgtcgaggacatcagtgagccccctttgcatgatttttactgctcccgtctgctggacctggtctttctgctcgacggttcctctcggctttcggaagctgaattcgaagtacttaaggccttcgtggtggatatgatggaaaggctgagaatatcccaaaagtgggtcagagtggctgtggtggaataccacgacgggtcccacgcatacatcgggcttaaagatcgcaagcggccttccgaattgcgacgcatcgcatcccaggtgaaatacgccgggtcacaggttgcctctactagcgaagtgcttaaatacacactgtttcagatcttttccaaaattgaccggcccgaggcctcacgaatcactcttctcctcatggccagccaggagccacagaggatgtcacggaactttgtacggtatgttcagggcctgaaaaagaaaaaggtaatcgtgataccagtaggaattggcccccacgcaaacctgaagcagattaggctcatcgaaaaacaagcaccggagaacaaggcgtttgtgctttcttcagtggacgagctggagcaacagcgggacgagatcgtttcgtatctctgtgatctggcaccagaagcccccccgcccactctcccccctgacatggcacaggtgaccgtcggtcccggtctgctgggggtttccacgttaggacccaagcgcaactccatggtgctggacgtggcttttgtcctagaaggttccgacaaaatcggagaggcagacttcaatcgcagcaaagaatttatggaggaggtcatacagaggatggacgttgggcaggattccattcatgtgacagtactgcagtatagctatatggtgactgtggaatacccattcagtgaggcccagagtaagggggacattctgcaaagggtgagggaaatccgctaccaaggcgggaatagaacaaataccggcctggctctgaggtacttgtcagaccactcttttctggtaagccagggtgatagagagcaggcacccaatctggtctatatggtgaccggcaatccagccagcgatgaaattaaacgcctgcccggggatatccaggttgtgcccattggggttggaccaaatgccaacgtccaagagttggaaagaatcggctggcctaacgcccccatattgatccaggacttcgagacactgcctagagaagcgcccgatctggtgctccagagatgttgttccggcgagggacttcaaatcccgactctatccccagcgccagactgtagccagcctctggacgtcattctccttctggacgggtcaagctctttcccagcctcctactttgacgaaatgaagagctttgccaaggcctttatatccaaggccaatattggccctcgactgacccaggtgagtgtgctccagtatgggagtataaccacaattgatgtcccatggaatgttgttcctgagaaggcgcacctgctgagtctggtggatgtcatgcagcgcgagggagggccgtctcagataggcgatgcgcttggtttcgccgtgagatatctgacgtcagaaatgcacggtgcccgacccggtgcttccaaagctgtagtgatactggtgacagatgttagcgtggattctgtggatgccgctgcagacgcagctcgatctaatcgggtcactgtgtttccaattggaattggggaccgctatgacgcagcccagcttcgcatcctggctggtccagccggcgattctaacgttgtcaagctgcagaggatcgaagaccttcctactatggtgacccttggcaactcctttctccacaaattgtgcagcggctttgtcagaatttgtatggatgaggacggaaatgagaaaagacccggggatgtgtggactcttcccgaccaatgccacacagtgacttgccaaccagacggacaaactctgctgaagtcccacagagtgaattgtgacaggggactcagaccgagctgtcccaatagtcagtcaccagtcaaagtggaggaaacgtgtggctgtagatggacatgtccctgcgtatgtactggctcttcaaccaggcacattgtgacgttcgacgggcagaacttcaagctcactggctcatgctcctacgtgctgttccagaataaggagcaagatctcgaggttatcctccacaacggcgcctgctcccccggtgctaggcaggggtgcatgaagagtattgaggtcaagcactccgcattgtcagtggagcttcacagcgacatggaggtgactgtgaatgggaggctggtgtcggtgccctatgtcggcgggaatatggaggtgaacgtctatggagccattatgcacgaggtgcggtttaaccaccttggccatatctttacattcactccacagaataacgagtttcagctacagctttcccccaaaaccttcgcatcaaaaacatacggactttgtggcatatgtgatgagaacggcgctaacgactttatgttgagagacggaacagtgactactgattggaaaacactggtacaggagtggaccgtgcaaagacccggtcaaacctgtcagccgatcctagaggaacagtgtcttgtgccagactcctcccattgccaggtgctcctgcttccgctcttcgcagagtgccataaggtgctcgcccctgccacgttctatgccatctgtcagcaggattcgtgccaccaagagcaggtgtgcgaggtaatcgcttcctacgcccacctgtgccgaacaaacggggtgtgtgtagattggcggacccctgacttttgtgctatgtcctgtcctccctctctagtgtataaccattgcgagcacgggtgtccccggcattgtgacggcaacgtgagctcctgcggcgatcatccttccgagggttgtttttgcccgcccgacaaggtgatgctcgaggggagctgtgtccctgaagaagcgtgcacacagtgcataggagaggacggcgttcagcaccagtttcttgaggcttgggtgcctgaccaccagccttgtcaaatatgcacatgccttagcggcagaaaagttaactgcaccacgcagccttgcccaacagctaaggctcccacgtgcgggctgtgcgaggtggcccgtctgcggcagaatgccgaccagtgctgtccggagtacgagtgtgtgtgcgatcccgtgtcttgtgaccttcccccagttccgcactgcgagcggggtctccagccgacactgactaatccgggagagtgcagacctaacttcacatgtgcgtgcagaaaagaggaatgtaaacgcgtcagtccacccagttgcccccctcaccggctgccaaccctcaggaagacccagtgttgcgatgagtacgagtgcgcctgtaactgtgtaaatagcacagtatcctgccctctcgggtacctggcgtccacggccacaaacgattgcgggtgcaccacgactacctgtcttcccgacaaagtatgcgtccatagaagtaccatctaccccgtaggacagttctgggaggaagggtgcgacgtgtgtacttgcactgatatggaagacgccgtcatggggttgagagtggcccagtgcagtcagaagccctgcgaggacagttgtcgaagcgggttcacctatgttttgcacgagggagagtgctgcggcagatgtctgcctagtgcttgcgaagtggtcacggggtccccccgcggcgattctcagtccagttggaaatccgtgggctctcagtgggcatctccagagaatccctgcctgattaacgagtgtgtcagagtcaaagaggaagtcttcattcaacagcgtaacgttagctgcccccagcttgaggtccctgtgtgtccttcaggattccagctctcttgcaaaacctccgcatgctgtccttcttgcagatgcgagcgaatggaggcctgtatgttaaatggcacagtgattggccctgggaagacagtgatgattgacgtatgtacgacatgccgatgtatggtgcaagtcggggtcataagtggattcaaacttgagtgtagaaaaaccacatgtaatccctgtcctctggggtacaaagaagagaacaataccggagagtgctgcggcagatgcctgccaaccgcttgtacaatacagctcaggggaggccagatcatgaccctcaagcgcgacgaaaccttgcaagacgggtgcgatacacatttttgtaaggtgaacgaaagaggcgaatatttttgggagaagcgagtgacagggtgccctccttttgacgaacacaagtgccttgccgaaggtggcaaaattatgaagatacctggtacttgttgcgacacgtgcgaggagcccgaatgcaacgatattacagcgaggctccagtacgtcaaagtcggcagctgtaagtccgaggtcgaggtggatatacactattgtcagggaaagtgcgcttctaaggcaatgtacagcattgatatcaatgacgtgcaggaccagtgtagctgctgctcccccaccagaactgaaccgatgcaggtggccctccactgcactaatggtagcgtggtttaccatgaggttctgaacgcaatggagtgcaaatgcagccctcggaaatgctccaaa

SEQ ID NO: 12528 - DNA, 8439 bp, Artificial Sequence
  derived and/or modified sequence
atgattcctgcaagatttgcaggagtgctgctggccctggccctgattcttcctggtactctgtgtgcggaagggacccgaggacgttcaagcaccgctagatgctcacttttcggttcagattttgtgaacaccttcgatgggtcgatgtacagctttgctggttactgttcttatctgcttgcaggcgggtgtcaaaagcgcagcttttcaattatcggggattttcagaacggcaagagagtgtcactttcggtgtatctgggagaattcttcgatatccacctgttcgtgaatggaactgtcactcagggagatcagcgggtatcgatgccatatgcgtcaaaaggactttaccttgagacggaggccgggtactacaagctgtccggcgaagcgtacgggttcgtggcacgaatcgatgggtcaggaaactttcaagtgcttctttctgacagatactttaacaagacctgcgggttgtgcggaaacttcaatatctttgcagaagatgatttcatgacccaagaggggaccctgactagcgacccatatgatttcgcaaattcgtgggcactctcgtcgggggagcaatggtgtgagcgggctagcccaccatcgtcgtcatgcaacatatcgtcaggcgagatgcagaaaggactgtgggagcaatgtcagctgctcaagtccacctcggtgttcgcacgatgccatcccctcgtcgacccagaaccttttgtggcgctttgcgaaaagaccctctgtgaatgtgcaggaggacttgagtgcgcatgtcctgcacttcttgagtacgcccgcacgtgtgcacaagagggtatggtgctgtacgggtggaccgaccatagcgcatgttcacctgtctgccctgcaggaatggagtaccgacagtgcgtcagcccttgcgccagaacctgccagtcgcttcacattaatgaaatgtgtcaagaaagatgtgtcgacgggtgttcatgtccggaagggcagcttctcgatgaagggctgtgcgtggaatccacggagtgcccgtgtgtccattccgggaagcggtatccacccggaacctctctttcgagagattgtaatacttgtatttgtagaaactcacaatggatctgctcaaatgaagagtgtccaggggaatgtttggtgactggtcaaagccacttcaagagcttcgataatagatactttacgttctcggggatctgccaatatctgctggcacgggattgtcaagatcactccttttcgatagtgattgaaaccgtccaatgtgcagatgatcgagacgctgtgtgtactcggtccgtcaccgtgagactgccaggactgcataatagccttgttaagctgaagcatggagcaggtgtcgcaatggatggtcaagacgttcagctcccactgcttaagggcgatttgagaattcaacataccgtgaccgcctccgtcaggctgtcatacggtgaagatctgcagatggattgggatggacgcggcagactgttggtgaagctctcgcctgtttacgcaggaaagacctgtgggctgtgcggcaattacaacggaaatcaaggagatgattttcttactccttcagggcttgcagaaccacgagtggaggactttggaaatgcctggaaactccatggtgattgccaagaccttcaaaagcagcactcagatccttgtgctcttaatcctaggatgactcggttttcagaggaggcatgtgcagtccttactagcccaactttcgaagcatgccatagagcagtgtcgccccttccttacttgcgaaattgtcgttacgatgtctgttcgtgttccgacggtagagaatgcctttgtggtgcacttgcctcatacgcagcagcctgtgccggtcgcggagtgcgagtggcctggagggagccaggtaggtgtgaacttaattgtccaaaggggcaggtctacctgcagtgtgggaccccatgtaacttgacttgtagatccctttcctatccagatgaggaatgcaacgaagcatgcttggaaggatgtttctgccctcccggactttacatggacgaaaggggagactgcgttccaaaggcccaatgcccttgttactacgacggggaaatctttcaaccagaggatatcttttccgatcatcataccatgtgctactgtgaggatggatttatgcattgtactatgagcggtgtgccgggttctctgctgccagatgccgtgctgtcgtcccctctgtcgcatagatcaaagagatccctgtcgtgccgccctccaatggtgaagctcgtgtgtccagcagataaccttcgtgcagagggccttgaatgtaccaagacctgtcagaattacgatcttgagtgtatgtcgatgggctgtgtgtcaggatgtttgtgtccccctggtatggtgcgccatgaaaatcgatgcgtggcacttgaaagatgcccatgtttccaccaggggaaggaatacgcacctggagagactgtcaaaattggttgcaatacttgtgtctgtcaggatcgtaagtggaactgcaccgaccacgtgtgcgatgcaacctgtagcaccattggaatggcacactacctgacttttgatgggcttaagtacctttttccgggtgagtgtcagtacgtcctggtccaggattactgtggctcgaaccctgggacctttcggatcctggtgggaaataagggttgctcacatcccagcgtgaagtgcaagaagagggtcaccattcttgtggaaggaggtgaaattgaactctttgatggcgaagtgaacgtgaagcgccctatgaaagatgagactcatttcgaggtcgtggaatctggacggtacattattctgttgctgggtaaggcactctcggttgtgtgggatagacacctttcaattagcgtggtgcttaagcaaacttaccaagaaaaggtctgtggactgtgtgggaactttgacggtattcaaaacaacgatttgacttcttccaacctccaggtcgaagaagatccagtcgacttcggtaactcgtggaaagtttcgtcgcaatgtgcggatactaggaaggtgcctttggattcctcaccagcaacctgtcataacaacatcatgaagcaaaccatggtggattcgtcctgtcggattctgacctctgatgtgtttcaagattgcaacaagctcgtggatccagaaccttaccttgacgtctgtatctatgacacttgctcgtgtgagagcataggggattgcgcctgcttctgcgataccattgcagcctacgcccatgtgtgtgcacagcatggcaaggtcgtcacttggaggaccgcaaccctgtgtcctcagtcctgtgaagagcgcaaccttcgggaaaatggctacgagtgtgagtggaggtacaactcctgcgctccagcgtgccaagtcacctgtcaacaccctgaacctcttgcctgtccggtgcagtgtgtggaaggttgccatgcacattgtccacctggaaagattcttgatgaacttctccaaacgtgtgtagaccccgaagattgccctgtctgtgaagtggcgggaagaaggtttgcatccggaaagaaggtgacgctgaatccttccgatccagaacattgtcaaatatgtcactgtgatgtggtgaacctcacttgcgaagcctgtcaagagcccggaggcctggtggtgcctccaaccgacgcgcctgtcagccctacgaccctttacgtggaggatatctcggaacctccactgcatgatttctactgttcccggctcctggaccttgtgttccttcttgacggttcaagcagacttagcgaagcagaattcgaagtgctgaaggcattcgtcgtggatatgatggagcgtctgagaatcagccagaagtgggtcagagtggcagtggtggaataccatgacgggtcccatgcatacatcggcctgaaggaccgcaagcgcccttctgagcttcggagaatagcttcacaggtgaagtacgcaggatcacaggtggcgtcaacctcagaagtgcttaagtacaccctttttcaaatcttcagcaagattgacaggcctgaagcatcaagaatcaccctgctgttgatggcatcgcaagaacctcagagaatgtcacgcaattttgtcaggtacgtgcagggactgaagaagaagaaggtcatcgttatacccgtgggtatcggacctcacgcaaatcttaagcaaataagacttattgagaagcaggcacctgagaacaaggcctttgtgctgtccagcgtggatgagctcgagcagcagcgagacgagattgtgtcctacttgtgtgatctcgcacctgaagcacctcctccgaccctccccccagatatggcgcaagtcactgtggggcctggactgcttggagtctctactctcggtcctaagcgcaattccatggtgcttgacgtggcgtttgtgcttgagggctcagataagatcggggaggcagactttaatcgtagcaaagagtttatggaagaagtgattcagagaatggatgtggggcaggattcgattcatgtgaccgtccttcagtacagctatatggtcaccgtggaataccctttctctgaagcacagagcaaaggcgatatacttcaaagggtccgcgaaattaggtaccaaggtggtaatcggaccaacactgggctcgcactgcgctacctgagcgaccacagctttcttgtctcccaaggagatcgcgaacaggcacctaacttggtctatatggttaccggaaaccctgcttccgacgaaatcaagcgtttgccaggtgacatccaggtggtcccgattggagtgggacctaatgcaaacgtgcaagaattggagcggatcggatggcctaacgcacccatccttatccaagactttgagactcttcctcgcgaagcacctgatctggtgctgcagaggtgttgttccggagaaggcctgcaaattccaaccctctcaccagctcccgactgctcacagccactggacgtcattctgcttctggacggtagctcctcattcccggcgtcctactttgatgaaatgaagtcattcgcaaaagcatttatcagcaaagctaacattggccccagactgactcaagtctcagtgctgcaatacggatccattactactattgatgtgccctggaacgttgtgcccgaaaaggcacatctcctcagcctcgtggatgtgatgcagcgcgaaggaggacccagccagatcggcgatgcacttggatttgcagtcaggtatctgacgtcggaaatgcacggggcacgccccggggcatcgaaagcagtcgtcatccttgtcactgatgtctccgtggacagcgtggatgcagccgcagacgccgcacggtcgaatcgtgtgactgttttcccaattggtatcggagatcgttacgacgccgcgcaactcagaatcttggctggaccagcaggagattccaatgtggtgaaactgcaacgcatcgaagatctgcctactatggtgacccttgggaactccttcctgcacaaactttgttcaggatttgtgagaatatgcatggatgaggacggaaacgagaagcgaccgggcgatgtgtggaccctgcctgatcaatgccatacggtgacttgccagcctgatggtcagactctgctgaagtcgcatcgcgtgaactgcgacagaggtctgaggccaagttgtccgaattcccagtcgccagttaaggtggaggaaacctgtgggtgcagatggacgtgtccatgcgtgtgtaccggttccagcacccgtcatattgtgacctttgacggccaaaacttcaagttgaccggatcttgctcgtacgtgctgtttcagaataaggaacaggacctcgaggtgattctccacaacggtgcttgtagcccaggggccaggcaaggatgcatgaagtcaatcgaagtcaaacattcggcgctgtcagtggagctccattcggatatggaggtgacggtgaacggtcgtcttgtctctgtcccttacgtgggagggaacatggaagtcaacgtctacggagcgatcatgcatgaagtgagattcaaccacctcggtcacattttcaccttcactccacagaataacgagtttcagctgcaactttcccccaaaacgttcgcatcaaaaacctacggcctgtgtggtatctgcgacgaaaacggagcaaacgacttcatgcttagagacggaaccgtgactactgactggaaaaccctggtgcaagagtggactgtgcagcggcccggccaaacctgtcagccaattcttgaagaacaatgcttggttccagattcgtcgcattgtcaagtgctccttctccccctgtttgcagagtgtcacaaggtgctcgcgcctgccactttttacgccatctgtcagcaggattcgtgtcatcaagagcaagtctgcgaggtcattgcttcctacgcccacctgtgccggactaacggcgtgtgcgttgattggcgaaccccagacttctgcgccatgtcgtgtccaccctccctcgtgtacaatcattgtgaacatgggtgtccccgacattgcgatggaaatgtctcctcgtgtggagatcatccgtccgagggatgtttttgtcctcccgataaagtcatgctggaaggaagctgtgttcctgaagaagcatgtacccagtgtataggcgaggatggggtgcaacatcaatttcttgaagcatgggtgccagaccatcagccatgtcaaatttgtacttgtctctccggcaggaaggtgaactgcaccactcaaccttgtccaactgccaaggcaccaacctgtgggctttgcgaggtcgcaagactccgtcagaatgcagatcagtgttgcccggagtacgagtgtgtgtgcgatccagtctcctgcgatctgccacctgtgcctcattgtgagaggggtctgcaacctaccctgaccaaccctggagaatgtcgccctaatttcacctgtgcatgtcggaaggaagaatgtaagagagtctcgcccccttcatgtccccctcacaggcttcctacccttcgaaaaacccaatgttgcgatgaatacgagtgcgcctgcaactgtgttaattcgacggtttcctgtccactgggctacctggcatccaccgctaccaacgactgtgggtgtaccaccactacttgtctgcccgataaggtgtgtgttcatagatcgaccatttaccctgtcggacagttttgggaggagggctgtgatgtctgcacttgcaccgacatggaagatgccgtcatgggccttagagtcgcacaatgttcccagaagccctgtgaagattcatgtcgatcaggatttacctacgtgttgcatgagggtgagtgctgtggacgctgtctgccctcggcctgcgaagtggtcactggaagccctaggggtgattcacagtcctcctggaagagcgtcggttcacaatgggcgagccccgaaaacccgtgtttgattaacgaatgtgtgagagtgaaggaagaggtgtttatccaacagcggaacgtttcatgtccacagcttgaagtgccagtctgtccgagcggatttcaactttcctgtaaaacttcagcatgttgtccgagctgccgttgcgagagaatggaggcgtgtatgctcaacggaactgtcattggccccggaaagactgtgatgatagatgtctgcaccacctgcagatgtatggtgcaagtcggggtgattagcggttttaagctcgagtgtagaaagaccacctgtaatccctgtccgctcggatacaaagaggaaaacaacaccggggagtgttgtggacggtgcctgcctaccgcatgtacgattcaactgcggggtggtcagattatgacgctcaagagggacgaaactctccaagatggttgtgatactcatttttgtaaggtgaacgaaaggggtgagtacttctgggaaaagcgggtgacgggatgtcctccctttgacgaacacaagtgtctcgccgaagggggaaagataatgaagattcccggtacttgctgtgatacttgtgaagaaccggaatgcaatgatattactgcccgcctgcaatacgtgaaggtggggtcctgtaagagcgaggtcgaagtggatatccattactgccaagggaaatgcgcatcaaaggctatgtattcgatcgacattaacgatgtgcaggatcagtgctcctgctgtagccctacccgaactgaaccaatgcaggtggccctgcattgtacgaatggttccgtggtgtaccatgaggtgcttaacgccatggaatgtaaatgttcgcctagaaaatgttccaag

SEQ ID NO: 12529 - DNA, 8439 bp, Artificial Sequence
  derived and/or modified sequence
atgatccccgcccgcttcgcgggcgtcctgctcgcattggctctcattctccccggcacgctgtgcgccgaggggactcgcggtcgttctagcaccgcccgttgctcccttttcggctctgactttgtgaacactttcgacggcagcatgtacagcttcgccggatattgtagttacctcttggccggcggatgccagaaacggtccttctccatcattggggatttccagaacggtaagcgcgtatcgcttagcgtctacctgggcgagtttttcgatatccacttgttcgtgaacggtacagtcacccagggagaccagcgagtctccatgccctacgccagcaagggtctttacctggagaccgaggcgggatactacaagctgtccggagaggcatacggattcgtcgcccggatcgatgggtcgggaaatttccaggtcttgttgagcgatcgttatttcaataagacttgtggcctgtgcggaaatttcaatatctttgctgaggacgacttcatgacacaggaggggaccctgacgagcgacccttacgactttgcaaactcctgggctctctcctctggcgagcagtggtgcgagagggcttctcctcccagctcatcgtgcaatatcagttcgggcgagatgcaaaagggcctgtgggagcagtgccaacttctaaagtcaactagcgttttcgctcgttgccacccgctcgtcgacccggagcccttcgtcgctctgtgtgagaagaccttgtgcgaatgcgccggcggtctggaatgcgcgtgtcctgccctgctcgaatacgcgcggacgtgtgcccaggagggaatggtcctctatggctggacggaccactccgcatgttctcctgtctgccctgcaggtatggagtaccggcaatgtgtgtcgccctgcgcaaggacttgccagagcctgcacattaatgagatgtgtcaggagaggtgtgtggacggttgttcctgcccagagggtcaactacttgacgagggtctgtgcgtcgaaagcacggaatgtccgtgcgtccatagcggcaagagatacccccctgggacgtccctttccagggactgcaacacctgcatctgccgtaactcccagtggatatgttcgaatgaagagtgccccggcgagtgcctggtgaccggtcagtcccattttaagagcttcgataatcgttacttcacattctcggggatctgccagtatttgctcgctcgcgactgtcaggaccactcgttctctatcgtaattgagaccgtccagtgcgctgatgaccgcgatgcagtctgcacacgctccgttaccgtccggctccccggtctgcataacagccttgtcaagctcaagcacggcgcaggtgtcgctatggacggacaagacgttcagctcccgctccttaagggagatctgcgcatccagcacactgtcaccgcctctgtccgcctgtcgtacggtgaggacctgcagatggactgggacggcagaggtagattgctggtgaagctgtctccggtctacgcgggcaagacctgcggtctgtgcggtaactacaatgggaatcagggtgacgacttcctgacccctagcggtttggccgagccgcgtgtggaggatttcggcaacgcttggaagctgcatggcgattgccaggacctccagaagcagcactccgacccctgcgccctgaacccgcgcatgacacgtttctcggaggaggcctgtgcggttctcactagcccgactttcgaggcctgtcaccgtgctgtctcccccttgccttacctccgcaactgccggtatgacgtctgctcttgtagcgatggccgtgaatgcctatgcggcgccctggcctcttacgccgcggcgtgcgccggccgaggcgtccgcgtagcctggagagagcctggacgttgcgagctcaactgtccaaagggtcaggtctacctccagtgcggtaccccctgcaatttgacctgccggagcctgtcttatcctgatgaggagtgcaacgaggcttgcctcgaagggtgcttctgcccgcctggcctctacatggatgagcgtggtgactgcgtcccgaaggcccagtgcccttgctactacgatggcgagattttccagccggaggacatcttctccgatcaccacactatgtgctactgcgaagatggcttcatgcattgcaccatgtccggagttcctggctccctcctccccgacgccgtcctgtcatctcctctgtctcaccggagcaagcggtcgctgagttgtaggccccctatggttaagctcgtgtgcccggccgacaaccttcgggccgagggtctcgagtgcaccaagacctgtcagaactacgacttggagtgcatgtccatggggtgcgtctccggctgcctgtgcccgcctggcatggtccggcatgagaatcggtgtgtagcccttgagcgatgtccgtgcttccaccagggtaaggagtacgccccgggtgaaactgttaagattgggtgtaacacttgcgtatgccaagatcggaagtggaactgtaccgatcacgtatgcgacgccacctgcagcactattggtatggcccactatttgacgtttgatggtcttaaatatttgtttcccggcgaatgccagtacgtgctcgttcaagattactgcggctctaaccctggaacgttccgtattcttgtgggaaacaaaggctgcagtcacccctccgttaagtgcaagaagagggtcaccatcctcgttgagggcggtgaaatcgagcttttcgatggggaggtcaacgttaaaagaccaatgaaagacgaaacgcacttcgaggtcgtcgagtcgggtcgatacatcattcttcttctgggtaaggcgttgtccgtcgtgtgggatcgtcacctgagtattagtgtcgtcctcaagcagacgtaccaggagaaagtctgcggactttgtggaaattttgacggtatccagaacaacgatctaacgtcgtccaacctgcaagttgaggaagaccctgtggacttcggcaactcgtggaaggtgtcgagccagtgcgcagatacccgtaaggtcccgctggattcctctcccgccacctgtcacaacaacatcatgaagcagaccatggtcgattcctcgtgtcgcatcctcacctcagacgtcttccaggactgcaacaagctggtcgatccagagccctacctcgacgtctgcatttacgatacctgttcttgtgagtctatcggtgattgcgcctgcttctgcgacacgattgccgcctacgcccacgtgtgcgcccagcatggtaaggttgttacgtggcgtaccgcaacgctctgtccgcagtcgtgcgaggaaaggaacctgcgagaaaacggctacgagtgtgagtggagatataacagctgcgcccctgcctgccaggtgacttgccagcaccccgagcccctcgcatgtccagtgcagtgcgtcgagggttgccacgcccactgtccgcccggtaagattcttgatgagctgctacagacctgtgtcgacccagaagattgtccggtctgcgaggttgccggacgtcgttttgcttccggcaagaaggtcactctcaacccttccgatcccgagcattgccagatttgccactgcgacgtggtcaatctcacatgtgaggcctgccaggagccgggtggactcgttgtaccgcccacagatgccccggttagccctaccacgctgtacgttgaggatataagcgagccgcccctccatgatttctactgtagccgtctcctggatctggtcttcttgctggatggctcgtcccgcctgagcgaggcggagttcgaggtgctgaaggccttcgttgtagatatgatggagcgtttaaggatctcgcaaaagtgggtccgcgtcgctgtggtcgagtaccacgacggtagccacgcctacattggtctcaaggaccggaagagaccctctgaactgcgccgcattgcgtcccaagtgaagtacgccggttcccaggtggcctcgacgtccgaagtcctgaagtacaccttattccaaatctttagtaagatcgaccgcccagaagcctcgaggattacgcttcttctgatggcttcccaggagcctcagcgtatgtcccgaaacttcgtccggtacgttcagggccttaaaaagaagaaggttattgtgattcccgtaggtattggccctcacgcgaacctgaagcagatccgcttgatcgagaagcaggcgcctgagaataaggcctttgtgctatcttctgtggacgagctagaacagcaaagggacgagatcgtctcgtatctgtgcgacctggcccccgaggctcctcctcccactctgccccccgatatggcccaggtcaccgtgggaccgggtctcctcggcgtctctacgctcggtcctaagcgaaactctatggttctcgatgtggcttttgtcttggaaggtagtgataagataggggaggccgacttcaaccgaagcaaggagttcatggaggaggttatccagcgcatggacgtcggccaggactcaatccatgtcaccgtcctccagtatagctacatggtcacggtggaatatcctttttccgaggcccagtctaagggcgatatcctccagcgtgtgagagaaatccgttaccagggcggtaaccgtaccaacacgggtctggcgctgcgttacctgtctgaccactctttcctggtatcccagggcgaccgggaacaagctcccaacctggtgtatatggtgaccggcaaccccgcctctgatgagatcaagcgtctgcccggcgatattcaagtggttcccatcggggtcggccccaacgcgaacgtccaggagttggagcgcattggttggcctaacgcgcctatcctcatccaggactttgaaaccctaccccgggaggcgcccgacctggtgctccagcggtgctgctccggcgagggtctgcagatccccaccctgagtccagcgcccgactgctcgcagccgctcgatgtcatccttctgctggatggtagcagcagcttccccgcttcctacttcgacgagatgaaaagcttcgccaaggccttcatctctaaggcgaatatcggaccccggttgacacaggtgtccgtgctacagtacggctcgatcactaccattgatgtcccttggaacgtagtgcccgagaaggctcacctgctgagtcttgttgacgtcatgcagcgtgagggaggtccttcccaaatcggcgacgcgctgggcttcgctgtccgctacttgacctcagagatgcacggtgctcgccctggcgccagcaaggccgtcgtcattcttgtaaccgatgtctcggttgactctgtggatgccgctgccgacgcggcccggtccaaccgcgtcactgtgttccccatcggtatcggagatcgttacgatgctgcccagctccgcatcctggccggacccgctggtgactctaacgtcgtgaagctccaacgcatcgaggatctgccgactatggtcacactgggcaacagctttttgcacaagctctgtagcggcttcgtccgcatttgcatggacgaggatggtaacgagaagagaccaggggacgtgtggacgctcccggatcagtgtcataccgtgacgtgtcagcccgacggccagacacttttgaagtcccaccgtgtcaattgtgatcgtggtctgcgcccttcctgtcccaattcgcagtctccagtcaaggtggaagaaacttgcggctgccgatggacctgcccttgcgtctgcactggttcctcgactagacacattgtgaccttcgatggccagaatttcaagctaaccggttcctgttcttatgtcctgttccagaataaagagcaagaccttgaagttatccttcataacggcgcatgcagcccgggcgctcgccagggctgcatgaagagtatcgaagtcaagcacagcgccctcagcgtagagctccactccgacatggaggtgacggtcaatggccggctcgtttctgttccctatgttgggggcaacatggaggtcaatgtttacggcgctatcatgcacgaagtccgtttcaaccatctgggtcatatcttcactttcactccgcagaataacgaattccagctccaactgtcgccaaagacctttgccagcaagacctacggtctctgcggtatctgcgatgagaacggtgccaacgatttcatgttgcgtgatggtactgtcaccacagattggaagacactggtccaggagtggacggtccagcgacctgggcagacctgccagcccatccttgaagaacaatgtttagtacccgactccagtcactgccaggtcctattgctcccattgtttgctgagtgccacaaggtcctggcgcctgccaccttctacgcaatctgtcagcaggatagttgtcaccaggaacaagtctgcgaggtcatcgcttcatacgcccatctctgccgaacaaatggtgtgtgcgtagactggcgcaccccggacttttgcgccatgtcctgcccaccgagcttggtctataaccattgcgagcacggatgcccgagacattgtgacggaaacgtgtcctcttgcggggaccaccccagtgagggttgcttctgcccgcctgacaaggtaatgctcgaggggagctgtgtgcctgaggaagcctgcacccagtgcatcggtgaggacggtgtgcaacaccaatttctcgaggcatgggtccccgaccaccaaccctgtcaaatctgtacttgcctgagcggccgcaaagtcaattgtaccacccagccatgccctaccgcaaaggccccgacttgcggcctttgtgaggtcgcacggcttcgtcagaacgctgatcagtgctgcccggagtatgagtgcgtatgcgatcctgtttcctgtgacctgccccccgtcccacattgcgagcgcgggcttcagcccaccctcaccaaccccggtgagtgccgccccaatttcacttgcgcatgtaggaaagaggaatgcaagcgtgtttcccctccatcctgccccccccacagattacccaccctccggaagactcagtgctgtgacgagtacgagtgtgcctgcaactgcgtcaattccaccgtttcttgcccattgggttacctggctagtaccgctaccaacgactgtggttgtaccaccactacctgcctacccgacaaggtctgcgtgcaccgcagtaccatctaccctgtcggtcaattctgggaagagggttgcgatgtctgcacctgcactgacatggaggacgccgttatgggcctacgcgtcgcacagtgctctcaaaagccttgcgaagacagttgcaggtcgggattcacatacgtgttgcacgagggtgagtgttgcggccgctgcctgccctcggcttgtgaggtcgtcacgggtagccctcgaggtgatagccagtccagttggaaatcggtgggctcccagtgggcctccccagaaaacccctgcctgatcaacgagtgtgtgcgcgtcaaagaggaggtcttcatccaacagcgcaatgtctcctgcccacagctggaggttcccgtctgtccgtccggcttccaattgtcatgcaagacaagcgcttgttgcccttcctgccgttgcgaaaggatggaggcttgcatgctgaacggtactgttatcggtcccggcaagaccgtgatgatcgacgtgtgtactacgtgtaggtgcatggtacaagtgggtgtcatctccgggtttaagttggaatgccgtaagactacctgcaacccctgtcccctggggtacaaggaagaaaataacaccggtgagtgttgcgggcgctgtctgcccaccgcctgcaccatccagctccgaggcggccagatcatgacccttaagcgtgacgagaccctccaggacggctgcgacactcacttctgcaaagtcaacgagcgtggcgagtacttttgggagaagagggtgaccggttgtcccccttttgacgagcacaagtgcctggctgaagggggtaagatcatgaagatccccggcacctgttgcgacacatgtgaagagcccgagtgcaacgacattaccgcccgtctgcagtacgtcaaggtcggatcgtgcaagtcagaagtcgaggtggatattcattactgccagggaaagtgcgccagcaaggccatgtactcgattgacattaacgatgtccaagaccagtgctcgtgctgctcacccactcggacggagccaatgcaggtggcgctccattgcaccaacggctccgttgtctaccacgaggtgcttaacgcaatggagtgcaagtgctcgccccggaagtgcagcaag

SEQ ID NO: 12530 - DNA, 8439 bp, Artificial Sequence
  derived and/or modified sequence
atgattcccgcacgatttgcgggtgtacttcttgccctggcactgattctcccggggacgctttgtgcagaaggaactagaggtcgctcgtcgacggcaagatgtagcctgtttggctcggatttcgtgaacacgtttgatggctcgatgtacagcttcgcaggatactgttcgtaccttctggcaggaggatgtcaaaaaagatcattctcgattattggggatttccaaaatggaaaacgtgtctccctgagtgtgtatcttggagagttttttgacattcaccttttcgtgaacggaaccgtgacgcagggagatcaacgggtgtcaatgccatacgcgtccaagggcctctacttggagactgaagcaggctattacaaactgtcgggggaagcgtacggattcgtcgcacgcatagacggttccgggaattttcaagtgctgctgtcggacagatactttaacaagacttgtggactttgtggtaatttcaacatctttgcggaagatgacttcatgactcaagaaggtactctcaccagcgatccttacgattttgctaactcgtgggcactttcctccggagaacaatggtgtgaacgagcaagccctccatcaagctcatgtaacatatcatcgggagaaatgcaaaagggcctttgggagcagtgtcaacttctgaagagcacttcagtattcgcacgctgtcatcctttggtggacccagagccttttgtcgccctgtgcgaaaagaccctctgtgaatgcgcaggtggtcttgagtgtgcctgtccagcactgcttgaatacgcgagaacgtgtgcacaggaaggaatggtgctgtacggttggaccgaccactccgcctgctccccggtgtgccccgcaggtatggagtacagacaatgcgtctccccatgtgcacgcacctgtcagtctctgcacataaatgaaatgtgtcaagagcgctgtgtcgacggttgttcttgtcctgaaggacagcttctggacgaaggtctttgcgtggaatcgaccgaatgtccttgtgtgcactcaggaaagaggtacccaccgggcacttcgctttccagggactgtaacacctgcatctgtagaaattcccaatggatatgtagtaacgaagaatgtcccggcgagtgccttgtgactgggcaatcgcactttaagagttttgacaaccggtactttacctttagcgggatctgccaataccttctggcccgcgattgccaagaccattcgttttccatcgtgattgaaacggtccagtgtgcagatgatcgcgacgccgtgtgtacgagaagtgtgactgtccgactccccggacttcataattcacttgttaaactgaagcatggggccggagtggccatggatggtcaagatgtccagctccctcttctcaaaggagatctgagaatacagcataccgtcaccgcgtcagtgcggctttcgtacggagaagatcttcagatggattgggacggcagaggtcggcttttggtgaaactttctcccgtgtacgccgggaaaacttgtgggttgtgtggcaactacaacggaaatcagggagatgattttcttacgccttcgggactggcagaaccaagagtggaagattttggtaatgcatggaagctgcatggagattgccaggatctgcaaaagcagcattcagacccgtgtgccctcaacccgcgcatgactagattcagtgaggaagcctgtgcagtccttacctcacctactttcgaggcatgccatagggcagtctccccacttccataccttcgcaattgtaggtacgacgtgtgttcgtgcagcgacggaagggagtgcctttgtggggcacttgcctcgtacgcagccgcctgtgccgggcgaggtgtgcgcgtagcctggagagagccaggcagatgcgagcttaattgtcccaagggacaggtctacctgcaatgcggaacgccttgtaatcttacctgtcgctcgctttcgtacccagacgaggaatgtaacgaagcatgtcttgagggttgtttttgcccacctggactctacatggatgaacgcggcgactgtgtgcccaaggcacagtgtccttgctactacgatggcgaaatctttcagcccgaggacattttcagcgaccatcataccatgtgttactgtgaagatgggtttatgcactgtaccatgtccggagtgccgggtagccttctccctgacgcagtgctgtcatccccgttgtcgcatagaagcaagcgttcgctcagctgtcgtcccccaatggtgaagctggtgtgcccggcggataatcttcgggcagaaggtcttgaatgtaccaaaacctgccaaaactacgacctggaatgtatgagcatggggtgcgtctccggttgcctttgtccccctggcatggtccgtcatgaaaaccgatgtgtggctcttgaacgctgtccatgttttcaccaaggcaaggagtacgcacctggagaaaccgtgaaaattggatgcaatacctgtgtgtgtcaggaccgcaagtggaattgtaccgatcacgtgtgcgacgcgacttgttctactatcggaatggcacattacctcacctttgacgggctcaagtatctgtttccaggtgaatgccagtacgtcctcgtgcaggattactgtggctcgaaccctggaacctttagaattcttgtcggtaacaagggctgttcccatccctcggtcaagtgcaaaaagagagtgaccattctcgtggaaggaggtgaaatcgaactgtttgacggagaagtaaatgtgaagaggcctatgaaggatgaaactcatttcgaggtggtggaatccggacggtacataattctcctcttgggtaaagccctttcagtggtgtgggaccggcacttgtcaatcagcgttgtactcaaacagacctaccaagagaaagtgtgtggtctgtgtggaaactttgatgggatccaaaacaacgacctgacctcaagcaacctgcaagtcgaggaggatcccgtggactttggcaactcgtggaaagtatcgtcccagtgtgccgatactagaaaggtgccacttgatagctcaccagcaacttgccataacaacatcatgaaacaaactatggtggatagcagctgtcgaatcttgacctcagatgtgtttcaagactgtaataagttggtggatcctgagccatatcttgatgtgtgtatctacgatacctgctcttgtgagagcatcggggactgtgcatgcttttgcgataccattgcagcttacgcgcatgtgtgtgcccaacatggcaaagttgtgacgtggaggaccgcaaccctgtgccctcaatcctgtgaggaacgcaaccttagggaaaatggatatgaatgtgaatggagatacaactcgtgtgcacctgcatgtcaagtgacctgtcagcatccagagccactggcctgcccagtccaatgtgtggaaggctgtcacgcacattgtccccccggcaagattctggacgagctgcttcaaacctgcgtggatcctgaagattgccctgtgtgtgaggtcgctggaaggcggtttgcctccggcaagaaggtgaccctcaatccttcagaccctgaacattgtcagatctgtcactgtgatgtggtgaatctgacttgcgaggcttgccaagagcccggcggactcgtcgtcccacctactgatgcaccagtcagcccaacgaccttgtacgttgaggacatttccgagccgcctctgcatgatttctactgctcaagactgctggacctcgtctttctgctcgatgggtcctcgagactgtccgaagcggaatttgaggtgctcaaggcttttgtcgtcgatatgatggagagattgcgtatcagccagaagtgggtccgcgtggccgtggtggaataccacgatggctcccacgcctacattgggctgaaggaccggaagcggccctccgagctccgtcgcatcgcttcgcaggtgaagtacgcgggatcccaagtcgcaagcacttctgaagtgctgaagtacacccttttccagattttcagtaagattgaccgccctgaagcaagccgtattactctgttgctgatggcatcccaagagccacaaaggatgagccgtaatttcgtccgatacgtgcaaggcctgaaaaagaagaaggtgatcgtgattcctgtcggaatagggccgcacgcaaacctgaagcagattcgcctgattgaaaagcaagctcctgaaaacaaggcatttgtgctgtcgtcagtggatgaacttgagcagcagagagatgaaatcgtctcgtatctctgtgatctggcgcctgaggcgcctcctccgacccttccccccgacatggcccaggtcaccgtgggacccggactcctgggggtgtcgactctcggtccgaagagaaactcgatggtcctggatgtggcgtttgtgcttgaaggttccgacaagatcggtgaagcagactttaaccggtcgaaggaattcatggaagaggtgatccagcgaatggacgtcggtcaggattcaattcatgttactgtgctgcagtacagctatatggtgaccgtggaataccccttttcggaagcacagtccaagggcgatattctgcagcgggtgcgcgaaatcagataccaagggggaaatcggaccaatactgggcttgctcttcgctacctttcggatcatagctttcttgtttcccaaggcgatagagagcaagctcccaaccttgtgtatatggttacgggtaaccccgcatcagatgagataaagcgcctgccaggtgatattcaagtcgtgccgattggagtgggacccaacgcaaacgtgcaggaacttgaacgtatcggatggccaaatgcgccgatattgattcaagacttcgaaactcttccaagagaggcaccggacctggtcctgcaacgctgttgtagcggcgaggggctgcaaattcccaccctttctcctgctcccgattgtagccagcctctcgatgtgatcctgctgctcgatggctcatccagctttcccgcaagttactttgatgaaatgaagtccttcgcgaaagcgtttatctctaaagctaacattggtccacggctcactcaggttagtgtcctccaatacggatcgattaccactattgacgtgccttggaacgtggtccctgaaaaggcccacctgctttcgctggtggatgtcatgcaacgggaaggaggtccatcccaaataggtgatgcacttggttttgcagtgcggtacctcacgtcggaaatgcatggtgcgcgaccaggagcctccaaggcagtggtgattctggtcaccgatgtgagcgtggatagcgttgatgccgctgcagatgctgcaagatcgaatagagtcactgtgttcccaataggcattggggataggtacgatgcagcacagctgcggattctggcaggacctgcaggagactccaacgtggtgaaacttcagcgcattgaggatttgcccactatggtgaccctgggaaacagctttctccacaaactgtgcagcgggttcgtgcggatctgtatggatgaggacgggaatgagaaacggcctggtgatgtgtggaccctccctgaccagtgtcatactgtgacctgtcaaccagatggacaaaccctcttgaaatcccaccgtgtcaattgtgatcggggcctcaggccttcctgtcctaactcccaaagccccgtcaaggtcgaagaaacgtgcggatgccgatggacctgtccatgtgtttgtaccggatcatcgactaggcacatcgtgacgttcgacggacaaaacttcaaacttaccggaagctgttcctacgtgctttttcaaaacaaggaacaagatttggaagtgattctgcataatggagcctgctcccccggtgcacggcagggctgcatgaagtccatcgaagtcaaacattcggcacttagcgtggaactccatagcgatatggaggtgaccgtgaatggacgactcgtgtccgtgccttacgttggtggaaatatggaagttaatgtgtacggagcaatcatgcatgaagtgagattcaatcacctgggccatatctttactttcacccctcaaaacaacgaatttcagctgcagctctcacctaagactttcgcaagtaagacctacggactctgtggtatttgtgacgagaatggggcaaatgactttatgctgagagatggaaccgtgactactgactggaaaaccctcgtccaagagtggactgtgcaacgtcccggacagacctgccagcctattctcgaagaacagtgccttgtgccggactcgtcccattgccaggtgctccttctgccattgttcgcagagtgccacaaggtgctcgcccctgccaccttttacgccatttgtcagcaagattcatgtcatcaagaacaagtgtgcgaagtaattgcgtcatacgcgcacctttgtcgtactaacggtgtctgcgtggattggcgaactccagacttctgtgcaatgtcatgtccaccctcactggtctacaaccattgtgagcatgggtgccctagacactgcgatggaaatgtgtcgtcgtgtggtgatcacccttccgaagggtgtttttgtcctccggataaagtgatgctcgaaggttcatgtgtgccagaagaggcatgcactcaatgcattggtgaggatggggtgcagcaccaattcctggaagcctgggtcccagatcaccaaccatgtcaaatttgtacctgcctgtcaggtaggaaggtcaactgcactacgcaaccttgtcctactgcaaaagcacctacctgtggtctttgcgaagtggcaaggctccgacagaacgcagatcaatgttgtcctgaatacgagtgcgtgtgcgaccctgtttcctgtgacctgccaccagtcccacactgtgaaagaggccttcaacctactctgactaacccaggcgagtgcaggcctaacttcacttgcgcctgtcggaaggaagaatgcaaacgtgtctcacctccgtcctgcccacctcatagactgccaaccttgagaaagacccaatgttgtgatgaatatgaatgtgcctgcaactgcgtcaattctactgtctcttgtcccctgggctaccttgccagcaccgctactaacgattgtggttgcactaccactacttgcttgcccgataaggtgtgtgtgcataggtcaactatatacccagtgggacaattttgggaggagggatgtgatgtgtgtacgtgtactgatatggaagatgcagttatgggacttagagtggcgcagtgctcgcaaaagccgtgcgaagattcctgccggtccggtttcacctacgtgctgcatgaaggagagtgttgcgggagatgcctgcctagcgcatgtgaggtggtgaccggttcgcccagaggagattcgcaatcatcctggaaaagtgtgggttcgcaatgggcaagcccggaaaacccatgcctgatcaatgaatgtgtccgtgttaaggaggaagtctttatccagcagaggaacgtgagctgtccacagctggaagttcccgtttgcccgtcgggattccaactgtcctgtaaaacctcggcgtgttgcccttcgtgccgttgtgagcggatggaggcgtgcatgctcaacggaacggtgattggcccaggaaagaccgtcatgattgacgtctgtactacctgcagatgtatggtgcaggtgggtgtgatatcgggatttaagttggaatgtagaaaaaccacttgtaacccatgtcctctggggtacaaggaagagaataacacgggtgaatgttgcggccgctgcctgcctactgcttgtactatccaactgcggggaggccagattatgaccctcaagcgggacgaaaccctgcaggatggttgcgatacccatttttgcaaggtgaacgaaaggggagagtacttctgggagaagagagtgacggggtgtcctccttttgacgagcataagtgccttgccgaaggagggaagatcatgaaaatccctggaacctgctgtgacacttgcgaagaacccgagtgtaacgatattactgcgcgactccaatacgtcaaggtgggctcctgtaagagcgaggtcgaagtagacatccattactgccagggaaagtgcgcttccaaggcaatgtacagcattgatatcaacgacgtgcaggaccagtgctcctgctgtagcccaactcggaccgagcctatgcaggtagcactgcattgtactaacggaagcgttgtctatcacgaagtgctcaacgcaatggagtgtaagtgctcaccaaggaagtgttccaag

SEQ ID NO: 12531 - DNA, 8439 bp, Artificial Sequence
  derived and/or modified sequence
atgatccccgctcgattcgccggggtgctcctggccctggcacttatcttaccagggaccctctgtgccgagggtacgagaggcagaagctcaaccgcacggtgttctctctttggatcggattttgtcaacacttttgatggatccatgtactcgtttgcgggatactgcagctacctgctggccgggggatgccagaaacgctcattttctataataggtgatttccagaatgggaaaagggtatctcttagtgtgtacctgggggagttttttgatattcatctcttcgtcaacgggacagtcactcagggtgatcagcgagtgtcgatgccgtatgcctccaaaggcctctaccttgaaactgaggcgggttactacaagttgtcaggagaggcgtatggcttcgtggccagaatagacgggtccggcaactttcaggtcctcttgagcgaccggtattttaataaaacatgcggactgtgcgggaattttaatattttcgcggaagatgatttcatgacccaggaaggtacactcacctcagacccgtacgatttcgctaacagctgggctctcagcagcggagagcagtggtgtgagagagcatctcccccaagctcaagctgtaatatttccagcggggagatgcagaaaggcctctgggaacagtgtcagctacttaagagtacctcagtgtttgcgaggtgtcatccattagtggacccggaaccattcgttgccctttgtgaaaaaactctttgtgaatgtgcagggggactcgaatgcgcctgcccagccctcctggagtatgcgagaacatgcgcacaggaggggatggtgctgtatggttggactgatcatagtgcttgcagcccagtatgccccgctggaatggaatatcgccagtgcgtttctccctgcgccaggacgtgccagagtctacatatcaacgagatgtgtcaggagagatgtgttgacgggtgctcttgtcccgaagggcagcttcttgatgaggggctgtgcgtagagtccacagagtgtccgtgtgtccactctgggaagaggtacccccccggaactagtctgtctagggactgcaatacctgcatatgtagaaattcacagtggatctgcagtaacgaagagtgcccaggtgaatgccttgtgacaggacagtcccatttcaagagcttcgacaaccgttactttaccttctctggaatttgccaatacctgcttgcccgggattgccaggaccattcattcagtatagtgatcgagactgtgcaatgtgccgatgaccgggatgccgtttgtacacgcagcgtaacagtaaggctcccaggtctgcataactcattggtgaaacttaaacacggcgccggcgtggcaatggacggacaggacgtccaactgccactacttaaaggcgatcttaggatccagcacacagtaactgccagtgtgcgtttgtcttacggcgaggacctccagatggactgggacggcaggggtcggttgttagtgaaacttagcccagtatatgctgggaagacttgtggcctgtgcggaaactataatgggaaccagggcgatgacttcctcacgcctagcggactggccgaaccaagggtcgaagactttggcaacgcttggaagctgcacggagattgccaggatctgcagaagcagcattctgacccttgcgcactgaacccccgcatgacacgtttctccgaggaggcatgtgccgtgctcacctcccccaccttcgaggcctgtcaccgcgccgtgtctccactaccttatctgcgaaactgtcgatatgatgtgtgcagctgcagtgacgggagggaatgtctgtgtggagcgctcgcgagttatgcagcagcttgcgccggcaggggagtccgagtggcctggcgagagcctggacgttgtgagctgaactgtccgaaggggcaggtctacctgcaatgtggaaccccatgcaacttgacatgtcggtcactgtcttaccccgacgaggagtgcaatgaagcctgtctcgagggctgcttctgtccccccggactttacatggatgaacgcggcgactgcgttcctaaggcccaatgtccctgctattacgatggtgagattttccagcctgaagacatattctctgatcaccacacaatgtgttattgcgaggatgggtttatgcactgcaccatgtcgggcgtgcctgggtcactgctccccgacgcggtcctttctagtcccctcagccataggagcaagagaagcctctcatgtaggcctcccatggtcaagcttgtttgtcccgcggacaatctgcgggctgagggactagaatgcacaaagacatgccagaactatgatctcgaatgtatgtctatgggctgcgtttctggatgcctctgtccacccggtatggtgcgacatgagaatcgttgcgtagcattggaacgctgtccctgctttcaccagggcaaggaatacgcccctggtgaaaccgtgaagatcggctgtaacacttgcgtgtgccaagacaggaaatggaattgcacggatcatgtctgcgatgcaacctgttctacgatcggcatggcccactatttgactttcgacgggctgaagtacctttttccaggtgagtgccagtatgtcctcgtccaggattactgtggaagtaaccctggcacgttccgtatcttggtcgggaacaaaggctgctcccacccgtccgtgaaatgcaaaaagagggtgactatcctggtggagggcggcgagatcgagttgttcgacggggaagtcaacgtaaagagacccatgaaggatgagacacattttgaggtggttgagtctggccggtacatcatcttactgttagggaaggcactaagtgtggtgtgggaccgacatctctccatttccgtcgtgctaaagcagacctaccaagagaaagtgtgcgggctttgtggaaactttgacgggatacaaaataatgatcttacaagttctaatctgcaggtggaagaagaccctgtcgactttggcaattcgtggaaggtaagctctcagtgtgccgatacacgcaaggtgccattagactcctcgcctgcaacttgccataataatattatgaagcagaccatggttgattcaagctgtagaatacttacgtccgacgttttccaggattgtaacaagttggtggaccccgagccctaccttgatgtctgtatctacgatacatgttcttgtgaatcaatcggtgactgcgcctgcttctgtgatactatcgcagcatatgcacacgtctgtgcacagcatggtaaggtggtcacgtggagaactgccaccttgtgcccccaatcttgtgaggagcgaaacctgagagagaatgggtatgagtgcgagtggcggtataactcttgcgcacccgcctgccaggtgacatgccagcatccagagcccctcgcatgcccggttcagtgcgtagagggctgtcacgctcattgtccacccgggaagatcctggatgagctgctgcagacctgcgtggacccggaagattgccctgtttgcgaggtggctgggcgtaggtttgcctctggtaagaaggtcacccttaaccccagtgacccagagcactgtcagatctgtcattgcgacgtggtgaatttaacatgcgaagcctgtcaagagcccggcggcctggtggttccgcccactgatgcacctgtatctccaaccaccctatacgtggaggatatcagcgaacctccactgcacgacttctattgctcccggcttttggatctggtgtttctcctggacgggtccagccggttgtccgaggcagagtttgaagttctaaaagccttcgtcgtggatatgatggaacgactgcggataagccaaaagtgggtccgggtggccgttgtggaataccacgatgggagtcacgcttacataggtctcaaagacaggaagagaccatctgagctgaggcgaattgctagccaggtcaagtacgctggctcacaagtggctagcacatccgaggtgctgaagtatacgctcttccagattttttctaaaattgatcgaccggaggcgagccggattacacttctactgatggctagccaagagccccagagaatgtcaagaaactttgtccggtacgttcaggggctgaaaaagaaaaaagttattgtgataccagttgggattggcccccacgcaaatctaaagcaaataaggctcatcgaaaaacaggccccagagaacaaagcgttcgttctgtcatccgtggatgaattggaacagcagcgggatgagatcgttagctacctctgtgatctggccccagaggcaccaccacccacgctcccccctgacatggcccaagtgaccgtgggtcctggcttgctgggggtttcaacactcggacccaagcggaactccatggtcctagacgtggcgttcgtccttgaagggtccgacaaaatcggcgaagccgacttcaacagaagcaaagagtttatggaggaggtaattcagagaatggatgttgggcaggattcaatccacgtgacggtgttacagtattcctacatggtgactgtagaatatccttttagtgaagcccagagtaagggagatattcttcagagggtgcgtgagatccggtaccaaggcgggaacaggacaaatacagggctcgcattaaggtatctgagtgatcattctttcctggtgtcccagggagatagagaacaggcgccaaacttggtgtatatggtcactggtaaccccgctagcgacgaaatcaaacggctcccgggtgatatacaggtggtcccaatcggtgttgggcctaatgctaatgttcaggaattggagagaattggctggccgaacgcccccattctgatacaggatttcgagactttacccagggaggcccccgatttagtccttcagcggtgttgtagcggcgagggactgcagatccctaccctctcgcctgctccagactgctcacagccgttagacgttattctccttttggatggcagtagttcatttcccgctagctattttgatgagatgaaatccttcgctaaagcctttattagcaaggcaaacataggcccccggctgacccaggtaagcgtgttgcagtacggcagcataacaaccatagatgtcccttggaatgtggtccctgaaaaggcgcatctgctatcactggtagacgtgatgcaacgggagggagggccctcacagatcggggacgccctgggatttgcggttcgctacttaaccagcgaaatgcatggagctcggccaggggcgagcaaggctgtagttattcttgtgactgatgtgagcgtggatagcgtggacgccgcggcagacgccgcccgaagcaatcgggtgaccgtgttcccgattggcatcggggaccgctacgacgcagcccagttaaggatcttagcaggcccagcaggtgactcaaacgtcgtaaaattacagcgtatagaagacctgcctacaatggtgacattaggcaattcatttctgcataagctgtgttccggcttcgtgagaatttgcatggatgaagatggcaacgagaaaagacctggagacgtgtggactctgcccgaccagtgccacacagttacttgtcagcctgacggccagactctcctgaagagtcatagagttaattgcgaccgagggctccgccctagttgccccaatagccagagcccagtcaaggtggaggagacttgtggatgcaggtggacctgtccgtgcgtgtgcacaggcagttcaacccgccatatagttaccttcgatggacagaacttcaagctgaccggctcatgctcctacgtactgtttcagaataaagagcaggacctggaggtgattctacataatggggcctgctcgcccggagctaggcaggggtgtatgaagtctatagaagtcaagcactcagcactctccgttgagttacattcggacatggaagttacggtgaatggacggctggtcagtgtgccctatgtgggggggaatatggaggtgaatgtgtacggggccataatgcatgaggtccgtttcaaccacctgggtcatatattcacattcacacctcaaaataatgaatttcagcttcaattatccccaaagaccttcgcctccaagacttacggcctatgcggcatttgtgacgaaaacggtgccaatgactttatgttgagagacggcactgtaacaacggattggaaaacacttgttcaggagtggacggtgcagcgccccggtcagacctgccaaccaatccttgaggagcagtgtttagtgcctgactcatcacactgccaggtgctcctgctccctctgtttgcggagtgtcacaaagtcttggctcccgcaactttctacgctatatgccagcaagattcatgtcaccaggaacaagtgtgcgaggtgatagcatcctatgcccatttgtgcaggacaaacggcgtatgcgtcgactggaggacaccagatttttgtgccatgagttgcccccctagtctcgtttacaaccactgcgagcatggttgcccgagacactgcgatggaaacgtatctagttgcggagaccatccctcagaaggctgtttctgtccgcccgacaaggtaatgctagaggggtcctgcgtgcctgaggaggcctgcacacaatgcattggagaggatggggtgcaacatcagtttctggaggcatgggtccccgatcaccagccctgccaaatctgtacctgtctgagcggtcggaaggtgaactgcacaacacagccttgtcccaccgccaaggcgcctacttgtggtttgtgtgaggtcgctcggctgcgccagaatgcggaccagtgttgtcccgaatacgaatgcgtctgtgatcctgtgtcctgtgatctcccacccgttccacactgcgagcgaggtctgcagccaaccctcaccaaccccggagagtgtcgacccaactttacctgcgcctgtcgtaaagaggaatgtaagagagtgtcccccccatcttgtccccctcacagacttcctactctgcgaaagactcagtgctgcgatgagtatgagtgtgcctgcaattgcgtaaacagcaccgtgagctgcccgctgggatacctggcatcgacagcaaccaatgattgcggctgcacaaccaccacgtgcttacctgacaaagtttgcgttcataggtccactatttaccccgtcggccagttttgggaggaaggatgcgatgtatgcacatgcactgacatggaggacgctgtcatggggctgcgagtggctcagtgctcccagaaaccctgtgaggactcatgccggtctggcttcacttatgtgctccacgaaggcgagtgttgcggtagatgtttgccctctgcttgtgaagtagtgacaggctccccacgaggagatagtcagtcatcatggaagtcggtgggctcccagtgggccagtcccgaaaatccatgcctgatcaatgagtgcgtccgcgtgaaagaggaagttttcatccaacaaagaaatgtatcctgcccccagttagaggtccctgtctgcccatccggatttcagctgagctgcaagacctccgcctgctgcccaagctgccggtgtgagcggatggaggcttgtatgttgaacggtaccgtgatcggacccgggaagactgtcatgattgacgtctgcactacttgccgatgcatggtgcaggtcggagtgatatcaggttttaagcttgaatgccgcaagactacatgcaacccttgtcccctggggtacaaggaggagaacaataccggcgagtgttgtgggcggtgtttgcctaccgcatgtaccattcaactccgtggcgggcaaatcatgaccctgaaaagagacgagaccctgcaagacggatgcgatacccacttttgtaaagtaaacgaacggggggagtacttctgggaaaaaagggttactggctgcccgccctttgatgaacacaaatgcctggcagaagggggaaagatcatgaagatcccaggtacatgctgcgacacctgcgaagagcccgagtgtaacgatattaccgctcgacttcaatatgtgaaggtggggtcctgtaagtctgaggttgaagtggacatccactactgccagggaaagtgtgcatcaaaagctatgtattccattgacattaacgacgtgcaagaccagtgctcttgttgcagtcccacgagaacagaacccatgcaggtggccctccattgtactaacggatccgtcgtctaccacgaggtgctcaacgccatggagtgtaagtgctccccacggaagtgttccaaa

SEQ ID NO: 12532 - DNA, 8439 bp, Artificial Sequence
  derived and/or modified sequence
atgattcctgctcgttttgccggtgttctgctagccctggcactgattttacccggcacactctgtgcagaagggacacgcggcagatcgagcactgcccgatgtagcctgtttggctcagattttgttaacacgtttgacggcagtatgtacagcttcgcaggctattgttcctacctgctggcgggggggtgtcaaaagcgatccttttccatcatcggagactttcagaacggcaaacgcgtcagcctcagcgtttacctgggcgagttcttcgacatccacctattcgttaatggcacggtcacccagggtgatcagcgggtctccatgccatacgcctcgaagggcctgtatcttgagaccgaagccggctattataaactgtccggcgaggcctatgggtttgtcgcacgcattgacggcagtggcaactttcaagtccttctgagcgaccgctatttcaacaaaacctgtggattatgtggtaatttcaacatctttgctgaggatgattttatgacccaggagggtacgctgacctcggatccgtatgatttcgcaaattcctgggctctctcttctggagagcagtggtgcgaaagagccagcccaccatcgagtagttgcaatatttcgtccggagaaatgcagaaaggcctgtgggaacaatgccaactgctgaagagtacatcagtgtttgccagatgtcacccactcgttgacccggaaccttttgtggctctatgtgaaaagacgttatgtgagtgtgccggaggactcgaatgcgcatgccccgctctcctcgaatatgccagaacgtgtgcccaggagggaatggtgttgtatggctggacagaccatagtgcctgctctccggtatgccccgccggcatggaatacaggcagtgcgtgtccccctgcgcacggacatgtcagagcctgcacataaacgaaatgtgtcaggagcgatgcgtggacggctgttcatgtccagaaggacagctcctggacgagggtttgtgtgtcgaatcaaccgaatgcccatgcgtgcattcaggcaagagatatcccccagggacgagtctgtcccgggactgcaacacctgtatttgtagaaactcacagtggatctgcagcaacgaggagtgccctggtgaatgtctggtgaccggtcaaagtcatttcaagtctttcgacaatcggtacttcactttttccggaatttgtcagtatctcctagcccgagactgccaggaccatagcttctctatagtgattgaaacagttcagtgcgcagacgatcgcgatgcggtatgtacgaggagcgtcactgtcagactgcccggcctgcacaactcactagtcaaacttaagcatggggccggcgtcgctatggacggacaggatgtacagctccccctgctgaaaggtgatctgcgcatccagcatacggtgacggcttccgtgaggctctcctatggggaagaccttcagatggactgggacggtcgggggcgactgctcgtgaagctgtcacccgtgtacgcgggaaaaacttgcggactttgtggtaattacaatggcaaccaaggtgacgatttccttaccccctctgggttggctgagcctagggtcgaggatttcgggaatgcctggaaacttcacggcgattgccaggacctgcagaagcagcactctgacccctgtgccctaaatccccgaatgacccgattctcagaagaagcctgtgctgttcttacgagtccaaccttcgaggcgtgccatcgggccgtaagccccctgccatatctgagaaattgccgatatgacgtttgcagctgtagcgacgggagggagtgcctctgcggagccctggcttcctacgctgccgcatgcgctggacgcggggtacgcgttgcttggcgcgagcccggtcggtgtgaattaaactgtcccaaaggtcaggtttacctccagtgtgggacaccgtgtaacctgacgtgtcggagtctcagctatcctgatgaggagtgtaatgaggcctgcctggagggctgcttttgccctccaggcctgtatatggatgagcggggagattgtgtgccaaaagcacaatgcccctgttattacgacggtgagatcttccaaccggaggacatattttccgatcaccacaccatgtgctactgtgaagatggcttcatgcactgcacgatgtcaggcgtgcctgggtccttgttaccagacgccgttctgtcctcccctttgagtcataggtcgaagcggtctctgagttgcaggccaccaatggttaagttagtgtgtcccgcggataacctgagggcagaaggactggagtgcaccaagacgtgtcagaactatgatctagagtgtatgtcaatgggctgtgtgagcggttgtctctgccccccaggcatggtgcggcacgagaataggtgcgtggccctggaacgatgtccctgctttcatcaaggcaaagaatacgctccaggtgaaaccgtaaagataggatgcaatacctgtgtctgtcaagatcgaaagtggaattgcactgatcacgtgtgtgatgcaacatgctccacaatcggcatggctcactatttgaccttcgacggcctgaaatacctgttccctggggagtgtcagtatgtcctggtgcaggactactgcggatccaaccccgggactttccggatcctagtgggtaataagggctgctctcaccccagcgttaagtgcaagaaaagagtcaccattcttgtggaaggcggcgagatcgagctcttcgacggtgaggtcaacgttaaaaggccaatgaaggatgagacccatttcgaagtggtagagagcggccgatatatcatcctcctgctcgggaaggctttgtccgtggtctgggatcgccacttgtctatatccgtggttttaaaacagacttatcaagaaaaagtgtgcggcctatgtggaaatttcgacggtatacagaataacgacctaacatctagtaacctgcaggtcgaagaggatccggtggatttcggcaactcctggaaagtttccagtcagtgtgcagacactcgaaaggtacctctcgatagttctccagcaacatgtcataataatatcatgaaacagaccatggtggatagctcttgcagaattcttacctcagatgtgtttcaggactgtaataagttggtggatccggaaccttacctagatgtgtgtatttacgacacgtgttcctgcgaatctatcggggactgtgcctgcttctgcgacacgatcgccgcatatgcacacgtgtgcgcccagcatgggaaggtcgtgacctggagaacagccacactgtgtcctcagagttgcgaggaaaggaacttacgtgaaaatgggtacgaatgcgaatggcgctacaacagctgcgctccggcatgtcaagtcacctgtcagcaccccgagcccttagcttgccctgtgcagtgcgtcgaagggtgccacgcgcactgccccccaggtaaaatcttggatgagcttctgcagacctgcgtcgaccctgaagactgtccagtctgcgaagtggcggggcgacgcttcgcctccggaaagaaagtcacacttaaccccagcgatccggagcactgccaaatctgccactgcgacgtggtcaacctaacatgcgaagcttgccaagaaccaggcgggttggtggtgcctcccacagatgccccggtatccccaactacgctgtacgtcgaggatatctctgagccaccacttcacgacttttattgcagtaggctgctggatctggtgttcctgctcgatggaagttctcgactctctgaagccgagtttgaggttctgaaagcattcgtggtggacatgatggaaaggctgcggatctcacaaaagtgggtaagggtcgcggtggtcgagtaccatgatggctcccatgcctatatcggcctgaaagacagaaagaggccatcagagctaagacgaatcgccagtcaggtgaagtacgccgggtctcaggtggcttcaacgtccgaggttttaaaatatacactgttccagattttttcaaagatcgatcgaccagaggcttctaggatcacccttctattgatggccagtcaagagccgcaacggatgtccagaaatttcgtccggtatgtgcagggtcttaaaaagaagaaggtgatagtcatcccagtaggcatagggccccacgccaatctcaaacagatcagactaatagagaagcaagccccggagaataaagcctttgtgctgtctagcgtggatgagttggagcaacagcgcgacgaaatagtctcctatctgtgcgaccttgcaccagaagcgccaccccctactctgccgcccgatatggcacaggtaacggtcggtcccggtctgttaggcgtgtccacgcttgggccaaagcgcaatagtatggtgcttgatgtggcgttcgtcctcgagggcagcgataaaattggggaagccgattttaaccggtcaaaggagtttatggaagaagttatacagcgaatggacgtcggccaggactccatacatgtcacagtgctacaatacagttacatggtgaccgtcgagtacccattctccgaggcccaaagcaagggcgacatcctgcagcgggtgagggagatcagatatcagggtggaaatagaacgaatactggactggctctgcggtatctttcagaccattcttttttggtgtcccagggcgatagggaacaagctcccaacctggtttacatggtgacaggcaatcccgcatcggacgaaattaagagattgcctggggatatccaggttgtcccgatcggagtcggaccaaatgctaacgtccaggaactggagaggataggatggccaaacgcccccatcttaattcaggactttgaaactctgccccgggaggctccagaccttgtgctgcagaggtgctgttcgggcgaaggcttgcaaattccaacactctccccagcccccgactgttcccagccattggatgtgatcctgcttctggacgggtcctcttcattccccgcctcctacttcgatgaaatgaagtcatttgcgaaggcctttatctccaaagcaaacataggccctaggttaactcaggtttcagtgctgcaatacggatctatcacaacaatcgacgtgccttggaacgtggtgcccgagaaggctcacttgctaagcctcgtagatgtcatgcagcgggaggggggtccgtctcaaatcggcgatgcccttggcttcgcagtgcgctacctcacctctgaaatgcatggggcccgcccaggagccagcaaagcagtggtgatcctagtcaccgacgtgagcgtcgactccgtagacgcagccgctgatgcggctcgcagcaatcgtgttaccgtgtttcctatcgggatcggagataggtacgacgccgcccagttgagaatcctggccggccccgccggggacagcaatgtggtcaagctgcaacgcatcgaagacctgcccacaatggtaactcttgggaatagctttttgcacaagctatgctccggatttgtgcgtatctgcatggatgaagatgggaacgagaaaaggcctggtgatgtgtggacacttccagaccagtgccatacagtaacctgtcaacctgacggccaaacactgctgaagtcccatcgagtaaactgtgatcggggccttcgaccctcatgtccaaactcacaaagtcctgtgaaagtggaagagacctgcggctgtagatggacatgcccttgtgtgtgcactggcagtagtactcgacacatcgtcacgtttgatgggcagaatttcaagctgactggctcttgcagctacgtgttattccaaaacaaggaacaggacctcgaagtgatactccacaatggagcgtgctcacctggagcccgccaaggctgtatgaagagtatagaggtcaagcacagcgccttgagtgttgagctccattcagatatggaggttacagtgaatggcaggttggtgtcggtcccctacgtggggggcaatatggaggtcaacgtttatggcgccatcatgcatgaggttagatttaaccacctggggcacatcttcacattcaccccgcagaataatgagttccagttgcagctgtctccgaagactttcgccagcaaaacgtatggtctttgtggaatctgcgacgagaacggcgcaaacgacttcatgctgagagacggcacagtgacgaccgattggaaaacgttagtgcaagaatggaccgtccaaaggccgggccagacttgccaacctattctggaggaacagtgtttggttccagattcaagccattgccaggttctccttctcccgcttttcgctgagtgtcacaaggtgttagctccagcgaccttttatgcaatatgtcagcaagactcgtgtcaccaggagcaggtctgtgaagtgattgctagttatgctcacctgtgccgaactaacggagtgtgcgttgattggcggacccctgatttttgtgcaatgtcctgccctccgagcttggtctataaccactgcgagcacggatgcccccggcattgcgacggaaatgtgtcctcgtgcggcgaccacccaagtgaaggatgcttctgcccgcctgataaagtcatgttagaggggtcctgtgtgcctgaagaggcgtgcacccagtgtattggcgaagacggggtgcagcatcagttcttagaggcatgggtgcccgaccaccagccttgtcagatctgtacttgccttagtggaaggaaagtaaattgcacaactcagccgtgcccaacagctaaagcaccgacctgtgggttgtgtgaggtggcccggcttcggcagaacgcagaccagtgctgtcctgagtacgaatgcgtatgtgaccccgtgtcttgcgacctcccccccgttcctcattgtgaaaggggcttgcagccaaccctcactaatccgggcgagtgccggcccaatttcacctgcgcctgtcgcaaagaggaatgtaagagagtttccccgccaagttgcccaccccaccgcttacctacactgaggaaaacccagtgttgcgatgaatacgaatgcgcatgcaactgcgtgaactccaccgttagctgtccgctgggctatctggcatccactgccaccaacgattgcgggtgtacaaccactacgtgcttgcccgacaaagtgtgtgtgcacagatccactatctacccagtgggccagttttgggaggaggggtgcgatgtatgcacctgtacagatatggaagatgctgtgatgggacttagagtcgcccagtgttctcagaagccctgtgaggactcatgtcggagcggatttacctacgtactgcacgagggtgaatgttgtgggagatgtctgcccagcgcttgtgaggtagtcaccggctcacctcggggcgatagccaatccagctggaagtcagttggatcccaatgggcatcacccgagaacccctgcttaattaatgagtgtgtcagggtgaaggaggaggtgtttatccaacaaaggaacgttagctgccctcagctcgaggtcccagtttgccctagtggcttccaactcagctgtaagacgagtgcttgctgtccttcctgtcgttgtgagagaatggaggcatgtatgttgaacggcacagtgatagggccaggcaaaaccgttatgattgacgtctgcacaacatgcaggtgcatggtgcaggtcggggtgataagtggtttcaaattggaatgtcggaagactacctgtaacccttgcccgcttggttataaggaggaaaacaatacaggcgagtgttgtggacggtgtttacctacagcttgcacaatccagctgcgaggtggacaaattatgaccctgaaaagagatgagaccttgcaggatggctgtgacacccacttctgcaaagtcaatgagcgaggggagtatttctgggagaagagggtgactgggtgtccccctttcgacgagcataagtgcctggcagagggcggcaagatcatgaaaatacctgggacctgctgcgacacgtgcgaggaaccagaatgcaacgacataactgcaagactgcagtacgtaaaggtagggtcttgtaagtccgaagtggaggtggatatccattactgtcagggcaagtgtgctagcaaagccatgtattccatagatataaatgatgtacaggaccagtgcagttgctgcagcccaaccaggacagaacctatgcaggttgcactgcactgcacgaacgggtccgtcgtgtaccatgaagtgcttaatgcgatggagtgtaagtgctcaccccgaaaatgttcgaag

SEQ ID NO: 12533 - DNA, 8439 bp, Artificial Sequence
  derived and/or modified sequence
atgatacctgcgcggttcgctggggtgctgcttgcactggcactgatacttccaggcacactttgtgcagaaggaacgcggggtaggtcctctacagctagatgctccctttttggttctgacttcgtaaacacctttgatgggagtatgtactcatttgccgggtactgcagctacctcttggccggtggctgtcagaagcgatcgttctcgatcatcggggatttccaaaacgggaagagggtgtccttgagcgtttatctcggcgagtttttcgatattcacctgtttgtgaatggcactgttacccagggcgaccaacgtgtgtctatgccatacgcatcaaagggtctatatctagagacagaggctggatactataaactgtctggcgaagcctatggattcgtagcccgcattgatgggtctgggaatttccaggtgttgctgtcggatcggtactttaacaagacttgtggcctctgtggtaacttcaatattttcgctgaagacgattttatgacgcaggagggaactcttacatcagacccatacgatttcgccaattcttgggctctttcctcaggcgaacagtggtgcgaaagagcatctcctccctcctccagctgtaatatctccagcggcgagatgcagaagggcttatgggaacagtgccagttactgaagtccaccagcgtctttgccagatgtcatcccttggtggatcccgagcccttcgtagcgctgtgtgagaagacgctttgcgagtgtgccggggggttagagtgcgcttgccccgctctcctggagtatgcacgcacgtgtgctcaggagggcatggtgctgtacgggtggactgatcacagcgcgtgttccccggtgtgccccgctgggatggagtaccgacagtgcgtttcaccgtgtgcaaggacttgtcaatcactccacataaacgaaatgtgtcaggagcgatgcgtcgatggttgttcttgccccgaggggcagctgctcgacgaggggttatgtgtcgaaagcaccgagtgtccttgcgtacacagcggcaaaaggtatccgcccgggacatcactctcacgcgattgtaacacttgcatatgtcggaatagccagtggatctgttctaatgaggagtgtcctggcgaatgtctggttacgggccaatcgcactttaaatctttcgacaacagatatttcactttctccggaatttgccagtatctgctcgccagggactgccaggatcactcattcagcatagtgatcgagactgtgcagtgtgcagatgatagagacgccgtttgtactcggtcggtgaccgtccgccttcccggactacacaactcactcgtcaagctcaagcatggcgcaggggtggccatggacggccaggacgtgcagctccctttgttgaagggagacttaagaatacagcatacagtgactgctagcgtccgactgagttatggtgaagacctgcagatggactgggatgggcgcgggagactcctggttaaactgtctccagtttacgccggaaagacctgcggattatgcggtaattacaatggcaaccaaggggatgactttttgacaccgtcagggctcgccgagccgcgtgtagaggacttcggtaacgcttggaagctccatggcgactgtcaggacttgcagaaacaacactctgatccgtgtgccctaaacccccgtatgaccagatttagcgaagaagcttgcgccgtcctaacatccccaacattcgaagcctgccaccgcgccgtgagccccctcccctacctgagaaactgtcggtacgacgtgtgctcttgtagcgatggccgagagtgcctgtgcggggccctggccagctacgcggctgcttgtgccggaagaggcgttcgtgttgcttggcgcgaacctggacgttgcgagctcaactgccccaagggccaggtgtacctgcaatgcggtacgccgtgtaatctgacctgccgcagcctgtcgtatcctgacgaggagtgtaatgaagcttgcctagagggatgtttctgtcccccgggactttatatggatgaaaggggagactgcgttccgaaggcccaatgtccctgttactacgatggagaaatatttcagcccgaggatatctttagcgatcaccacaccatgtgctactgcgaggatgggtttatgcactgcacaatgtccggcgtacccggaagcctcttacctgatgcagtgttgtcttcgcccctgagccacaggtcaaaaaggagcctctcttgccggccaccaatggtcaagctcgtttgcccagcagacaacttgcgtgctgaaggactagaatgcacaaaaacctgtcaaaactacgatcttgagtgtatgtctatgggctgtgtatctgggtgcctctgtccgcctggcatggttcgtcatgaaaaccgttgcgtggcactggagaggtgtccatgctttcaccagggcaaggagtatgctcctggagagacggtgaagattggatgtaacacctgcgtttgtcaggacaggaagtggaactgtactgatcacgtctgtgacgccacttgttccactatcgggatggcacactacctgacttttgatggactgaagtatctgttcccaggggaatgccaatacgtcctggttcaggattattgtgggtcaaatcctggtacgtttagaatactggttggcaacaaagggtgctcgcacccttccgtgaaatgcaagaaacgcgttaccattttggtcgagggcggggagattgagctctttgacggcgaagtgaatgtaaagcggcctatgaaggatgagactcacttcgaagtggtggaatctgggcgctatataatcctcctgctggggaaggccctgagtgttgtctgggatagacacctgagtatttccgtggtactgaaacagacctaccaggagaaggtgtgcggtctttgcgggaactttgatggaattcagaacaatgatctgaccagctcaaacctccaggtcgaagaagatcccgtggacttcggaaatagctggaaggtctcaagccagtgtgccgacacgaggaaggtgcctctggactcaagtccagctacttgccataataatattatgaagcagaccatggtcgactcctcttgcagaatccttactagtgacgtgttccaggattgtaataagcttgtggatccggagccttatttagacgtctgtatttacgacacctgtagctgtgaatctattggggactgcgcctgtttctgtgacacaattgccgcatacgctcacgtatgcgcccaacatggcaaggtggtgacttggcgaactgcgaccctgtgtccacaatcctgcgaggagcggaatttacgcgaaaacggctacgagtgtgagtggagatataattcttgtgccccagcatgccaagtgacctgccagcatcctgaaccactagcctgccctgtgcagtgcgtcgaaggatgtcacgctcattgtccccccggaaagatcttggacgagctgttgcagacctgcgttgatcccgaggactgtcctgtgtgtgaggtggcagggcgaagattcgcctctggaaagaaagtgaccctaaacccttcagatccagaacattgtcagatctgtcactgcgatgtggtgaatctgacatgcgaggcctgccaggagcccgggggcctcgtagtgccacctacggacgccccagtctcgccaacaaccctgtacgtggaggatatcagtgaacctcctctgcacgatttctattgtagccgtctgttggatctggtctttctcctggatgggtctagcagacttagcgaggctgagtttgaagtgttgaaagctttcgttgtggacatgatggagcggctgcgcatttcgcaaaaatgggttcgggtggccgtagtggaataccatgatggcagtcatgcatatattggccttaaagaccgaaagaggccctcggaactgcggcgtattgcctctcaggttaaatatgctggttctcaggtggcttctacttccgaggtgctgaagtacacccttttccaaatctttagcaagattgacagaccagaggcgtccagaatcacactgctgctgatggctagccaggaacctcagaggatgagcaggaatttcgttcggtacgtccaggggttgaaaaagaaaaaagtgatagtgatcccagtcggaattgggccacatgcgaacttaaagcagattcgtctgatcgaaaagcaggctccagaaaataaagcttttgttctctcatcagtcgacgaactggaacagcaaagggatgagatcgtgtcctacctgtgcgacctggcgcctgaggcacctcccccaacattgcccccggacatggcccaggttactgttggtcctggcctccttggtgtaagtacattaggtcccaagagaaattccatggtgctggatgtggcctttgtgttggaaggcagtgataagatcggcgaggcggactttaaccggtccaaagagttcatggaagaggtgatccaaaggatggacgtcgggcaggactccatccacgtgaccgttttgcagtatagttatatggtgacagtggaatatccatttagtgaggcacagagtaaaggtgatatcttacagcgcgtgcgggagattcgctatcagggaggaaatagaacaaatactggtctggccttaagatacctcagcgatcactcattcttagtgagtcagggcgacagggagcaggcccccaaccttgtatacatggtgaccggtaatccggcttcggatgagataaaacgactccccggtgacatccaagttgtaccgataggcgtgggacccaatgcaaacgttcaggagctggaaagaatcgggtggccaaatgcccccatcctgatccaagattttgaaaccctaccgagagaggctccagatctggtactgcagcggtgctgtagtggagaaggcctccagattcctactctaagtcccgcccccgattgttcacaacctctggatgtcattcttctgctcgatggatcatcctcctttcctgcctcttacttcgatgaaatgaaatccttcgccaaggcatttatttccaaggctaatatcgggcctcgtttgacccaggtgtcagtgttgcagtatgggtcaattacgactattgacgtcccttggaacgtggtgcccgaaaaggcacatttattgtccctggtagatgtgatgcagcgcgagggtggaccatcccagatcggagatgcactcggctttgctgttaggtacctgacaagcgaaatgcatggtgcccggcctggtgcatccaaagcagtagtgatcttggttacggacgtatcagtggactccgtagacgcagccgctgacgctgcgcgttctaacagagtgacggtattccctattggaattggagacaggtacgatgcagcacagctgagaatcctggctggaccggccggcgactccaatgtggttaaactccagcgcatcgaggacttgcccacgatggttacattggggaactcgttcctccacaaactgtgcagcggctttgtgcgcatttgtatggatgaggacggcaatgaaaaacgccccggagacgtgtggaccttgcccgaccaatgccacaccgttacttgtcagccagacggccaaactctgctcaaaagccaccgggtcaattgtgacagaggccttcgtccatcttgtcctaattcacaatcaccagtaaaggtggaggaaacttgcggatgtcgatggacctgtccatgcgtctgcaccggcagctctacgcggcatatcgtgaccttcgatggccagaactttaagctgactggtagctgcagctatgtactcttccaaaacaaggaacaggacctggaggtaatcctccataacggtgcgtgcagcccaggcgcccggcagggatgcatgaaaagcatcgaggttaaacattcagctctgtccgtggaactgcactccgacatggaggttaccgtcaacgggaggctggttagcgtgccatatgttggcggcaatatggaagtgaacgtgtacggggccattatgcatgaagtccgctttaatcacctaggccacatttttacattcaccccgcagaataacgagtttcagctgcaactgtcacctaaaacctttgcgagtaaaacatacggcctttgcggcatctgcgacgaaaatggagctaatgattttatgctcagggacggcacagtaaccacagattggaagacactggtccaggagtggactgtacagcgacctggccagacttgccagcccatcctggaagaacagtgtttagtgccagactccagccactgccaggtactactcctgcctttgttcgcagagtgtcataaggttctagccccggcgactttctacgctatatgtcagcaggacagctgccatcaggaacaggtctgcgaggttattgcctcttacgcgcacctgtgcagaaccaacggcgtgtgcgtggattggaggactccagatttttgcgctatgtcgtgccccccctccctggtatataaccattgcgagcacgggtgcccgcgacactgtgatggcaacgtgagttcctgcggcgaccacccttcggaaggctgcttctgtcccccagacaaagtgatgcttgagggtagctgtgtgcctgaggaggcatgcacacagtgtataggggaagacggggtgcagcaccaatttctggaagcctgggtgcccgaccaccagccctgccaaatttgcacatgcctgagtggccgcaaagtgaactgtaccactcaaccatgcccaactgccaaagcccctacctgcggactctgtgaggtggctcgcctccggcagaatgcggaccaatgttgtcctgaatacgagtgtgtctgcgatcctgtcagttgtgatctacctcccgtacctcactgtgagcgcgggctgcagcctactctgactaacccaggggaatgccggcctaacttcacctgtgcatgcagaaaggaggagtgcaaacgggtatccccccctagctgtccccctcataggctgccaaccctgagaaaaacacagtgttgcgacgaatatgagtgtgcgtgtaactgtgtgaatagtacagtatcctgccccctgggttatctggcctctacggcaactaacgactgcgggtgcaccaccacaacctgcctaccagataaggtgtgcgtccaccgctctacgatctacccagttgggcagttctgggaggaaggatgtgatgtatgcacttgtactgacatggaagatgcggtgatggggctgagagtggcccagtgcagtcagaagccttgtgaagattcctgtcgcagtggcttcacatacgttctgcatgagggagagtgttgcggtcgttgccttccatcagcctgtgaggtcgtcaccggtagcccgagaggggacagtcagtcctcttggaagtcagtggggagccaatgggcctctccggagaacccttgtttgattaacgagtgcgtgcgtgtcaaggaggaagtattcatacaacagcggaatgtgagttgtccccaactcgaagtgcccgtctgccctagcggtttccagttgtcttgcaagacatcggcctgctgtcccagctgtcggtgcgagcggatggaagcctgcatgttgaatggcaccgtaatcggccccggaaagaccgtaatgatcgacgtatgcacgacatgtcgttgcatggtgcaggtcggcgtcatttctggctttaagctggagtgtagaaagacgacatgcaatccctgtcctctcggctataaggaagagaacaacactggtgaatgctgtgggcgctgccttccaacggcgtgtaccattcagttaagaggcggccagatcatgacactgaaacgtgacgagaccctgcaggatggatgcgacactcacttttgcaaagtgaatgaaaggggcgaatacttctgggagaagcgagtgacgggatgccctccgtttgacgagcacaagtgcctagcagagggcgggaagatcatgaaaatccctgggacttgctgtgatacatgcgaagagccagaatgcaatgacattacggcgcggctgcaatatgtcaaggttggaagttgtaaaagcgaggtggaggtggacattcattactgccagggtaagtgtgcatctaaggcaatgtattctatcgacatcaacgacgtgcaggaccagtgctcatgctgttcccctacacggacagagccgatgcaggtcgctctccactgcaccaatggctcggtcgtatatcacgaggtgctcaatgcaatggaatgcaagtgttcaccacgcaagtgttccaag

SEQ ID NO: 12534 - DNA, 8439 bp, Artificial Sequence
  derived and/or modified sequence
atgatccccgccaggttcgccggcgtgctgctggctctggccctgatattgcctggcacgttgtgcgcagaagggacccgtggtagatcctcaacggctaggtgtagcctatttggtagtgatttcgtcaataccttcgacggttctatgtattccttcgctgggtactgttcatatctacttgctggaggatgtcagaagagatccttctccatcatcggcgactttcagaacggcaagagggtttccctgtctgtctatctcggggaattctttgatattcacctgttcgttaatgggactgtcacacagggtgatcagagggtgagcatgccttacgcatccaaaggcctctatctggagactgaggccgggtattataagctgagtggtgaagcctatgggtttgtcgccaggatcgacggatccggcaacttccaggttctgctgagcgataggtacttcaacaagacctgtggcctgtgcggaaatttcaatatttttgcagaagatgatttcatgacacaggaggggactctaacctccgacccctacgattttgccaacagctgggctctgtcttcaggcgaacagtggtgcgagcgtgcctcaccacccagttcctcatgcaatatttcctccggggagatgcaaaagggcctgtgggagcagtgtcagctgctcaagtcaactagtgtttttgctcgttgtcacccattagtcgaccccgagcctttcgtcgccttgtgcgagaagacactttgtgagtgcgccggcggcctggaatgcgcctgcccagctctgctggagtacgccagaacgtgcgctcaggagggtatggtgctctatggctggaccgaccattccgcctgcagccccgtctgcccagccggaatggaatataggcaatgcgtgtccccttgtgctagaacctgccagtccctgcacatcaacgagatgtgccaagagcggtgcgtcgatgggtgcagttgtcctgaagggcagctgctagacgagggactctgcgtggagagcaccgagtgcccttgcgtgcattctggcaagcgttatcccccaggcacaagcttgtcccgcgactgcaatacatgtatctgccgcaactctcagtggatctgtagtaatgaggagtgtcctggggagtgtctcgtgaccggtcagtctcactttaaatcttttgataacaggtattttacctttagcggaatatgtcaatatctcctggcgcgcgattgtcaggaccatagcttttctattgtgatcgagactgtacagtgtgcggacgaccgcgacgccgtttgcacccggagcgtgacagtcaggctgccaggtctccacaattccctcgtgaagctgaaacatggcgctggggtggctatggacggtcaggatgttcagctccccttactcaaaggagatctcagaatccagcacactgtaactgcctcggtcaggttatcctacggtgaggatctccagatggactgggacggtcgaggccggctacttgtgaaactgtcaccagtatacgctggaaaaacctgtgggttgtgcggaaattacaacgggaaccagggtgacgactttctgacaccttctggtttggcagaaccaagagtggaagacttcggaaatgcgtggaagctccacggggattgccaggacctacagaaacagcactctgacccatgcgccctcaaccctagaatgacacgtttctccgaagaagcttgcgctgtcctgaccagcccaacattcgaagcatgccatcgcgctgtgagtcccctcccatacctgcgcaactgccgatacgatgtgtgttcttgcagcgacggacgtgagtgtttatgtggcgctctcgcaagttatgccgctgcgtgcgcgggaaggggtgtccgggtggcttggagggagccagggcggtgcgagctgaattgccctaagggacaggtgtacctgcagtgtggcactccctgtaacctcacatgtaggtcactgagctatcctgatgaagaatgcaacgaggcgtgcctggaggggtgcttctgccctccaggtctttacatggatgagcggggggattgtgtcccaaaggcacaatgtccctgttattacgacggggaaatcttccagcctgaagacattttttcagaccatcatactatgtgctactgtgaggatggattcatgcattgcaccatgtccggcgtccccggctcattactcccagatgcagtgctgagctctcccctgagtcaccggagtaagagatctttgtcctgtcgtccgcctatggtgaagctcgtttgcccggctgacaatctgagggccgaaggactcgaatgcaccaagacatgtcagaattatgacctggaatgtatgtcgatgggctgtgtgagtggatgcctgtgcccccctggcatggtgcgccacgagaacaggtgcgtggcactggagcgctgcccttgcttccatcaaggaaaggagtacgcacctggggagaccgttaagatcgggtgcaacacgtgtgtgtgtcaggatcgaaaatggaattgtaccgatcatgtgtgtgatgccacttgctcaactatcggaatggcgcattaccttactttcgatggcctgaaatatctttttccaggtgaatgccagtatgtgctggtacaagactactgtggtagcaaccccgggacctttcgcattctcgttggaaacaagggctgttctcacccatcagtgaagtgtaagaagagagtgacaatcctggtcgaggggggtgaaatcgaactatttgatggtgaagtaaacgtcaagcggcctatgaaagacgagacacacttcgaggtggtcgaatccggtagatatataattctgctgctgggaaaggcactgagtgtagtctgggacagacacctatcaatctccgtagttcttaaacagacgtaccaggaaaaggtgtgcggcctgtgtggcaatttcgatggaatccagaacaacgatctgacctctagcaacctccaggtggaggaggatcccgtggactttgggaacagctggaaagtgagttcacagtgtgctgatactcgcaaggtccccttggattcatctccagccacatgtcacaataatattatgaagcaaacaatggttgattcctcttgccgaatccttacaagcgatgtttttcaggattgcaataagttggttgacccggaaccttatctggatgtttgcatttacgatacatgtagctgtgaatctattggcgactgcgcctgcttctgcgataccattgctgcgtacgcacacgtctgtgcccagcacgggaaagtggtcacctggcgcaccgcgactctttgcccccagagttgcgaagagaggaacctcagggaaaacggctacgagtgtgaatggcgttacaactcatgtgctccagcgtgtcaggtcacatgccagcaccccgagccactggcctgccctgtacagtgtgtggagggatgtcacgctcactgtcccccaggcaagatactggatgaactgcttcagacttgcgtggacccggaagattgcccagtgtgtgaggtcgccggtcggcgtttcgctagcggaaaaaaggtcacattgaatccatccgacccagagcactgtcagatctgtcactgcgatgttgttaacttgacttgtgaagcttgccaagaacccggaggtttggttgtccctcctaccgatgcaccggtgagccctaccaccctgtatgtggaggatatcagtgagcctccactgcacgacttttattgttcaagattactggaccttgtattcctgctagatggatcttcaaggctgtccgaagcggaatttgaggtgctaaaagcctttgtcgttgatatgatggagcgactccgaatctcccagaagtgggtgcgggttgccgtggtagagtatcatgacggatctcatgcttacataggtcttaaagacagaaagcgaccgtcggagctgcgtcgcatagctagccaggtgaagtacgccgggagtcaagttgctagtaccagtgaagtgttgaagtacacgctgttccagatattctcaaagatcgaccggccagaggcatcaagaattactctcctgctcatggccagccaggagccccaacgcatgagcaggaattttgtcagatacgtgcagggtctgaagaagaaaaaggtcattgtcatccctgttgggatcggacctcatgcaaacctgaagcagattagattgatcgagaaacaagcgccggagaataaggcctttgtgctttcctctgtggatgagttggagcagcagcgtgacgaaattgtcagctacttgtgcgacctcgctcccgaggcaccgccaccaactctaccaccagatatggcccaagtcaccgtggggccgggactcctgggcgtgtcgactctgggccccaagaggaacagcatggtgctggatgtggcttttgtcctggagggttctgataaaattggtgaggctgactttaataggagtaaggagttcatggaagaggtcattcagcggatggatgtggggcaagactccatccatgtgacagtcctgcagtactcatacatggtgacagtcgagtatcctttctcggaggctcagtccaagggcgacattcttcaacgcgtgcgggaaatcaggtaccagggggggaaccggactaatacggggcttgcattgagatacctgtctgaccacagctttcttgtcagtcagggagacagggagcaggcgcctaatctggtttatatggtgaccggtaatcctgccagcgacgaaataaaaaggctccctggggacattcaggtagtgccaattggagtggggcccaatgctaatgtacaggagctggagcgaatcggttggcctaatgcacccatactaatccaggacttcgaaacgctccccagagaagcacccgatctggtgctgcagagatgttgctctggagaaggcctacaaatacctactttatctcctgcccctgactgctcacaacctctcgacgtgattctcctcctagatggcagcagctctttcccagcttcctattttgacgagatgaagtcgttcgctaaggctttcatttctaaggcaaacattggtccccggctgacccaagtcagcgttttgcagtatggctccataactacgatcgatgtgccttggaatgtggttcccgagaaggcccatctcctgagcctggtcgatgtgatgcagcgggagggggggccctcccagatcggcgatgccctgggattcgcagtcagatacttgaccagcgagatgcacggtgctaggccaggcgcatctaaagctgtggttatcctggtgacggacgtttccgtagacagcgtggacgcagcagcagacgccgctaggtctaatcgcgtcacagtttttcccatcggtataggggaccgatatgacgctgcgcagctccgcattcttgccggtcccgccggggacagcaatgtcgtaaagctccagaggattgaggatctgccgacaatggtgactctcggaaatagtttccttcacaagctgtgtagcggattcgtgcgaatttgtatggacgaagatggtaacgagaaacgacccggcgacgtgtggaccctcccggaccagtgtcataccgtcacctgccagcctgatggacagactctgttaaagtctcacagggttaactgtgaccggggccttagaccttcctgtccaaacagtcagagccctgtgaaggtggaggaaacatgtggctgtagatggacctgtccatgcgtttgcaccggctccagtacaagacacattgtgacttttgacggccagaattttaaactgaccggatcttgttcttacgtgctgttccagaataaagagcaagacctcgaagtaatcctgcataatggggcttgttcacctggcgctcgtcaaggatgtatgaagtccattgaggtcaagcactcagccctgagcgttgaactgcacagcgatatggaggtgaccgtgaatggacgtctggtttccgttccatatgttggaggtaacatggaagtaaacgtatatggcgctatcatgcatgaggtgcgttttaaccacctgggccacatttttacctttacaccacagaacaacgagttccagctacagctttccccaaaaactttcgccagcaagacctacggactctgtggcatttgcgatgagaatggagcaaacgatttcatgcttcgcgatggaactgtgactacggactggaagactctcgtgcaggagtggactgtccagcggcccgggcaaacttgtcagcccattttggaagaacagtgtcttgtgccagactcgtcccattgtcaggtgctgctcttgcctttatttgccgagtgccacaaggtgcttgccccagccaccttctacgctatatgccaacaggactcttgtcatcaagaacaagtgtgcgaggttattgcgagctacgcccacttatgtcgcacaaatggggtttgcgtggattggcgcactccagacttctgtgcgatgagttgtcctccttccctggtatacaaccattgcgaacacggatgcccacgccactgcgatggcaatgtctcctcgtgcggagaccatccctctgagggatgcttttgcccacccgacaaagttatgcttgagggatcttgtgtgccagaagaggcttgtactcagtgtattggggaagacggagtgcagcaccagttcttggaagcctgggtgcctgatcatcagccttgtcagatctgcacatgcctatctggcaggaaagtgaactgtaccacccagccttgtccaacggctaaagcccccacctgtggattgtgtgaagttgcgagactcaggcaaaacgcagatcagtgttgtccggagtacgaatgcgtgtgtgatcctgtcagctgtgacctgccgcctgttccccactgtgaaaggggcctgcagcccacgctgaccaaccctggagagtgtcggccaaatttcacatgtgcgtgtaggaaggaggagtgtaagcgtgtcagtccgccctcctgtcccccacacaggcttcctactttgcggaagacacagtgttgtgacgaatatgagtgtgcctgcaattgcgtgaatagcacggtttcttgcccactggggtatcttgcctctactgctaccaacgattgcggatgtaccaccacaacgtgtctgcctgacaaggtgtgcgtacaccggtccactatctaccctgttgggcagttctgggaggagggttgcgatgtgtgcacgtgtaccgatatggaggatgctgtgatgggcctgcgcgttgcacagtgctcccagaaaccctgcgaggattcatgtcggagcggatttacatatgttctgcacgaaggtgaatgttgtggtaggtgcctgccgagcgcctgtgaagtggttactgggtcaccccgtggcgactcacagtccagctggaaatcagtgggatcccagtgggcctcccctgaaaatccctgcctcatcaatgaatgtgtgagagttaaagaggaggtgttcattcagcaacgcaatgtcagctgcccacagctagaagttccagtgtgtcccagtggcttccaactgtcctgcaaaacatcagcttgttgtccaagctgtagatgcgagcgaatggaagcctgtatgcttaatgggaccgtcatcggccctggtaaaactgttatgatcgatgtgtgtacgacttgtcgatgcatggtccaggtgggggttatcagcggttttaagctggagtgcaggaaaactacatgtaatccgtgtcccctaggctataaggaagagaacaacaccggtgagtgttgtgggaggtgtttgcccacggcatgtaccatacagctacgcggcggccaaatcatgactctgaagagggacgagactttgcaggacggctgcgacacccatttctgtaaggtgaacgaacgcggcgagtacttctgggagaagcgcgtgactggatgtccaccctttgatgaacacaaatgtttggctgagggcggaaagatcatgaaaatccccggcacttgttgtgacacctgcgaggagcctgagtgcaacgacatcacggccaggctccagtacgtgaaggtcgggagctgtaagagtgaggtcgaggtggacattcactattgtcagggtaaatgtgcaagcaaggcaatgtattctattgatattaacgacgttcaggaccagtgcagctgttgcagcccaacacgcacggaaccaatgcaggttgctttgcactgtacgaacggctcggtagtgtatcatgaggtgctgaacgctatggagtgtaaatgttccccacgtaagtgcagcaaa

SEQ ID NO: 12535 - DNA, 8439 bp, Artificial Sequence
  derived and/or modified sequence
atgatcccagcaaggtttgctggggtgctacttgcccttgcactcattctgccggggacattgtgcgcggaagggactaggggacgtagctctacggctagatgttctttgtttgggtcggacttcgtgaataccttcgatggatctatgtatagcttcgctggctactgtagctatctccttgcgggtggctgccaaaagcgctctttctctatcattggtgatttccagaacggcaagagagttagcctgtcagtataccttggggagttttttgacattcacctctttgtgaacggcacggtaactcagggtgatcagagggtgtcaatgccgtatgcttctaagggcttgtatttggagacggaggctggttattataaactcagtggtgaggcctacggctttgttgcaagaattgatggaagtggcaacttccaagtgctgctgagtgataggtatttcaataaaacctgcggcttatgtggtaactttaatattttcgctgaggatgattttatgacacaggagggtaccctcacttcagatccatacgatttcgctaattcttgggctctgtcttcgggcgagcaatggtgtgaaagagctagccctccatccagttcctgcaatatcagctccggtgagatgcaaaaagggctctgggagcaatgtcaacttcttaaatccacttccgttttcgccagatgccatccactagtggatcccgaaccgttcgtagcactgtgcgagaaaaccttgtgcgaatgtgcaggggggcttgaatgcgcatgtcccgctttgttggagtatgctagaacctgtgcacaagagggcatggtgctatatggctggaccgatcactcagcttgcagtccagtgtgtccagcaggaatggagtacagacagtgcgtgtccccttgtgctaggacatgccagagcctacatattaacgaaatgtgccaagagcggtgtgtggatggttgctcttgcccggagggacaattgttggatgaaggtctgtgtgttgaatccacagagtgcccttgcgtgcatagcggtaagagatatcctccaggaactagcctcagtcgagattgtaatacgtgtatttgcaggaacagccaatggatatgttctaacgaagaatgccctggagagtgtcttgtcactggtcaaagtcacttcaaaagttttgacaatcgatatttcacattcagtgggatttgtcaatacttgctagctcgtgattgccaggaccatagcttctctattgtgatcgagactgttcaatgtgctgatgatcgcgatgctgtctgcacacgaagcgttaccgtgaggttgcctggattgcacaactctcttgttaaattaaagcatggagcaggcgttgcaatggacggtcaagatgttcagctcccacttctaaaaggggaccttcgtattcagcacactgtgactgccagtgtgaggcttagttatggggaagatctgcaaatggattgggacggtcgtgggcgactccttgttaaactgtcaccagtctacgccggcaaaacgtgtggactttgcggtaattacaacggaaaccagggcgatgatttcttaaccccatctggacttgcggagcccagagtggaggattttggtaatgcgtggaagcttcatggagattgccaggatcttcaaaagcagcattcggatccttgtgcgctaaacccaagaatgactagattcagcgaagaggcgtgtgctgttttgacttctccaacctttgaggcatgccatagggctgtttcacctcttccgtatcttaggaattgtcggtatgacgtgtgttcttgttctgatgggagggagtgtctctgcggggcactggcttcttacgcggctgcctgtgcaggtcgaggcgtgagagttgcatggcgggaaccaggtagatgcgagcttaattgccctaagggtcaagtttaccttcagtgcggtacaccgtgtaaccttacgtgccgttcgctgtcttatccagatgaggaatgcaacgaagcctgcctcgagggctgcttttgcccacctgggttatatatggatgaaagaggcgattgcgtgcccaaagctcagtgtccgtgctactatgacggggagatctttcagccggaggatatcttttctgaccatcacaccatgtgctattgtgaagatggcttcatgcattgcactatgtcaggtgtgccaggatccttactcccagacgcagtgctgtcttccccattatctcataggtctaagagatctttgagctgccggcctcccatggttaaactcgtttgcccagccgataacctcagagcagagggcttggaatgcacaaagacgtgccagaactacgatctggaatgtatgagtatggggtgtgttagtggatgtctttgtccaccaggtatggtcaggcacgagaatagatgcgtggcactcgaacgatgcccttgctttcatcaaggcaaagagtacgccccaggggaaactgttaaaatcgggtgtaatacctgtgtctgtcaagatcgtaagtggaattgtacagatcacgtgtgcgacgccacttgtagcaccatagggatggctcattacctgacttttgacggactgaaatatctttttccgggagaatgtcaatatgtcttagttcaggactattgcggcagcaaccctgggactttcagaattctagttggtaacaaggggtgtagccatccctctgtcaagtgtaagaaaagggtaactattttggttgagggtggagaaattgagttatttgatggagaggttaacgtcaaacgaccaatgaaagatgagactcactttgaagtagttgagagcggtcgatacataatattgctactcggaaaggccttgagcgtcgtttgggaccggcacctctcaattagcgttgttctcaagcagacgtaccaggaaaaggtttgtgggctctgcgggaactttgatggcatccagaacaatgatctcacatcctcgaaccttcaagtggaagaggatccagttgactttggtaactcatggaaggtctcttctcaatgcgccgatacgcgaaaagtcccactagattcatcaccagctacttgccataacaatattatgaaacaaactatggttgattcttcttgccggattctcacctctgatgttttccaagattgtaacaagttggttgatcccgaaccttatctcgatgtttgcatttacgacacatgctcgtgtgagtccattggagactgtgcgtgtttctgcgatacgatcgcagcttacgctcacgtttgtgctcagcatggtaaagttgtaacgtggcgaacagctactttatgtcctcaatcttgcgaggaaaggaacctcagggagaatgggtatgagtgcgaatggcgttacaattcttgcgctcctgcatgtcaggtaacttgccaacatccagaacctttggcctgccctgttcaatgtgttgagggatgtcacgctcattgccccccaggtaagatactggacgagttgttgcaaacttgcgtggatcccgaagattgccctgtgtgcgaggttgcaggtagaaggtttgcatcagggaagaaggttacgctgaatccttccgatcctgaacattgtcaaatctgtcattgtgatgtcgttaatcttacatgcgaagcttgccaagagcctggtggattagttgttcctccaaccgatgcgcctgtaagcccgaccacattgtatgttgaagacatcagtgagcctccacttcatgatttttattgcagccgattactcgatctcgtttttttactcgacggttctagcagactttctgaagctgaattcgaggttcttaaggcattcgtggtagacatgatggagcgacttagaatctcacaaaaatgggtcagagttgctgttgttgaatatcacgacgggtctcatgcgtacattggcttgaaagatcgaaaaaggccgagcgaactgagaagaattgctagtcaagtgaagtacgcaggatcacaagtcgcatccacttctgaagtgctgaagtatactttgtttcaaattttttccaagattgaccgtcctgaggctagtagaatcaccctcctgcttatggcgtcacaggagccacaacgtatgtcaagaaattttgtgagatatgttcaaggccttaaaaagaaaaaagtcatagttatccccgtgggcatcggtcctcatgctaacctaaaacagataaggttaatcgagaagcaggcacccgaaaataaagcttttgtgttgagtagtgtggacgagcttgaacaacaaagagatgagatcgtttcctatctttgcgatctcgctcctgaggctccaccacctacattgccaccagatatggcccaagtcaccgtgggtcctggtttgctgggtgtgtcaactttgggacccaagcgtaatagtatggttttggatgttgcgtttgttttggaagggagtgataaaattggggaagctgattttaatcgcagtaaagagttcatggaggaagtgatacaacgaatggacgttggccaggattctattcatgtaacagtcttgcaatattcatatatggttacagtggagtatccattcagcgaagctcaaagcaagggcgacattctccaacgcgttcgagagatcagataccaaggtggaaacagaacaaacactggacttgccctcagatatttatctgaccattcattccttgtttcccagggagatagggagcaggctccaaatcttgtttatatggtcactggtaatcctgcttcggatgaaattaaaaggcttccgggtgatatacaagtggtacctattggcgtgggtccgaatgcgaatgttcaggaactggagagaattggatggcccaacgctccaatattgatccaggacttcgagacacttccacgggaagcgccagatctggtattacaacgctgctgttctggtgaaggacttcagattcctacattatcacctgctcctgattgttcacagccccttgatgtgatcttgctgttggatgggtctagttcgttccccgcatcgtactttgatgaaatgaaatcatttgctaaagctttcatcagcaaggcaaacattggtccacgtcttacacaagtgtctgtcctccaatatggatcgataaccactatcgatgttccatggaatgttgtccctgaaaaggctcacttgttgagtcttgttgacgttatgcaacgagaaggagggccatcacaaataggtgatgctctgggttttgccgtgcggtatttgacttccgagatgcatggcgcacgccccggggcatctaaagcagttgtcattttggttaccgatgtttccgtggactccgttgatgctgccgccgacgcggcgcgtagcaatcgagttacagtttttcctattggtatcggcgatagatacgacgctgctcaactacgtatactggctggaccagcgggagactcaaacgtggttaagcttcaaaggattgaggacttacctacaatggttactcttggcaactcattcttgcacaaattgtgttcggggtttgttaggatatgtatggatgaggacggcaatgagaaacggcctggtgacgtctggacactacctgatcaatgtcatacggtgacatgtcagccagatggccagactcttttgaaatctcatagagttaattgcgaccgtggtttgcgaccttcttgccctaactcccagtcgccagttaaggttgaggaaacctgcgggtgcagatggacttgcccctgtgtgtgtactggttcttccactaggcatatcgtcacttttgacggacagaatttcaagcttacaggtagttgcagctatgttttgttccaaaataaggaacaagacctagaggtcattttgcacaatggtgcctgcagccccggggctaggcagggttgcatgaaaagcattgaagtgaaacattctgctttgtctgttgaacttcattcagatatggaggttacagttaacgggcggttagtgtcagtcccttatgtcggcgggaatatggaagttaacgtgtacggagcaatcatgcacgaggtgcgttttaatcatctggggcatatttttacctttactccacaaaacaacgaattccagttacagcttagccctaaaacattcgcttcaaaaacctatggcctctgtggcatatgtgacgagaacggcgcaaatgacttcatgttacgtgatggtactgtaactactgattggaagactcttgtgcaggaatggacagtgcagcgccccggccagacttgccagcccatcctcgaggaacagtgcttggttcctgattcctctcattgtcaagttctattattgccactcttcgcagagtgtcataaggtgcttgcgccggctacattttatgcaatctgtcagcaggattcctgtcaccaggagcaagtttgtgaagtaatcgccagctacgcgcacttatgccggacaaatggtgtatgtgtggattggcggacacccgacttttgcgccatgagctgtcctccctcactcgtgtacaaccattgcgaacacggatgtcctcgacattgtgatggaaatgtgtcatcttgcggggatcatccctccgaaggttgcttttgcccacctgataaggtaatgcttgagggaagctgtgttcctgaagaagcttgtactcagtgcattggtgaagatggtgttcaacaccagtttctcgaggcatgggttccggaccatcagccctgtcagatttgcacctgcctctcgggaagaaaggtcaactgcactacacagccttgtccaactgcaaaggcccctacatgtggtctctgcgaggtcgctcggcttaggcaaaatgccgatcagtgctgtccggaatatgagtgcgtttgtgatcctgtttcctgcgatttaccacctgttccacattgcgagcgtgggctacaacccactttgacaaacccaggggaatgccgacccaacttcacttgtgcctgtcggaaagaagaatgcaaaagagtgagccctccatcatgccctcctcaccgtctgccaaccttgagaaaaactcagtgctgcgatgagtacgagtgtgcctgtaactgcgttaattcgaccgtatcctgtccattaggatatttagcttctaccgcaaccaacgattgcggttgtacgactaccacatgccttccagacaaggtttgtgtgcatagaagtactatctatcctgtcggtcagttttgggaagaaggctgtgacgtgtgtacctgcacagacatggaggatgcggttatgggtcttagggtcgcacagtgctcccaaaagccgtgcgaggactcatgccgtagcggattcacctatgtccttcatgagggtgaatgctgtggacgatgcttgccgtctgcctgcgaggttgtgaccggaagtcctagaggagattcccaaagttcgtggaagtctgtgggatcccagtgggcaagccccgagaacccttgtctgataaatgagtgtgttagggttaaagaggaggtctttattcagcaaagaaatgtctcatgcccccaactggaggttcccgtttgtccaagtggatttcagttgtcatgtaagaccagtgcgtgctgccctagttgccggtgtgagcgaatggaggcttgcatgttgaatggtactgtcatcggaccaggcaaaaccgttatgattgatgtatgtactacatgtcgctgcatggtgcaagttggtgttatttccggattcaagttagagtgtagaaaaacaacttgcaatccctgcccactcggttataaagaggagaataacacgggagagtgttgcggacgttgtcttcccacagcttgtaccatccaacttagaggaggtcaaataatgaccttgaaaagagatgaaacactgcaagacggttgtgatactcatttctgcaaggtcaatgaaagaggtgagtatttctgggagaagagagtgaccggttgccctccattcgacgagcacaagtgtttagccgagggtggcaagattatgaaaatccctggaacgtgctgcgatacttgtgaggagccggaatgtaatgacatcacagcacgacttcagtacgtgaaagtgggtagctgcaagtctgaggtcgaagtggatatccattactgtcaggggaaatgcgcttccaaagccatgtattcaatcgatatcaacgatgtacaagatcaatgttcctgctgttcccctacaaggaccgagcctatgcaagtggctcttcattgtacaaatggttcagttgtgtatcatgaggtgcttaatgccatggagtgtaaatgttctcccagaaagtgctcaaaa

SEQ ID NO: 12536 - DNA, 8439 bp, Artificial Sequence
  derived and/or modified sequence
atgattccagcgagattcgctggcgtgctgcttgcgcttgccttaatcctgcccggtactctatgcgccgagggtacccgaggccgcagctcaaccgcccgctgttcattattcggctctgactttgtcaacactttcgacggctctatgtattcttttgccggctactgttcctacctgttggctggaggctgccagaagcgctcattttccatcattggggattttcaaaatgggaagcgggtttcactgtctgtgtacctgggtgaattctttgatatccatctgttcgttaatggcacagtcacccaaggggaccagcgggtgagtatgccttatgcttcaaagggcctttacttggagaccgaggcggggtattacaaactgagcggtgaggcctatggctttgttgctaggatcgacggctctggcaatttccaggtgctgttatctgacagatattttaacaagacctgcggtctgtgtggcaatttcaacattttcgccgaggacgacttcatgactcaggagggaacactcacgtctgatccttacgacttcgccaattcctgggctttatcaagcggagagcagtggtgcgaaagagcttctcccccctccagcagctgcaacatctcatcaggcgaaatgcagaagggcctgtgggagcagtgtcagctgctgaagtcgaccagcgttttcgccaggtgtcatccattagtggaccctgagccatttgtcgcgctgtgcgagaagactctttgcgagtgcgccggcgggttagaatgtgcctgtccagccctgctcgagtacgcaaggacctgtgcccaagaagggatggtcctctatggctggacggaccactccgcatgcagtcccgtctgtccagctggaatggaataccgccagtgcgtgtccccatgtgctcgtacctgccaatccctgcacatcaatgagatgtgccaggagcggtgcgtggacggttgttcttgtcctgaaggccagctcctggatgaagggttgtgcgtggagagcaccgaatgcccttgtgtccatagtggtaagagatatcctcccggaacctctctttccagagattgcaatacttgtatctgtcgaaacagccagtggatttgtagcaacgaggaatgccccggcgagtgcctggtcaccggccagagccacttcaagtcattcgacaaccggtattttaccttttctgggatatgtcagtatctgttggctagggactgccaggatcactcattttccatagtgattgaaacagtgcagtgcgcagacgacagagacgccgtctgtactcgcagcgtgactgtgagactccctggattacacaacagcctggtgaagctcaaacatggagcaggcgtggctatggacgggcaggatgttcagctcccactattaaaaggcgatctcagaatacagcacacagtgaccgccagcgtcagattgagctacggagaggacctgcagatggactgggatggtcggggtcgccttctggtgaaactctccccagtctatgctggcaaaacatgtggcctatgcggcaactacaatggcaatcagggcgatgacttcttgaccccctccggtctcgccgagcctagagtggaggatttcgggaatgcctggaagttgcatggcgactgtcaggacttgcagaagcagcacagcgatccttgcgctttgaacccacgcatgacgcgcttctctgaggaggcctgtgccgtgttaacttctcccacctttgaggcgtgccatagagccgtgtcccctctgccatacttgaggaattgtcgctatgatgtctgctcttgcagcgatgggagggaatgcctatgtggggccctggcctcgtacgctgccgcctgtgcgggaaggggcgtgagagtggcctggagggagcccggccgctgtgaactgaattgtccaaaggggcaggtgtacctgcaatgtggaacgccgtgtaatctgacttgtaggagcctgagctaccccgatgaggagtgtaacgaggcctgtctggaaggatgtttttgtccaccaggtctgtatatggatgagcgcggagactgtgtccccaaagctcagtgcccatgctactacgacggcgaaatcttccagccggaggacatcttctctgaccaccacactatgtgttactgtgaggacggattcatgcattgcactatgtccggggttcctggtagcctccttccagacgccgtcctgagttctccactgagccacaggagcaagagatctctctcttgcaggccccctatggtgaaacttgtgtgcccagcagataacctgagagcagagggactcgaatgcacgaaaacgtgtcaaaattatgatttggagtgcatgtcaatgggctgtgtgagcggatgcctgtgtccccccggtatggtgcggcacgaaaacaggtgcgtggcccttgagcgttgtccctgcttccatcagggaaaggagtacgcgccgggagaaacggtgaagatcgggtgtaatacctgtgtgtgccaagaccggaagtggaactgtacagaccacgtgtgcgatgccacctgtagcacaattggaatggcacactacttgacctttgatggactcaagtatctgttccctggcgagtgccagtacgtgctcgtgcaggactactgtggttccaaccccggtactttcaggatcctggtgggcaacaaagggtgcagccatccatccgtgaagtgcaagaaaagggtcaccattctggtggagggaggggagattgaactgttcgatggtgaggtgaacgttaaacgccctatgaaagacgaaactcactttgaggtcgtcgaatccggcaggtacatcatcctgctcctcggcaaggccctgtcagtcgtgtgggaccgccacctgtccatcagcgtggttctcaagcagacctaccaggaaaaggtgtgtggactttgtggcaactttgacgggatccaaaacaacgatttaacctccagcaatttgcaggtggaggaggatcccgtcgatttcggcaactcatggaaagtcagctctcaatgtgcggatacacgcaaggtgccattggacagttctcccgccacttgtcataacaacatcatgaagcagactatggtagactcctcgtgccgcatcctcacgagcgatgttttccaggattgtaacaagctggtcgatcccgagccttatctcgatgtgtgcatatacgatacctgcagttgtgagtccattggggactgcgcatgcttttgcgatacaatcgctgcgtacgcccacgtttgcgcgcagcacgggaaggtggtcacatggaggaccgcgactctgtgtccccaaagttgcgaagagcggaacctgcgggagaacggctacgagtgtgaatggcggtataatagctgtgcccctgcttgtcaggtaacttgtcagcatcctgaacccctggcttgccccgtgcagtgcgtggaagggtgtcacgcccattgtccaccgggtaagatcctagatgaactgctgcaaacatgcgtggaccctgaagattgccccgtttgtgaagtggctggcagacggttcgcttcagggaagaaggtcacactgaaccctagcgatcctgagcattgtcagatttgtcactgtgatgtggtaaatttgacctgtgaggcttgtcaagagcccggtggactcgttgtcccccctacagacgctccagtgtccccaaccaccttgtacgtggaggatatctccgaaccacctctgcacgacttttactgctctagactactggaccttgtattcctccttgacggctcaagcaggttatctgaggcggagttcgaggtgcttaaggctttcgtcgtggacatgatggagaggcttcgaatttcgcagaagtgggtgcgggttgctgtcgttgaatatcacgacggatcccatgcttacattggcttaaaggaccgtaagcgtcctagtgagctcaggagaatcgcctcacaggtcaaatacgctgggagtcaagtggcttctacctccgaagtgctcaagtataccttgtttcagatcttctccaaaattgaccggcctgaagcaagtcgcattaccctgctgctgatggcttcccaagagccacagcgtatgtcacggaattttgttcggtatgtacagggcttgaaaaagaagaaagtgatagtgattccagtaggcatcggcccacacgccaatcttaaacagatcaggttgattgagaaacaagccccagagaataaggcctttgtcctgtcctccgtcgatgagcttgaacagcagagagatgagatcgtttcttatctctgtgacctggcgccagaggcgcccccacccacactgccccccgacatggcccaagtcacggtcggccccggactattgggggtctccaccctcgggccaaagcggaactcaatggtgctggatgtggcatttgtgctcgagggtagcgacaaaatcggcgaagccgactttaaccgcagcaaggagttcatggaagaggtcatccagcgcatggacgtgggacaggactccatacacgttaccgtcctgcagtattcttacatggtgaccgtcgagtatccattctcagaggctcagtctaaaggagacatcctgcaaagggtgcgcgaaataagataccagggcgggaatcgcaccaacactggattggccttaaggtacctgtcggatcactctttcctggtctcccaaggcgatagggagcaagcaccgaacctggtgtatatggtcacggggaatccagcaagtgacgagatcaagcgcctaccgggagacatccaggtggtgcctattggcgtgggacccaatgccaacgtgcaggagctggagaggatcggctggcccaatgcccccatcctgattcaggacttcgagaccttgccgcgagaagcaccagacctcgtcctgcagcggtgctgttcaggggaggggcttcagatccccacattgtcaccagcgcctgactgctcgcagccactcgatgtgatcctgttactggatgggtctagttctttcccagcgtcctactttgatgagatgaaaagtttcgccaaggcattcatctcgaaagctaacatcggtccaaggcttacccaagtaagcgtcctgcagtacggcagtattacaactattgacgtgccttggaatgtggttcccgagaaggctcacctgctctccttagtggacgtcatgcagcgggaagggggcccttcccagattggtgacgcgcttgggttcgccgtccgctatctcacgagcgaaatgcacggcgctaggccgggggcatctaaggccgtggtgattcttgtgacagacgtttccgttgattctgtggacgctgccgcagacgccgcccgctccaacagggtgaccgtgttcccaatcggaatcggcgatcgctatgacgccgcccaactgcgaatcctggcaggtcccgcaggcgactccaacgtggtgaaactccaacgtattgaagacctgcctaccatggtaactctgggaaactcctttctgcataagttgtgcagtggatttgtgcgcatctgcatggatgaggacggtaacgagaaacgccccggagatgtctggactctgcccgatcagtgccatactgttacctgtcagcccgacggacagacccttctcaagtcccaccgcgtcaactgtgatagagggctgcggcccagctgtccaaactcccaaagtcctgtgaaagtggaggagacttgcggttgtcggtggacgtgcccctgcgtgtgcaccggctccagcaccagacatatcgtcactttcgacggacagaacttcaaacttacaggctcttgctcctacgttctgtttcagaacaaagaacaggacctggaggtgatactgcataatggtgcctgttccccgggggctaggcagggctgcatgaaatccattgaagtgaaacactctgccctcagcgttgagttgcattccgatatggaagttactgtgaatggacggctggtatcagtgccctatgtcgggggcaatatggaagtgaacgtctacggagccatcatgcatgaagtgcgctttaaccacctgggccatatctttaccttcaccccacagaataatgagtttcaactgcagttatctcccaagacctttgccagcaaaacttacggcctgtgcggtatctgcgatgagaatggcgccaatgattttatgttgagggatgggacggtgactaccgactggaaaactttggtccaggaatggacagtgcagaggcccggacagacctgtcagccaatcctggaggaacagtgtctggttcctgatagctcccattgtcaggtgcttctcctgcccctcttcgccgagtgtcataaggtcctggcccctgcaaccttttatgctatttgtcagcaggattcttgccatcaagagcaggtgtgcgaagttatcgcatcctatgcccacctgtgcagaactaacggggtttgcgtcgactggaggacccccgatttctgcgccatgtcttgccctccttccctggtgtacaatcattgtgagcatggctgcccccgtcattgcgatggcaacgtaagcagttgtggcgaccacccctcagaggggtgcttctgcccccccgataaagtgatgctggagggcagctgtgtgccagaggaggcatgtacccagtgcatcggagaggatggtgtccagcatcagttcctcgaggcgtgggttccagatcaccagccctgtcaaatctgcacttgcctgagtggccgaaaggtaaactgcactactcaaccatgtccaaccgcaaaggctcctacatgcggcctctgtgaggtggctcgcttgcgacagaacgctgaccagtgttgccccgaatatgaatgtgtgtgcgatcccgtctcttgcgacttgcctcccgttccacactgtgagcgggggctgcaacccaccctcaccaatcccggggagtgcaggccaaattttacctgcgcttgtaggaaggaagaatgcaagcgcgtgtcacccccgagctgcccccctcatcggctgcccaccttacgaaagactcaatgctgcgacgagtatgagtgtgcctgcaattgtgtaaactctacggtatcttgtcctctgggatatctcgcctcgaccgcgactaacgactgtgggtgtactaccaccacttgtctcccagataaggtctgtgtccacagatcaaccatctacccggtgggacagttttgggaagaaggttgcgatgtgtgtacatgcaccgatatggaagatgctgtgatgggcttgcgggtagcccaatgcagccaaaaaccctgcgaggacagttgtagatccgggttcacctacgtgttgcatgagggagagtgctgcggcagatgtctaccatccgcatgcgaagtggtgaccggcagtccacgcggtgattcccagagttcttggaaatccgtggggtctcagtgggcgtccccagagaatccatgcttgattaatgagtgtgtcagagtgaaggaggaggtgttcattcagcagcggaacgtgtcttgcccacagctggaagtgccagtgtgtccctccggcttccagctgtcttgtaaaacgtccgcctgctgtccctcctgtcggtgtgagaggatggaggcatgcatgcttaacggcaccgtgatcggccccggtaaaacagtaatgatcgacgtgtgtactacctgccgatgcatggtgcaggtcggggtcatctctggcttcaagctggaatgccgaaaaaccacttgcaacccatgtcccctgggatacaaggaagagaataatactggtgagtgctgcggccgctgcctgccaaccgcctgcacaatccagctgagaggtgggcaaataatgactttaaaacgagacgagacgttgcaggacgggtgcgacacccacttttgtaaagtgaatgagagaggggaatacttctgggaaaagcgagttactggatgccccccttttgacgaacataagtgcttggccgaggggggcaagataatgaagatccccggtacttgctgcgacacatgcgaggaacctgagtgtaatgacatcaccgcacgactacagtacgtaaaggtcgggtcttgcaagagcgaagtggaggtcgacatccactactgtcagggcaagtgcgcttctaaggcgatgtatagcatcgacattaatgacgtccaggaccagtgcagctgttgtagccctacccgcaccgagccgatgcaggtcgccctgcattgcaccaacgggtctgtggtttaccacgaagttctgaacgccatggaatgcaagtgtagcccaaggaaatgctctaag

SEQ ID NO: 12537 - DNA, 8439 bp, Artificial Sequence
  derived and/or modified sequence
atgatccccgcccggttcgcaggtgtgctgctggcactagccctgattctgcctggcactctgtgtgcggagggaaccaggggacgaagcagtactgccagatgcagtttgttcggctcagacttcgtgaacaccttcgacggctctatgtacagcttcgccggatactgtagttacttgctggctggcggatgccaaaaacggtcgttttctatcatcggagacttccagaacggtaaacgcgttagcctgtctgtgtacctcggagaattttttgatatccaccttttcgttaacggcacagttacccagggggatcagcgtgtgagtatgccatatgccagtaagggtttatatcttgagaccgaggcgggatattacaagctgagtggcgaagcctatggcttcgtggcgaggattgacgggtcgggtaatttccaggtcctcctgagtgacagatattttaataaaacctgcggcctgtgtgggaactttaacatctttgccgaggatgacttcatgacccaagagggtacccttacaagcgacccctatgacttcgccaactcctgggccctatcatcaggtgagcagtggtgtgaaagggcaagtcctcccagtagttcatgcaacatctcgagtggcgagatgcagaaaggcctctgggagcaatgccagctactgaaaagtacatctgtgttcgctcggtgccaccccctggtggaccctgagccttttgtagccttatgtgagaagactttatgcgagtgcgctgggggattggagtgtgcttgcccagccctgctggaatacgcgcggacctgtgcacaggaagggatggtcttgtacggctggactgaccatagcgcatgctccccggtttgccccgcagggatggagtacaggcaatgtgtatcaccatgtgcccggacttgccagtccctacacatcaacgaaatgtgccaggaaagatgcgtggacggctgctcttgccccgaagggcagctcctggacgaggggctgtgtgtggaatcgacagagtgtccttgcgtgcactctggtaagagatatccaccagggacgtccttgtctagggattgtaatacatgcatttgtagaaattctcagtggatatgctcaaatgaggaatgtcccggggagtgcttagttactggtcaaagtcattttaaatcattcgacaacaggtactttacgttcagcggaatttgccagtaccttctcgccagggactgccaagaccacagctttagtatcgtcatcgagacagttcagtgtgcagatgaccgcgatgcagtgtgcactcggagtgtcaccgttcggctgcccgggctacacaactcactggtgaagcttaagcacggcgccggagttgcgatggacggtcaggatgttcagctccctcttctaaaaggcgatctgaggattcaacatacggtgaccgcatcagtgagactatcatacggtgaggacctccaaatggattgggatggccgcggaaggctcctggttaagctttcacccgtgtacgcagggaaaacgtgcggcctttgtggcaattacaacgggaaccagggcgatgactttctaaccccttctggactagccgagcctagggtggaagactttggaaatgcatggaagctacacggggattgtcaagatctgcagaaacagcatagcgacccctgtgccctgaacccacgcatgactcggttctctgaggaagcctgcgccgttctgacttcccctactttcgaagcctgtcacagggccgtgtctcctctgccttacttgcggaactgtcgatacgacgtctgttcgtgttccgacggcagggagtgcctgtgtggcgccctggcctcatacgccgcagcatgtgctggaaggggcgtgagggtagcgtggcgggagcctgggcgatgcgagctaaactgtcctaagggccaggtatatctacagtgtggcaccccctgcaacctgacctgccggtccctctcctatccggatgaagagtgtaacgaggcatgtctggagggctgtttttgccctccgggcctgtacatggatgaaaggggggactgtgtgccaaaagcgcagtgtccttgctactacgacggagagatcttccagcccgaggacatattctccgaccaccatacgatgtgctactgcgaagatggctttatgcactgtaccatgagtggagtgcctggcagcctgttgccagacgcagtgttatcttctcccctgagccaccgaagcaaaaggtccctgtcttgccggcccccaatggtgaaattagtgtgtcccgctgataacctgcgggccgaaggccttgagtgtaccaagacctgccaaaactacgatctagagtgtatgagtatgggctgtgtgtccggttgtctatgcccaccaggaatggtgcgccacgaaaacaggtgtgtggctctcgagagatgcccctgcttccatcagggaaaagagtacgcccctggtgagaccgtcaaaatcggatgcaacacatgtgtttgtcaggaccggaagtggaattgcacggatcatgtctgtgacgccacttgtagcactattggtatggcgcactacctgacttttgatgggttgaaatacctgttccccggagaatgtcagtacgttctggtgcaggactactgcgggagcaacccagggacattccgcatcttggtaggcaacaagggatgcagtcatccgtcggtaaagtgcaagaaaagagtcactatattggtggagggtggtgagattgaactcttcgacggggaggtgaacgtaaaaaggcccatgaaagatgagactcattttgaagtggtcgagagcggcagatatattattctgctgttaggaaaagctctttctgttgtttgggaccggcacctgagcattagcgtggtcctgaaacagacataccaggaaaaagtgtgcggactatgcgggaattttgacggcattcagaacaacgacttaacctcaagcaatctgcaggtcgaggaggatccggtggactttggaaatagctggaaagtgtcatctcaatgtgccgatacccggaaagtcccgctcgactcatcccccgccacctgtcacaacaacatcatgaaacagaccatggtcgactccagttgtaggattctcacgtctgacgtgttccaggactgcaacaaactggtcgaccccgaaccttacttagatgtctgcatatacgacacttgctcttgcgaatcaattggtgattgcgcctgtttttgcgacacaatagctgcatatgcccatgtgtgtgctcagcacggtaaagtagttacctggcggactgccaccctgtgtccacaatcttgtgaggagaggaaccttcgcgaaaatggatatgaatgcgaatggaggtacaactcctgtgcgcccgcctgtcaggtaacttgtcagcatcccgagccgctcgcatgtcctgtacagtgcgttgaaggctgtcatgcgcactgtccacctggcaagattctggacgagctgctgcaaacttgcgttgaccctgaagactgcccggtttgcgaggtggccggtagacgattcgcatccggaaagaaagttacactcaatccttctgaccctgagcactgtcaaatctgtcattgcgatgtggtgaaccttacatgcgaggcatgtcaggagccaggcgggctagtcgtcccacctaccgacgccccagtgtctcctaccaccctgtatgttgaagatattagtgagccaccactgcacgatttttattgctccaggctgttagacctggtgttccttttagatggtagcagcaggcttagtgaggccgaatttgaggtgctaaaagcctttgtggttgatatgatggaaagacttcggattagccagaaatgggtccgcgtagcagtggtagagtatcacgatggctctcacgcctatatcggcctgaaggatcgcaagaggccatctgaactgagaaggattgcttcccaggtgaagtacgcagggtcccaagtagcctctacttctgaggtgttaaagtataccttgtttcagattttctcaaagatagatcggcctgaggccagccgtatcaccctgttgttaatggcttctcaggaaccacaacgaatgtcacggaattttgttcgctatgtccagggattgaagaaaaagaaggtgatagtaatcccggtcggtatcggcccacatgccaatttaaagcagatcaggctcattgagaagcaggcaccagagaataaggcgttcgtgctgtcttccgtggacgagctcgagcagcagcgtgacgagattgttagttacctgtgcgacctggccccagaggctccaccaccaaccttaccgccagacatggctcaggtgacagtggggccaggcctactgggagtgtcaacgcttgggccaaagagaaactccatggtcctggatgtggcgtttgtcttggaaggtagcgacaagataggcgaagctgacttcaatagaagtaaagagttcatggaagaggtaatccagagaatggacgtggggcaggattcgatccacgttacggtattgcagtactcctatatggtgacagtagaatatccattttcagaggcgcagtccaaaggcgatattctccaacgcgtgcgggagattcggtatcagggaggcaatcgcactaacaccggcctagccctgaggtatctttcagatcactcctttctcgttagccagggtgatcgcgagcaagcacccaatctcgtgtatatggtgacggggaatcctgctagcgacgaaatcaagagattgcctggagacatacaggtggtgcccatcggcgtcggtcctaatgcaaatgtacaggaactcgaacggattggatggccaaatgccccaattctgatacaggatttcgaaactcttccgcgggaggctccagacttagtgttgcagcgctgctgctctggggaaggtctgcagatcccgactttgtcacctgctccagattgtagccagcctttggatgtgatcctactgctggacggttcatcctccttcccagcgtcctacttcgacgagatgaaaagctttgcaaaggcatttatctccaaagctaatatcggcccgcggctaacacaagtgagcgtgctccagtatggatcgattactacaatcgacgtcccttggaacgtggtgcccgagaaagcgcatctcctcagtctggtggatgtgatgcagcgtgagggtggtccgtctcagattggcgacgctctgggtttcgcggtgaggtatttgacgtcagagatgcatggtgcccgacctggggcatccaaagcagtagtcatattggtcacagacgttagcgtggatagcgtggacgctgcagcagacgccgcccggtctaaccgggtcaccgtgtttccaatcgggattggagatcggtacgacgccgctcagctcaggatcttagccggacccgccggagatagtaacgtcgtgaaattacagcggatcgaggacctgcccacaatggtaacacttggcaattccttcttgcataaactctgctcaggctttgttcgtatctgtatggatgaggacgggaacgagaagcgaccaggtgacgtgtggacgcttcctgaccaatgtcacaccgtaacctgccagcctgacggacaaacacttttgaagtcacacagagtaaattgtgatcggggtctgcggccatcctgccctaactcacaatccccagtcaaagtagaggaaacctgtggttgcaggtggacctgcccttgtgtgtgcactggctcctccaccagacacatcgtcacttttgacggccagaactttaagttgactggttcctgcagttacgtgctgttccagaataaggagcaggacctcgaagtgatcttacacaatggggcttgcagccctggcgctcgccaaggatgcatgaaatcgatcgaggtgaaacattctgcactgagcgtcgaactgcacagtgacatggaagtgacggttaatgggagacttgtgagtgtcccgtatgtcggcggcaatatggaagtgaacgtctacggcgcgataatgcatgaagtgcgcttcaaccacctaggtcacatattcacttttactccccagaacaatgaattccagctgcagctaagccccaaaaccttcgccagcaaaacctatgggctttgtggtatctgtgacgagaacggcgccaatgacttcatgctgagagacggtacggtcactacagattggaaaactttggtgcaggaatggacggttcagcgccccggacaaacctgccagcccattttagaagagcagtgtctggttccagattcatctcattgtcaggtgctgctcctgcccctgtttgccgaatgccacaaagtgctggcccccgccaccttttacgcgatctgccagcaggacagctgccaccaggagcaggtatgcgaggtgattgccagctatgcccatctgtgtcgcacgaatggcgtctgcgtagactggagaacccccgacttctgcgccatgagttgcccgccgtccctcgtttacaaccactgtgagcacgggtgcccacgccattgcgacgggaacgtctcctcatgcggagatcacccctccgaggggtgcttctgcccaccagacaaagtcatgctggaagggtcgtgcgtgccggaggaggcctgtacacagtgcatcggtgaggacggagtgcagcaccagttcttagaggcctgggtgccagaccatcagccatgccagatttgcacctgcctctcgggccgcaaggtgaactgtacaacgcagccttgtcctacggctaaggcccctacatgtgggctctgcgaggttgccaggctgcggcagaacgcagatcaatgttgtcctgagtacgaatgcgtttgtgaccctgtgtcctgtgatttgccccctgttccccactgcgagagaggcctgcaaccaaccctcacgaaccctggagagtgccgccccaacttcacatgcgcttgtaggaaagaggagtgcaaacgggtatcacctccctcttgcccacctcataggctgcccactttacgcaagactcagtgttgcgatgaatacgagtgtgcttgtaattgcgtgaacagtacggtcagctgtcccctggggtaccttgccagcacagctacaaatgactgcgggtgcacgacgacaacctgtctgccagataaggtgtgtgtccacagatctactatctacccagtcggacagttctgggaggaagggtgtgacgtctgtacctgcaccgatatggaggacgctgtgatggggcttcgagttgctcagtgctcacagaaaccatgtgaggactcttgccgctccggcttcacatacgtcttgcatgaaggggagtgttgtgggcgttgtcttccatccgcctgcgaagtcgtcacaggttctccacgaggggacagccagtcatcttggaagtcggtcggaagtcagtgggccagcccggagaatccttgcctgatcaacgagtgcgtgcgtgtgaaagaagaggtgttcatacagcagcggaacgtttcttgtccacaattggaggtgccagtttgcccatcagggttccagctctcatgtaaaacttcggcatgttgcccctcctgccgctgtgaaagaatggaggcctgcatgttaaatgggaccgtgatcggacctgggaaaaccgtgatgatagacgtatgcaccacctgcaggtgtatggtacaggtcggggtgatctctggttttaaattagagtgccgcaagaccacatgtaacccatgtcctctcggttacaaggaggagaacaacactggagaatgctgcggtaggtgcctccccacagcttgtacaattcagctgagaggaggacaaatcatgacactcaagagagacgagacactgcaggatggctgcgatactcacttttgcaaagtcaacgagaggggcgagtacttttgggaaaaacgcgtgaccggctgcccaccatttgatgaacacaaatgtctggccgaaggagggaaaattatgaagataccaggaacgtgttgcgacacgtgtgaggaaccagagtgtaatgacataaccgccaggctgcaatacgtgaaagtgggctcctgtaaatccgaggtggaggtagacattcattattgccagggtaaatgcgcctctaaagcaatgtacagtattgatattaacgacgtccaggatcagtgctcttgctgctcacccactcgcacggagcctatgcaggttgcactgcactgcaccaacgggagtgttgtctatcatgaggtgttgaacgctatggagtgcaaatgttcacccagaaaatgtagtaaa

SEQ ID NO: 12538 - DNA, 8439 bp, Artificial Sequence
  derived and/or modified sequence
atgatccctgctagatttgcaggtgtactgctggcgcttgctctgattttgcctggcactctgtgcgcagaaggaactcgtggccgctcctccaccgctagatgttccctgttcggctcagacttcgtcaacacctttgatggcagtatgtactccttcgccggatattgtagctacctgcttgctggcggctgccagaaaaggtcattctctataatcggcgacttccagaatggaaagagagtgtctttgtccgtgtacctgggagagtttttcgacatccatctgtttgtcaacggtactgttacacagggcgatcagcgagtgagcatgccgtacgcatctaaagggttatacctggaaaccgaggcaggatattacaagctttctggtgaggcctatggtttcgtggctcgcattgatggaagtggcaactttcaggtgttgctgagcgatagatactttaacaaaacctgcggcctctgcggcaactttaacatctttgcagaagacgacttcatgacgcaagaaggcactcttacaagcgacccttacgactttgccaactcatgggcactcagctcaggggaacagtggtgcgagagagcatccccacctagctcttcatgtaacatttccagcggagaaatgcagaaaggcctgtgggagcaatgccaactactgaaaagcacctctgttttcgcacgctgtcaccctcttgttgatcccgagccgttcgtcgcactatgcgagaagaccctgtgcgaatgcgctggcggtctggaatgtgcttgccccgctttgcttgagtacgctcgaacatgcgctcaggaaggaatggtgctctatgggtggactgaccatagcgcgtgcagccctgtctgccccgctggaatggaatatcgccaatgtgtctccccatgtgccagaacctgccagagtctgcacatcaatgaaatgtgccaggagcgttgtgtggatggttgcagttgcccagaagggcaacttcttgatgagggactgtgtgtggaatcgactgagtgtccgtgcgtacacagcggcaagcgttacccacctggtacctccctgtcgcgggattgcaatacatgcatctgcagaaacagccagtggatttgttccaacgaagagtgtccaggagagtgcctggtcacaggacagtcacacttcaaaagctttgataacaggtactttacattttctggtatttgtcagtacctcctggctcgcgactgccaagaccactccttctccattgtcattgaaactgtgcagtgtgccgatgacagagacgccgtgtgcacgcgaagtgtgacggttcgcctgccaggactgcacaacagtctagtcaagctcaaacatggagctggggtcgctatggatggccaggacgtgcagttacctctgcttaagggggatttgagaattcagcatacagtcaccgctagcgtgaggctcagctatggagaggatcttcaaatggactgggacggacgcggcagactacttgtaaagttatccccagtgtacgcaggaaagacttgcggattatgtggaaactataacgggaaccagggggacgatttcctgactccatcggggctggcggaaccaagggtggaagatttcggaaacgcctggaaattgcatggcgattgccaagacctgcagaagcagcacagtgatccttgtgcattgaatccacggatgactaggttctctgaggaggcttgcgccgttcttactagcccaacctttgaggcatgccatagagccgtcagcccgcttccatatctccgcaactgtagatatgatgtttgctcatgttcagatggccgggagtgcctctgcggtgcactggcttcttacgcagctgcttgcgcaggtcgtggggttagagtcgcatggagagagcccggtagatgtgagctgaactgcccaaaagggcaggtgtacttgcagtgtggcacaccatgcaacctcacctgccgaagcttaagctaccccgacgaagaatgcaacgaagcctgtttggagggttgtttctgtcctcctgggttgtacatggacgagcgcggggactgcgtccctaaggcacagtgtccgtgctattacgacggcgaaatattccaacctgaggacatcttcagcgatcaccacaccatgtgttactgcgaggacggtttcatgcactgcaccatgagtggcgtcccaggcagcctgcttcccgatgctgttttgtcctcccctctgtcacacaggtcaaaaaggtctttatcctgcaggccccccatggtgaagctagtgtgtcccgctgacaacctgcgcgctgaggggctggaatgcactaaaacttgccagaactacgacctggagtgtatgtccatggggtgcgtgtcaggatgcctttgtcctccgggtatggtgaggcacgagaacaggtgtgtagccctggagagatgcccatgctttcatcaggggaaagagtacgctcccggcgagactgttaagattggctgtaacacctgcgtctgccaggacaggaaatggaattgtaccgaccacgtgtgcgacgctacatgctccaccatcggcatggcacactatttaacattcgatgggcttaagtatctgttcccaggagagtgccaatacgtcctggttcaagattactgtggttcaaatcctggaacctttcggatcttagttggaaacaagggttgttcacatcctagtgttaagtgcaaaaagcgcgtcacgatcttggtggagggtggagagatcgagctttttgacggagaggtgaatgttaaaaggccaatgaaagatgaaactcatttcgaagtagtagagagtggaagatatattatactgctgttgggcaaggccttgagcgtcgtctgggatagacacctgtccatatctgtcgtgctgaagcaaacatatcaggaaaaagtgtgcgggctttgcggcaattttgacggaattcagaacaacgatcttaccagctctaatctacaggtggaagaagaccccgtcgacttcggaaatagctggaaagtctccagtcagtgcgctgatacaagaaaggtgcccttggactcatcacctgccacttgtcataataatatcatgaagcagaccatggtcgatagctcctgtcgcatcctgactagcgatgtcttccaggactgcaacaaactggtggaccctgaaccatatctggatgtgtgcatctatgatacctgcagctgcgaatctatcggtgattgtgcgtgcttctgcgacaccatagctgcatatgcgcacgtatgtgcccagcacgggaaagtggtcacttggaggacagccacactgtgtccacaatcttgcgaggagaggaatctgagggaaaatggctacgagtgtgaatggagatacaacagctgcgctcctgcgtgtcaggtgacttgccaacacccagagcctctggcctgcccagtacagtgcgttgagggctgtcatgctcattgcccgccagggaaaatcctggatgagttactccagacatgtgtggacccagaggactgtccggtttgcgaggtagctggaaggaggtttgcttcgggtaaaaaggtgactcttaacccatcagacccagagcactgccaaatctgccattgcgatgtggtcaaccttacgtgcgaagcttgccaggagcccggcggtcttgtcgtgccacccacggacgctccagtgagccctacaactctctacgtcgaggatatatcggagccacctcttcatgacttttactgcagcagactgctcgatcttgtctttctactggacgggagctctcggctcagtgaggctgaattcgaagtcctgaaagccttcgtcgtggatatgatggagcggttaaggatcagtcaaaagtgggtacgggtggccgtggtcgagtaccacgatggatctcacgcatacatcggtcttaaggaccgtaagagacctagtgagctgagaaggatcgcaagccaggtcaaatacgctgggagtcaggtcgccagcacatctgaggtcttgaagtatacattgtttcaaattttctccaaaatcgacaggcctgaagcttcaagaatcaccctgcttctcatggcttctcaagaaccacagcggatgagtagaaactttgtgaggtacgttcaaggcttgaaaaaaaagaaggtcattgttataccagtgggaattggacctcatgctaacttgaaacaaataagactgatcgaaaagcaagcaccagaaaacaaagcttttgtactatcttcggtcgatgagctggaacagcaaagggatgaaatcgtctcttatctgtgcgatctggctccggaggcaccaccaccaaccctcccaccggatatggcccaggtgaccgtcggacccggccttctgggagtatccacattgggacctaaaaggaactctatggtgcttgatgtcgcctttgttctggagggatctgataaaatcggggaggccgattttaatcgctcaaaagaatttatggaagaggttatccagcgcatggatgtcggccaggactctatccatgtcacagtgcttcaatactcttatatggttactgtagaatacccgttttctgaggctcaatccaagggcgatatcctgcagcgcgtgcgcgaaatcaggtaccagggcggcaacaggaccaacacaggactggctctcaggtacctgagcgaccattctttcctggtgagccaaggcgacagagagcaggcgccaaacctcgtctacatggtcaccggaaacccagcctcagatgaaattaagcggcttcctggcgacatccaagtagtgccgatcggcgtcggcccgaatgctaatgtccaagaactggaacgtataggatggccaaacgctcctatcttgatccaggacttcgaaacccttccaagggaggctccagacctggtactgcaacgctgctgttccggtgaaggtctccaaatcccaactcttagccctgctccagattgctcccaacctctagacgtgatcttattgcttgatggctcgtccagcttcccagcaagctattttgatgagatgaagagctttgctaaggctttcatctctaaggcaaatatcggaccccgtctcacccaggtctctgtgcttcagtatggaagcattacaactatcgacgttccatggaacgtcgttcccgagaaagcccatcttctttccctggtcgatgtgatgcagagagagggaggtcccagccaaattggtgatgcactgggctttgctgtccgctacctaacaagcgagatgcacggcgcccgccctggagcttccaaagccgtggtgattctggttaccgatgttagcgtggatagcgtggacgctgccgctgacgccgctaggtcaaatagggtgaccgtctttcctatcggaatcggggataggtacgatgcagctcagttgaggatcctggcaggaccagccggcgacagcaacgtcgtgaagcttcagcgcatagaagacttgccaaccatggtcacgctcggcaatagcttcctgcataagctgtgcagcggatttgttcgcatctgcatggatgaggatggcaatgagaaacgtcccggagacgtgtggacacttcctgatcaatgtcacacagtgacctgccaaccagatggccaaaccctgctgaagtctcacagggtcaactgtgacaggggtttgaggccatcttgtcccaatagccaatcccccgtgaaagtggaggagacttgcggttgcagatggacctgcccttgtgtctgcactgggagtagcaccaggcatatcgtgacctttgacggccagaatttcaaacttaccggttcttgtagctatgtgctgttccaaaacaaggagcaagatcttgaggttattctgcacaatggtgcttgttcacccggcgctcgacagggctgtatgaaatccatcgaggtcaagcatagcgctttatcagtcgagctgcactccgacatggaagttacagtcaacggaagattagtcagtgtcccttacgtgggcggcaacatggaggtgaacgtctatggtgcaatcatgcacgaggtgcggttcaaccatctgggacacatctttactttcaccccgcaaaacaacgaattccagctgcagctgagtcctaaaacattcgctagcaaaacatatggtctgtgcggcatctgcgacgaaaacggtgccaacgatttcatgctcagagacggaactgtgaccacagactggaaaaccctggtccaggagtggactgtgcagcggcctggacagacttgccaaccaatactagaggaacagtgccttgtccccgacagctcacactgtcaggtgctgctgctgccactgttcgccgaatgccacaaggtactggcccctgcaactttctatgcaatctgccagcaagatagctgccaccaggagcaggtctgtgaagttatcgccagctatgctcatctgtgtagaaccaatggtgtgtgcgtcgattggcggactcctgatttttgcgctatgagctgccctccctctctggtctataatcactgcgagcacggctgccctagacattgtgacggtaacgtaagttcttgcggagatcacccatccgagggttgcttctgccctcctgacaaggtgatgctagagggctcatgcgtcccagaagaggcctgcacccagtgcatcggcgaggacggggtgcagcatcagtttttagaagcatgggtgccagaccaccagccatgtcaaatatgcacatgcttaagcggccgcaaggtgaattgcactacccagccctgccctacagccaaggcccccacctgcgggctatgcgaggtggctagactgcgacagaatgctgatcaatgttgccctgagtacgagtgtgtttgcgaccccgtttcatgcgaccttccacctgtgccacactgcgaacggggtctgcaaccgaccctcacaaaccctggtgaatgcagacctaactttacttgtgcttgcaggaaggaggaatgcaaacgagtcagcccccctagctgcccaccacacaggctgcctactctgcgaaagacccaatgctgtgacgaatacgagtgtgcctgcaattgcgtgaattccaccgtctcatgcccattgggctatttggcatcgacagccacgaacgactgtggatgcactaccactacctgtcttcccgataaggtgtgtgtgcataggtccactatctatccagtgggacagttctgggaggagggctgtgatgtgtgcacttgcaccgacatggaagacgcagtgatgggattgcgtgtggcacaatgcagccaaaaaccttgcgaagactcatgtagatcaggtttcacctatgtcctacacgaaggagagtgctgtggtaggtgcttgccgtcggcatgcgaagtagtaaccgggagccctagaggagacagccagagttcttggaaatcagttgggagccaatgggcatcccctgagaacccatgtttaattaatgaatgcgtgagagtgaaggaggaggtgttcatccagcagcgaaatgtgagctgcccacagctggaagtgcccgtgtgtccaagcggcttccaactctcgtgtaagaccagtgcttgctgtcctagctgtcggtgcgagcggatggaggcctgtatgctcaacggaaccgtaatcgggccaggaaagacagtaatgatcgatgtctgcaccacatgcaggtgcatggttcaggttggagtcatcagtggatttaagctggaatgccgtaagacaacctgcaacccctgtccccttggctacaaagaagagaacaacactggggaatgctgcggtcgctgcctgccgaccgcctgcaccatacaacttcgcggaggtcaaatcatgactcttaaacgggatgagaccttgcaagatggctgcgatacccacttttgcaaagtaaacgagaggggtgaatatttctgggagaagcgcgtgaccgggtgcccaccctttgatgaacacaagtgccttgctgagggaggaaagatcatgaaaattcccggaacctgttgtgacacatgcgaggagccggagtgtaacgatattacagccaggctgcagtatgtgaaagttggaagttgtaagtccgaggtggaagtggacatccactactgtcaaggaaaatgcgcctctaaagctatgtacagcatcgacatcaacgacgtgcaagatcagtgctcttgctgttcccctactcgcaccgaaccaatgcaagttgctctgcactgcacaaacggctctgtggtctaccatgaagtgctgaatgctatggagtgcaaatgcagtcccagaaagtgttctaag

SEQ ID NO: 12539 - DNA, 8439 bp, Artificial Sequence
  derived and/or modified sequence
atgataccagcacgcttcgctggtgttcttttggctttggccttgattctgcccggtactctctgtgccgagggcaccagaggccgctcctcaactgctcgctgttcactttttggctcagacttcgttaatacgttcgatggttccatgtactcatttgcgggatactgctcctacctgcttgcaggtggttgccagaagagatcctttagcattatcggcgactttcaaaatggcaagagggtttcactgagtgtatatctcggcgagttcttcgatatccatctctttgtcaacggaaccgtcactcaaggtgatcagagagtctccatgccctatgcgtccaagggactgtatctggagaccgaagccggttactacaaattgtcaggcgaagcttatggtttcgtcgctcgcatcgacggaagcggtaacttccaggtcctgctgtctgaccgctacttcaacaagacttgcggtctgtgtggtaatttcaacatctttgctgaagatgatttcatgacgcaggagggtactctgacctcagatccctacgatttcgcgaactcctgggctctttccagcggagagcagtggtgtgagagagcttcacctccttccagctcctgcaatatttcttctggcgaaatgcagaagggcctttgggaacaatgccagctcctgaagtccacatccgtgttcgctagatgtcaccccttggtcgacccagagccttttgtggccctgtgtgaaaagacactctgcgagtgcgctggtggcctggagtgtgcctgtccagctcttctggaatacgccaggacttgcgcacaggagggcatggtcctgtatggctggaccgatcactccgcctgttctccggtatgcccggccggtatggagtacaggcaatgcgtcagcccgtgcgctcgcacatgtcagtcactccacattaacgaaatgtgccaggagaggtgcgttgatggatgctcctgcccagaaggtcagcttttggatgagggactgtgcgtggagtccaccgaatgcccgtgcgtccactccggaaagcgctacccccccggaacatctctgtccagggactgcaatacatgtatctgccgcaacagtcaatggatctgttctaacgaggaatgtcccggcgaatgtttggtcactggacagtctcacttcaagagtttcgacaacaggtactttacattcagcggcatctgtcagtacctgctcgccagagattgtcaggaccacagtttcagcatcgtgatcgagaccgtgcagtgcgcagatgatagagacgcggtttgtacgcgcagcgttactgtccgcctgcctggcctgcataatagtcttgttaagctgaagcacggcgcaggcgtcgccatggacggacaggatgtgcagcttccccttttgaaaggcgatctgaggattcagcacactgtaaccgcttcagtacgcttgtcatacggcgaggatcttcaaatggattgggatggccgcggcagactgctggtgaagctctctcctgtctacgcaggcaagacatgcggcttgtgcggcaattacaatggcaatcagggtgacgattttctcactccctccggacttgcagaaccccgcgttgaagacttcggaaacgcctggaaactgcatggcgactgtcaggatctgcagaagcagcattccgacccctgtgcgctgaaccctaggatgaccaggttctccgaagaggcttgcgccgtgctcacttcacccacattcgaggcttgtcaccgcgctgtgtccccactgccctatctcaggaactgtagatacgacgtatgctcatgtagtgatggcagggaatgtctttgtggcgccctggcctcttatgcggccgcatgcgcaggtagaggagtgagggtggcctggcgcgaacctggtagatgtgaactcaattgtcccaagggtcaggtataccttcaatgcggtacgccctgcaatctcacctgtaggtccctttcttatcccgatgaggaatgtaatgaagcctgcctcgagggttgcttctgtccacctggcttgtatatggatgagcgcggcgactgcgtccccaaagcgcagtgtccgtgttactacgatggtgaaatttttcagcctgaggacattttctccgatcaccacaccatgtgttactgcgaggacggattcatgcactgtactatgagcggtgtccccggctcattgcttcccgacgccgtactgagctctcctctgtctcatcgctctaaaaggtctctgagttgccgccctcccatggttaagctggtttgtcctgccgataatctgagagcggaaggtctcgaatgcacaaagacctgccaaaattacgatttggagtgcatgtctatgggatgcgttagtggttgtctctgtcctccgggaatggtgaggcacgagaacaggtgcgttgccctggagagatgcccctgtttccaccaaggtaaggaatatgcgcctggtgagactgtcaagataggctgcaacacatgtgtgtgccaggacagaaagtggaactgtactgaccatgtctgcgatgctacctgcagcacaatcggtatggcgcactacttgacattcgatggactgaaatatttgtttccaggtgagtgccagtatgtgctggtgcaagattattgtggcagcaaccctggaacctttcgcattttggtcggtaataagggttgcagtcaccccagtgtgaagtgcaaaaaaagggtgacaatcctggtcgaaggcggcgagatcgagctgtttgatggagaggttaacgtgaagaggcccatgaaggacgagacgcacttcgaagtcgtggagtctggcagatacatcatcctcctgctcggaaaggcgctctcagtagtttgggaccgccacctgagcatcagtgtggtcttgaaacagacctatcaagagaaggtctgcggtttgtgtggaaatttcgacggcatccaaaataatgacctcacttcctctaacttgcaggtcgaggaggatcctgttgattttggaaattcctggaaagtgagtagccagtgcgcggacacgagaaaggttcctttggacagtagcccagcgacttgccacaataacataatgaaacagacgatggtggattcctcttgcaggatcctcacttccgacgtcttccaggattgtaacaaattggtggacccagagccttacttggacgtctgcatttacgatacatgctcatgcgaatccatcggtgattgcgcatgtttttgtgacaccatcgcggcctacgctcacgtgtgcgcacagcacggtaaagttgttacctggaggacagctactctttgcccacaatcctgcgaagagcgcaacctgcgcgaaaacggatatgagtgcgagtggcgctacaactcatgcgctccagcgtgtcaggtaacttgtcaacacccagaacctctcgcctgtccggtgcagtgcgtagaaggttgccacgcacactgtcctcccggaaagatactggatgagctgttgcaaacctgcgtggatcccgaagactgccctgtgtgcgaggtggcgggccgcagatttgccagtggtaagaaggtgacattgaatccatctgatcccgaacattgtcagatctgtcactgtgatgtcgtgaacctcacttgtgaagcatgtcaggaaccaggcggactcgtggtgccacccacagacgcaccagtttctccaacaacgctgtacgtggaggacatcagcgagccccccttgcacgatttctactgtagccgcttgctcgatctggtctttctgctcgacggctctagtaggctgagtgaggcggagttcgaagtgctgaaggcgttcgtcgtcgacatgatggaaaggctccgcatcagtcaaaagtgggtaagggtggccgtggtggagtatcacgacggttctcatgcctatattggcctcaaagataggaaaaggccctccgaattgaggcgcatcgccagccaggttaagtacgctggatctcaggtggccagcacatccgaagtactcaaatatactctgtttcaaatattttccaaaatcgatcgccctgaagccagtcgcatcacccttctcctgatggcctcccaagagccccaaagaatgagtagaaacttcgtgagatatgttcagggactgaagaagaaaaaagtgatagtcatcccggtgggcatcggtcctcacgccaatttgaaacagatccgcctgattgaaaaacaagcccccgagaacaaggcgttcgtgctgtcttcagttgacgagttggagcaacagcgcgacgagattgtcagctatctgtgtgatctcgctccagaagccccccctccgactctgccgccagacatggcccaggtgactgtgggacccggattgctgggtgtcagcaccctgggccctaagcgcaactctatggttcttgacgtcgctttcgtgctggaaggcagtgataagattggagaagcagattttaacaggtctaaagagttcatggaggaggtgattcagaggatggatgtgggccaagattcaatccatgtgacagtactgcaatactcttatatggtaaccgtggaatatccgttcagcgaggctcaatcaaagggcgacattctgcagagggtcagagagatcaggtatcagggaggaaatcgcactaacactggactcgccctcaggtacctttccgatcattcatttcttgtgtcccagggagacagggaacaggcccctaacctcgtttacatggtaactggcaaccctgctagcgatgagattaaaaggttgccgggcgacattcaggttgtgccgattggcgtcggccccaacgccaatgtgcaggagttggaacgcatcggatggcctaatgcaccgatcctgatacaggactttgagactttgccacgcgaggctcctgacctcgtcttgcagagatgctgtagcggagagggattgcagataccaacactgtcacctgcacctgactgcagccagccattggacgtgatcctcttgctggacggttcatcttccttccccgcgtcatactttgacgaaatgaaatcctttgcaaaagctttcattagtaaagccaacattggacctcgccttacacaggtgagtgtactgcagtatggttctataacgacaatcgacgtgccctggaatgtggtccctgagaaggcccatctcctctctcttgtggatgtgatgcagcgcgagggcggaccctcacaaatcggtgacgctctgggcttcgcagtgcgctatctcacaagcgaaatgcacggcgcaaggcctggcgcttctaaagctgtcgtcatcctcgtcactgacgtgtcagtggactccgtagacgctgctgctgatgccgccaggtccaacagggtcaccgttttccctatcggaatcggtgacaggtatgacgcagctcagctcaggatcttggccggccctgctggagattcaaacgtggtgaagctccagagaattgaagacttgcccacgatggttaccctcggaaacagttttctgcacaagctctgcagtggatttgtcagaatctgtatggacgaggatggtaacgagaagcgcccgggagacgtgtggacactcccagatcagtgccacacagtgacttgccaacccgatggccagaccctccttaagtcccatagggttaactgcgacagaggtctgaggccttcatgccccaatagtcagagtcccgtgaaggtggaggagacttgcggctgtcgctggacctgcccctgcgtttgcaccggcagttccactaggcacatcgttactttcgacggacagaatttcaagttgactggctcttgttcttacgtactcttccaaaataaagaacaagatctggaagtgattcttcataatggcgcctgctctcctggcgcaagacagggatgtatgaaaagcatagaggttaagcacagcgcactgtcagtggaactgcattcagatatggaagtgaccgtcaatggtagactcgtaagcgtcccctacgtgggtggaaacatggaggtaaatgtgtatggcgcaatcatgcacgaagttaggttcaatcacctgggtcacatcttcacctttactcctcagaataacgagtttcagctgcaactgagccccaagactttcgctagcaagacgtatggactgtgtggaatttgcgatgagaatggcgcgaacgacttcatgctgcgcgatggaacggtgaccactgactggaaaactctggtccaggagtggactgttcaaaggccaggtcaaacctgccaacctatcctcgaggagcaatgtctcgtgcccgattcatctcattgccaggtactgctccttccactgttcgccgaatgtcacaaggtactggctccagccactttctacgccatctgtcaacaggacagctgtcatcaggagcaggtgtgtgaggtaattgccagttacgctcacctgtgcaggacgaacggagtttgcgtggattggcgcactccagatttctgcgccatgtcttgccccccatccctcgtgtacaaccactgtgaacatggttgcccaagacattgcgacggaaacgtttcttcatgcggagatcatccaagtgagggttgtttctgcccacccgacaaggtcatgctcgaaggcagttgcgtgcccgaggaggcttgtactcagtgtattggcgaagacggagtgcaacatcagttcttggaggcctgggtcccagatcaccagccctgtcagatctgtacctgtttgtctggtagaaaagtcaattgtacgactcaaccctgccccactgcgaaggcccccacctgcggtctgtgtgaggtcgcaagactcagacaaaacgccgatcagtgctgtcccgaatacgagtgcgtgtgcgatccggtgtcttgtgatcttcctccagtgccgcactgcgaaaggggactccagcccactttgaccaatccaggcgagtgccgcccgaactttacctgcgcttgcagaaaggaagagtgtaaacgcgtctccccccctagctgcccccctcacaggctcccaaccttgcgcaaaacgcagtgctgcgatgaatacgaatgtgcttgcaattgcgttaactccaccgtttcttgtccacttggatacctggccagtacagccacaaacgactgtggatgtaccactactacctgcttgcctgacaaggtttgcgtgcaccgcagcacgatctatccggtcggtcagttctgggaagagggctgcgacgtgtgcacgtgcaccgacatggaggatgccgtgatgggcctgagagtggcacagtgtagccagaagccctgcgaagacagttgcaggagtggtttcacatatgtcctgcacgagggtgagtgttgtggtaggtgtctgccgtcagcatgtgaggttgtaaccggttctcccagaggtgacagtcagagctcttggaagtctgtgggctcacaatgggcgtcacccgagaatccttgcctcattaatgaatgtgtaagagttaaggaagaggtcttcatccaacagagaaacgtttcatgccctcaacttgaggtcccggtctgtccctctggcttccagttgagctgcaagacgagcgcgtgctgtccaagttgccgctgcgaacgcatggaggcttgtatgctgaatggcaccgtgatcggtcccggcaagaccgtaatgatcgatgtgtgtacaacttgtagatgtatggttcaagtcggcgtcatcagcggcttcaagctggaatgccgcaaaacaacttgtaatccgtgtccgctgggctataaagaggaaaacaacaccggcgaatgttgtggtaggtgcttgcccaccgcatgcactatccaactgagaggcggacaaatcatgacccttaaaagagacgagacattgcaggacggctgtgatactcatttttgtaaggtgaacgagagaggtgagtatttctgggagaagcgcgtgaccggctgccctccgtttgacgagcacaagtgcctcgccgagggcggcaaaatcatgaaaattccaggcacctgctgcgacacctgtgaggagcccgagtgtaatgacatcactgccaggctgcagtatgtaaaggttggctcctgcaaatccgaagtcgaagtggacatccactattgccagggtaaatgcgccagcaaggcaatgtactccatcgacatcaacgacgtacaagatcagtgctcttgctgctcacctaccaggaccgaaccaatgcaggtggccctccactgcaccaatggatctgttgtgtaccacgaagtgttgaacgctatggagtgtaaatgcagcccaaggaaatgcagcaaa

SEQ ID NO: 12540 - DNA, 8439 bp, Artificial Sequence
  derived and/or modified sequence
atgatcccagccagattcgccggtgttctcctcgcgttggcattgatcttgcccgggactctttgcgctgaaggaacaagagggagaagctctacagcccggtgctccctatttgggtcagactttgtcaacacgttcgacggctctatgtatagctttgcagggtattgttcctacttgttggctggagggtgtcagaaacgctcattttctattatcggtgacttccagaacggaaagcgagtgtctctgtccgtgtatctgggtgaattttttgacattcacttgttcgttaacggaaccgtaacacaaggagaccagcgagtatccatgccatatgcctccaagggcttatacctggagacagaggctggttattataaattgtctggggaagcttacgggttcgtagcacggattgatggctctggaaacttccaagtcctactctcagacaggtatttcaacaagacatgcgggctctgtgggaactttaacatattcgcggaggatgacttcatgacgcaggaaggtacacttacctccgacccttatgacttcgctaattcctgggcactgagctctggcgaacagtggtgtgaaagggcaagccccccctcatcatcctgtaacatctctagcggcgaaatgcaaaaaggcttgtgggaacaatgccagctactaaagtctaccagtgttttcgcccgttgtcaccccctcgtggaccctgaacccttcgtggctctgtgtgagaagacattgtgtgaatgtgctggtggacttgaatgtgcttgtcccgcactgcttgagtatgctcggacctgtgcccaggagggcatggtcctatacggatggacagaccacagcgcctgtagtcccgtatgccccgccggaatggaataccgtcagtgcgtgagtccttgcgctaggacttgccagtcactgcatatcaacgaaatgtgtcaggaacgatgtgtggatggatgttcatgtcctgaaggtcaactgcttgacgagggactctgtgtagagagcacggaatgcccctgcgttcactccgggaaacgctaccccccaggcacatccctttctcgggactgcaacacatgcatctgccgcaactcacagtggatttgctccaatgaggaatgccctggagagtgtttggtcacaggacagagtcattttaaatctttcgataaccggtacttcaccttctcaggcatatgccagtacctgctggccagggattgccaggatcactctttttctattgttattgagaccgtgcagtgcgcagacgacagagatgcagtttgcacgcgatctgttactgtacggttgccaggtcttcacaactcactcgtgaagctgaaacatggcgccggcgtggcaatggatgggcaggatgtacagttgccgctgctcaagggggacttgaggatccaacacactgtaaccgccagtgtgcgattgtcctatggcgaggacttacagatggactgggatggccggggacgtttgctcgtcaaactaagccccgtgtatgctggtaagacctgcggcctgtgtggcaactacaacggcaaccagggggacgatttcttgacaccttccggactagccgagccacgggttgaggactttggtaatgcctggaagttgcatggggattgccaggacctccagaaacagcacagcgatccgtgtgctctgaaccccaggatgacaaggttcagtgaagaggcatgcgccgtgctcacatcgccgacctttgaggcctgccacagagcagtgtccccactcccatacctgcgtaactgtcggtatgacgtgtgttcatgtagtgatggtcgcgagtgtctgtgcggtgccctcgcctcctatgccgctgcctgtgcaggtcggggagttagggtcgcctggagggagcccggtagatgcgaactgaattgtcctaaggggcaggtgtacttacagtgcggaacgccctgcaaccttacatgcaggagcctaagttacccggacgaggaatgcaacgaggcatgtctcgagggctgtttttgcccgcctggtctgtacatggatgaacgaggcgattgcgtcccaaaagcacagtgtccatgctactatgacggggagatttttcagccagaggacatcttctccgatcaccacacaatgtgctactgtgaggacgggtttatgcattgtactatgtcaggggtgccagggtccctcttacctgacgcggtccttagcagccccttgagccaccggagcaagcggtccctcagctgtagacccccaatggtaaaacttgtgtgccctgctgataaccttcgcgccgagggtctcgaatgcaccaagacctgtcagaactatgacctggagtgcatgtccatggggtgtgtctccggctgtctgtgccccccagggatggtcaggcatgagaaccgatgtgtcgcacttgagagatgcccgtgctttcaccaggggaaggagtatgcacctggcgaaacagtcaagataggatgtaacacatgcgtgtgccaagacaggaagtggaattgcaccgatcatgtctgtgacgccacgtgttcaacaatcggtatggctcactatttgaccttcgacggcctgaaatacctttttcctggcgaatgccaatacgttctcgtgcaggactactgtggctcaaatcctggtacattccggatactggtgggcaataagggctgtagccacccttcagtgaaatgtaaaaaaagggtgacgatcctggtggagggaggggaaatagagctctttgatggagaggtcaacgtaaagagaccaatgaaagacgagacacacttcgaagtagtggaaagcggcaggtacataattctcctgttgggcaaggccctaagtgttgtctgggatcggcatctgtcgattagcgtagtgctgaaacagacatatcaggaaaaagtttgtgggctctgtggcaactttgacggcatacagaataatgatctcacaagtagtaacctccaggtggaggaagaccccgttgacttcggcaattcttggaaagtgagtagccagtgcgctgatacaagaaaggtgcccctggacagttcccccgcgacttgtcataacaacatcatgaagcagaccatggtggatagcagttgccgcatactcacgtccgacgttttccaggattgcaataaactcgtcgatccggagccatacctggacgtatgcatctacgatacatgttcctgcgagagcatcggtgactgtgcttgcttctgtgatactatcgccgcctacgcgcacgtatgtgctcagcatggaaaggtcgtgacttggagaacagctactttgtgtccacagtcttgcgaggaacggaacctgagagaaaatgggtatgagtgtgaatggagatataacagttgcgcgcccgcgtgccaggtgacgtgtcagcatcccgaaccccttgcgtgtccagtacagtgtgtggaaggctgtcatgcacattgtccacccggtaagatccttgatgagcttctgcaaacttgtgttgacccggaggattgtccggtgtgcgaggtggcggggcgcagatttgctagcgggaagaaagtaacactgaaccccagcgacccagaacactgtcaaatctgtcactgcgatgtggtaaaccttacctgcgaggcttgtcaggagccaggcggcctggttgtgcctcctacggacgccccagtatcccctaccacactctacgtagaagacatcagtgagccacctctccatgatttctactgttcgagactgcttgatttggtgttcttgttggacgggtcctctaggttatccgaggccgagttcgaggtgctgaaagcttttgtcgtagatatgatggaaagactccgcatttctcagaaatgggtcagggttgctgtggttgaataccatgacggtagccatgcctacatcggactgaaggatcgtaaaaggccctcagagctccggaggattgcaagccaggtaaagtacgctggctcccaggtagctagtacaagtgaggtgctcaagtatacgctgtttcaaatctttagcaagattgatcgtcctgaggcttcaagaatcactctgttgcttatggccagccaggagccacaacgaatgagcaggaacttcgtgaggtatgtccagggactaaagaagaagaaagtgattgtcatacctgtcggaatcggaccccacgctaacctcaagcaaatccggctgattgagaagcaggcccccgaaaacaaagcctttgtgctttcatcagttgatgagttggaacaacagagggacgagatagtgtcgtacctctgcgatctcgcccccgaggcccctccccccactttaccacctgacatggctcaagtcaccgtgggcccaggcttgctaggcgtttctacccttgggcccaaaaggaactctatggtgttagacgtggctttcgtcttggagggcagcgacaagataggcgaggccgatttcaaccggtcgaaagaatttatggaggaggtgatccagcgcatggacgtgggtcaagattcaattcatgtgaccgtgctgcagtacagctacatggtgacagtagaatatccgttcagcgaagcccagagtaaaggcgacatcctgcagcgggtgagagaaatcaggtaccagggcggcaatcgcactaacacaggactggctctgaggtacctgtctgaccactccttcttggtctcacagggtgaccgcgaacaggctcccaacctggtgtacatggttacaggcaatcctgctagcgatgagatcaaaagactgcccggggacatccaggttgtgcctataggtgtgggacccaacgcgaatgtccaggaattagaacggatcggctggccaaacgcgcccattttgatacaggactttgagactcttccgcgagaagcccctgatctggttctacagcgctgctgcagcggggaggggctgcagatccccaccctttccccagctccggattgttcccagccactcgatgtgattttgcttcttgatgggtcttcgagttttccggctagctactttgacgagatgaagagctttgcaaaagcattcatctcaaaggcaaatataggcccacggctgactcaggtctcggtgcttcaatacgggtctattacaaccatcgatgtgccttggaacgtggtcccagaaaaagcacacctgctatctttagtggacgtgatgcagcgagaaggcggccctagtcagattggggatgcgctcggtttcgcagttagatacctcacaagtgagatgcatggcgctcgacctggcgcctccaaggcggtggtcatcctggttacagacgtaagcgtggattcagtggatgctgcggctgatgcagcaaggtccaacagggtcactgtttttccgatcggcatcggcgatagatacgatgccgcccagttaagaattctagctggtccggctggggattccaatgttgtcaagcttcagcgaattgaggacttaccaacgatggtgacgctcggcaactctttcctgcacaagctgtgctcggggttcgtgagaatatgcatggatgaagacggtaacgaaaagcggcctggcgatgtttggaccctgccggatcaatgtcatactgtcacttgccagcctgatggtcagacactgctcaaaagtcatcgcgttaattgcgaccggggtctgaggccgagctgcccaaatagccagtctcctgtgaaggtggaagagacgtgtggttgcagatggacatgtccttgtgtttgtactggatcctcgactagacacattgttactttcgatggccagaacttcaaactgacagggtcatgtagctatgtgcttttccagaacaaagagcaggacctggaggtcatcttgcacaacggagcatgctccccgggagctcgtcaaggctgcatgaaaagtatcgaggtgaaacactcagcattgagcgtggagctgcactccgatatggaggtgaccgttaatggaaggttagtatcggtgccgtacgtaggcgggaatatggaagtgaacgtttacggggcaataatgcatgaagttcgctttaaccatctgggccacatttttacgttcacgccccagaataatgagttccagcttcagctgagtcccaaaacgtttgcgtcaaagacatatgggctttgcggtatctgcgacgagaatggcgctaatgacttcatgctgcgcgacgggacagtaacaactgactggaagactctggttcaggaatggactgtccagcgccccggccaaacttgccagcccatactggaggagcagtgcttggtacctgattcctctcactgtcaggtcctccttctccccctgtttgctgaatgccacaaagtcctggcacctgccaccttttatgctatatgtcaacaagacagctgtcaccaagagcaggtgtgtgaggtgatcgccagttacgcgcacctgtgccgtaccaacggtgtttgtgtggactggagaacccccgacttctgcgctatgtcgtgccctcccagcttagtgtataaccactgcgagcacggctgccctcggcactgcgacggaaacgtttcctcttgcggggatcatccatcagaggggtgtttctgtccccccgacaaggtgatgttggagggaagctgtgtgccagaggaagcgtgcactcagtgcatcggtgaagacggagtacagcaccagttcttagaagcctgggtgcccgatcaccagccatgccagatctgtacttgtttgtctgggcgcaaagtcaattgcacaacgcagccctgtcccacagccaaggctcctacatgcggcctgtgtgaggtagcacgccttaggcagaatgcagaccagtgctgtcctgaatacgagtgtgtgtgtgatccagtcagttgtgacctgcccccagtcccacattgcgaaaggggcctgcagcctacccttacgaatccaggagagtgccgaccaaattttacctgtgcgtgtcgcaaggaagagtgcaaacgagtgtcacccccaagttgtccacctcacaggttgccgaccctgcggaagacccaatgctgtgacgaatacgagtgcgcttgtaactgtgttaactctaccgtgtcttgcccactgggttaccttgcctctactgcgaccaatgactgtggctgcacaaccacgacttgtctgccagataaagtatgcgtccaccgcagcactatatatcccgtggggcagttttgggaggaggggtgcgacgtgtgtacatgcaccgatatggaagacgccgtgatggggctgcgggttgcccagtgctctcagaaaccatgcgaagacagttgcaggtccggctttacctatgttctgcatgagggggagtgttgcggcagatgcctgccgtccgcttgcgaggtggtgactggaagtccccggggcgactcacagagttcttggaagtctgttggctcccagtgggcttctcccgagaatccatgcttaattaatgagtgcgtgcgtgtaaaagaggaggtatttattcagcaacgcaacgtaagttgtccgcagcttgaggtgcctgtgtgcccctcaggctttcagctgagctgtaaaacctccgcctgctgcccatcttgtaggtgtgaacgtatggaggcatgcatgctgaatggcactgtgatcgggcctgggaagacagttatgattgacgtatgtacgacctgcaggtgtatggtgcaggttggggtaatctctggattcaaactcgagtgtcggaagaccacttgcaacccatgcccactcgggtataaagaggagaacaataccggcgagtgctgtgggcgctgtctgccaacagcatgtacaattcagctgagaggtggccagatcatgaccttgaagcgggacgagactctgcaagatgggtgcgatacccacttttgcaaggtaaatgagaggggcgagtatttttgggagaagcgcgtgacggggtgtcctccctttgacgagcacaagtgcttggccgaaggaggcaagatcatgaaaatccccggaacttgctgtgatacttgcgaggaacctgaatgcaatgatataaccgctcggctgcagtacgtcaaagtgggtagctgtaagtctgaggtcgaggtggacatccattattgtcagggcaagtgcgcaagtaaagccatgtatagcatcgacatcaatgacgttcaggaccagtgctcgtgttgttctcccacacggacagagccaatgcaggtggcactgcactgtacgaatggctcagtggtatatcacgaagtgctcaatgccatggagtgcaagtgttctcctagaaaatgctctaaa

SEQ ID NO: 12541 - DNA, 8439 bp, Artificial Sequence
  derived and/or modified sequence
atgattcctgctaggttcgccggcgtgctgctggcactggcccttatcctgccgggcactctctgcgcagaggggaccagggggcgcagctctaccgcccgttgttcactgttcggctctgatttcgttaacacctttgatggttcaatgtatagcttcgcgggctattgttcatatctgctcgccggcgggtgccagaaacgtagtttctctatcattggcgattttcagaacggtaagcgagtctcattatccgtctatctaggtgagttttttgacatccacctcttcgtgaatggtaccgtaacacagggcgatcagagggttagcatgccttatgccagcaagggactgtacctggagacagaggccgggtactacaaactgtctggggaggcttacggtttcgtggcccgcattgacggctcaggcaattttcaggttctcctttccgaccggtactttaacaaaacctgcggactgtgcggtaacttcaatatcttcgccgaggacgatttcatgactcaagagggaactctgacctctgacccctatgactttgctaactcttgggccctgtcttctggggaacagtggtgtgagagagccagccctcccagttcctcatgcaacatttcatccggggaaatgcagaaggggctgtgggaacagtgccaactcctgaaaagcacatcagtgttcgcacgatgtcacccactggtcgaccccgagccattcgtagcgctctgcgagaagacgctgtgtgagtgcgcaggcggcttggagtgtgcgtgtcccgcactcctcgagtatgcgcggacctgcgcacaggaggggatggtgctatacgggtggacagaccattccgcctgttctccagtgtgccctgcgggcatggaataccgccagtgcgtgagcccatgtgcgagaacttgccagagccttcatataaacgaaatgtgtcaggaaaggtgcgtagatgggtgctcgtgtccagagggtcagttactcgatgaaggcctttgtgttgaatccaccgaatgcccatgcgtgcacagtggcaagagatatcccccaggaaccagcttgagccgggattgcaatacctgtatctgcagaaattcccagtggatatgctccaacgaggagtgcccaggtgagtgcctggtaacgggacagagccacttcaagagctttgataatcgttatttcacctttagtggcatctgtcaatacctcctcgctagggattgtcaggaccactcctttagcattgtgatcgagacagttcagtgtgctgacgatagggacgccgtctgcaccaggtctgtcacagtaaggctacctggccttcataacagtttggtgaaacttaagcacggtgcaggggttgcaatggacgggcaagacgtgcagctgcctctgctgaaaggagatcttagaatccagcacaccgtgaccgcgtctgtgcgtctgagttacggtgaagacttgcagatggattgggatgggcgtggccggttgctggtgaagctctctcctgtgtatgccggcaagacttgtggcctgtgcgggaattacaatggtaatcagggcgatgatttcttgactcccagtggtttagctgaacctcgagtagaggactttggcaacgcctggaaactgcatggcgattgtcaagatctgcagaaacagcactccgacccttgcgcccttaacccacgcatgacccgcttcagcgaggaggcttgcgcggtgttaaccagtccaaccttcgaagcttgtcaccgggccgtgtctcctctaccctacctcagaaactgtaggtacgacgtgtgcagctgcagcgacggaagagaatgcctttgcggcgctctcgcctcctacgctgcagcttgcgcagggcggggagtgcgcgtcgcttggcgcgaacccggccggtgcgagctgaattgccccaaaggccaggtctacctgcagtgtgggaccccttgtaacttgacatgccgctctctgtcctatccagatgaggagtgtaatgaggcttgcctggaaggctgtttctgccccccaggcctgtacatggacgagagaggggattgtgttcctaaagcacagtgcccctgttattatgacggggagatcttccagcccgaggatatattcagtgaccatcataccatgtgctactgcgaggacgggtttatgcactgcactatgtccggcgtgcccggctcgctcctgccagatgcggtgctcagctcccctctgagccaccgaagcaaacggagcctcagttgccggccccctatggtaaagctcgtctgccctgccgacaacctccgcgccgagggcctagaatgcactaagacttgccagaattacgatctggaatgcatgtccatggggtgtgtctcagggtgtctttgccctcccggtatggtccgccacgaaaaccggtgcgtcgcactggaaagatgtccgtgctttcatcagggaaaggagtatgcgcccggagagacggtgaagatcggctgcaacacttgtgtctgtcaggacagaaagtggaactgtacggatcatgtgtgcgacgccacgtgcagcacaattggcatggcgcattacctgacctttgatggcttgaaatacttgttccccggcgagtgtcaatatgttctagttcaggactattgcggttcgaatccagggactttccgcatcctggtaggcaataagggctgtagccatcccagtgtcaagtgcaaaaaacgagtgacaattttggtcgaaggcggcgagattgagctgttcgatggcgaggtgaacgtgaagaggccaatgaaggacgagacgcacttcgaagtggtcgagagtggcagatacattatactgctgctgggaaaggccttgagtgtcgtctgggacaggcacctgagtatttccgtggttctgaagcagacataccaggaaaaggtgtgcggtctgtgtggtaacttcgatgggatccagaataatgacctcacatcctccaacctgcaagtggaggaggatccagttgacttcgggaacagctggaaggtgtcatctcagtgtgcggatactcgcaaagtgcctctcgactcctcgccagccacctgtcacaataacataatgaagcagacaatggtagactccagctgtcgcattctgacctcagacgtgttccaggattgtaacaaactggtggatcccgaaccatatttggatgtgtgcatttatgacacatgcagttgcgagagcatcggagattgtgcatgtttctgtgacacgattgcagcttacgcccatgtatgtgcacagcatggtaaagtcgtgacttggcgcacggcaacactttgcccccagagctgcgaggagaggaacctgcgggaaaacggctatgagtgcgagtggcggtacaatagctgtgcccctgcttgtcaggtcacatgccagcatcccgaacccctggcctgccccgtgcagtgcgtggaagggtgtcacgcccattgcccccccgggaagatcctcgatgagctgcttcagacatgtgtcgacccagaggattgcccagtgtgcgaggtcgccggccgacgtttcgcgtctggaaaaaaagtgaccctgaatccaagtgaccctgagcactgccaaatctgtcattgtgacgtagttaacctgacctgcgaggcatgccaggaaccaggggggttggttgtcccacctactgacgccccagtgagtcctaccacgctatatgttgaagacatctcggagccaccgctgcacgacttctactgcagcagactgttggatctggtgttcctcttggatggatcctcgcgcctctcagaggccgagttcgaggtgcttaaggccttcgtggtggacatgatggaaaggctccgcattagccaaaagtgggtccgcgtggcagtggtggagtaccacgatggcagtcatgcttacattggcctcaaggatcggaagcgaccttcagagctccgccgaatcgcctctcaggtgaaatatgccgggtctcaggtggccagcacctctgaagtgctgaaatatactctctttcagatctttagcaagattgataggcccgaagccagccggattactctcctgctcatggcatcccaggagccgcagcgaatgagtagaaatttcgtgcgatatgtgcaggggttgaagaaaaaaaaggtcatcgtgattccagtgggcattggcccccatgcgaatctgaaacagattcgtcttatagaaaaacaggccccggaaaacaaagctttcgtcttatcctccgtcgacgagttggaacagcagcgagacgaaattgttagctacctgtgtgatctggccccagaggccccgcctcccacattgccacccgatatggcccaggtgactgtgggacccggcctgctcggggtctctactctgggccctaaacgtaattccatggtgttagatgttgccttcgtgctagagggttccgataagattggtgaagccgatttcaaccgcagtaaagaattcatggaggaagttatccagcgcatggacgtcggccaggactcaattcacgtgactgtgctccagtattcttatatggtcaccgtggagtaccccttcagcgaggcccagtccaagggagatatcctccaacgcgtgcgcgagattcgataccaggggggaaaccggaccaacaccggcctggcgctgagatatctgagcgatcactctttcctcgtgtctcagggcgatagggagcaggcgccgaacctggtgtatatggtgacgggcaatccagcgtccgacgaaataaaacgcctgccaggagacatacaggtggttcccatcggcgtgggccctaacgccaacgtccaggaactggagcgcatcggctggccgaatgctcctattctaatccaggacttcgaaaccctccctcgggaggcacctgatctcgtcctgcagcgctgttgctccggggagggccttcagattccaacactcagtcccgcgcccgattgctcacagcctctcgatgtgattctgctcctggacggctcctcaagcttccctgcctcttactttgatgaaatgaagtcttttgccaaggcttttattagcaaggccaatattggccctcggctgacccaggtgtctgtgcttcaatacggttccatcacaaccatcgacgtgccgtggaacgtggtgcccgaaaaagctcacctgctatctctcgtggacgtgatgcagcgagaagggggcccctcccagattggcgatgctctgggatttgccgtgcgatatctgacttccgagatgcacggtgcgaggccaggtgcttctaaggcggtggtgatcctggtgaccgatgtgtctgtggacagcgtggatgccgccgctgacgccgctcggagcaaccgagtgaccgtgttcccaataggcattggagataggtatgatgcagcacagctgcgaatcttagctggaccagccggagattcaaatgtggttaaactgcagagaattgaggacctacccactatggtcaccctgggtaattctttcctccacaaattgtgttctggtttcgtgcgaatttgtatggacgaggatgggaacgagaagcggcccggcgacgtgtggactttgcctgatcaatgtcatacggtcacatgccaacccgatggccagacgttgctgaaaagccaccgtgtcaattgtgatcgcgggctgcggcccagctgccccaactcccagtctccagtgaaagtcgaggaaacatgcggctgccgttggacctgtccatgcgtgtgcactggcagcagcacgcgccatatagtgacattcgatgggcaaaattttaaattaacaggaagctgcagctatgttttatttcagaacaaggaacaggacctggaggtgatcctgcacaacggcgcttgctccccaggcgctcggcagggctgtatgaagagtattgaggtgaaacactccgccctttccgtagaactacactccgacatggaggtgacagtgaatggccggcttgtcagcgtaccctatgtgggcggcaatatggaggtcaatgtgtacggcgcaatcatgcacgaagtcagatttaaccacttaggccatatctttacctttaccccccagaacaatgaattccagttacagttgagtccgaagacgttcgcatctaaaacatatgggttgtgcggaatctgtgatgagaatggtgccaatgactttatgttacgcgatggcaccgtcaccactgactggaagactctggtgcaagagtggaccgtgcagagaccaggccagacatgccagcccatcctcgaggaacagtgcctggtgcccgacagttctcactgtcaggtgcttctgctccctttgttcgctgagtgtcacaaggtgctcgctccggccacattttacgcaatatgtcagcaggacagttgtcaccaggaacaggtgtgcgaggtgatcgcaagttatgctcacttatgtcggacaaatggagtctgcgtggattggagaacgccagacttttgcgctatgtcatgcccccccagtttggtgtataatcactgcgagcacggttgtcccagacactgcgatggcaatgtgtcctcctgcggtgatcacccctccgagggttgtttttgccctccggataaggtcatgctcgaggggagctgcgtgccagaagaggcctgcacacaatgtataggagaagacggtgtccagcatcagttcctcgaggcatgggttccagatcaccaaccgtgtcaaatatgcacctgtctctccgggaggaaagtcaactgcaccacgcagccatgccccacggcgaaggcaccaacctgtggcttgtgcgaggttgccaggctgcggcagaacgctgatcagtgttgccctgaatatgaatgcgtgtgtgacccggtgtcctgtgacctgcccccagttccccactgcgagcgcggtctacagccgaccctgactaatcctggcgaatgccgccctaacttcacatgcgcatgcaggaaggaggagtgcaagagggtctcccccccctcctgcccaccgcaccggttgcctacacttaggaaaacgcaatgttgcgatgagtatgagtgtgcctgcaattgcgtgaattctacagtttcttgtccgctgggttacctagcctccactgccactaacgattgcggttgtacgacaacaacgtgtctgcccgacaaagtgtgcgtgcaccggtccaccatctacccggtgggccagttttgggaggaagggtgcgacgtgtgtacatgtacagatatggaggacgccgtgatgggactgcgcgtggcccagtgttcacagaaaccttgcgaagactcttgccggtcaggctttacctacgtgctgcacgagggcgagtgctgtgggcgatgcctgccttcagcctgcgaggtggtcacaggcagccctcgcggggactctcagtccagctggaagtcagtcggctcacagtgggcatcacccgagaacccctgtctgattaatgagtgcgttcgggtgaaagaggaggtatttatccagcagcgcaatgtcagctgcccacagctcgaggttcccgtctgccccagcggatttcagctctcttgtaagacgagtgcttgctgcccttcctgccgatgcgaaaggatggaggcctgtatgctaaatggtaccgtcatcggccccggtaaaaccgtgatgatcgacgtgtgtacgacttgcaggtgtatggtgcaggtgggcgtcatatccgggttcaagcttgaatgtcggaaaaccacatgcaacccatgcccactgggctacaaggaggagaacaatacaggggaatgctgtggacgctgcctgcctacggcttgcacaattcaactgcgtgggggccaaataatgacactgaaaagggacgagacgttgcaggacggatgtgatacacacttttgcaaagtcaacgaaaggggggagtacttctgggagaagcgcgtcaccggatgccctccattcgacgagcacaagtgtctggctgaagggggaaagattatgaagataccaggcacttgctgtgacacttgcgaagagcctgagtgcaacgatattaccgccagactgcagtacgttaaagttggatcctgcaagagtgaagtagaagttgatattcattattgtcaggggaaatgcgcttccaaagccatgtatagtatcgacattaacgacgtgcaagaccaatgcagttgttgctcccccaccaggactgaacctatgcaggtggctctgcactgtacaaatggtagcgtggtgtatcacgaggtgctgaatgcgatggagtgtaagtgcagccctcgcaagtgcagtaaa

SEQ ID NO: 12542 - DNA, 8439 bp, Artificial Sequence
  derived and/or modified sequence
atgatccctgcaaggttcgctggcgtgctgctggccttagccctcatcctgcccggaactctctgcgctgaagggacaagaggtcgaagcagtaccgctagatgctccctgttcggatcagacttcgttaatactttcgacggtagtatgtatagctttgctggctattgttcatatctgctagctggcggctgtcagaagagatctttcagcataattggagatttccagaatggtaaacgagtttccctgagcgtttacttaggtgaattcttcgatatccatcttttcgtcaatggaaccgtgacccagggcgatcaacgagtttccatgccctatgcatccaaagggctgtatctggagaccgaggccggctattataaacttagcggcgaggcctacggctttgtggcccggatagatgggagtggtaacttccaggtgctgctgtctgataggtactttaataaaacctgtggactgtgtggtaattttaatatattcgctgaggacgattttatgacccaggagggcaccctcacttcagatccatacgatttcgccaactcctgggctctcagctccggtgaacaatggtgcgaacgggcctcccctccaagttctagctgtaacatctcctccggcgaaatgcagaaggggttatgggaacagtgtcagctcctaaaatcaacctctgttttcgcccggtgccatcccctggtggatcccgaaccatttgtggctctatgcgagaagacactgtgtgagtgtgctggcgggctggagtgcgcatgcccagccctgctggaatacgctagaacttgcgctcaggaaggaatggttctgtatggatggacagatcactctgcatgctcacccgtgtgtcccgctggcatggagtaccggcagtgcgtgagcccctgcgcaaggacttgccagagcctgcatatcaatgaaatgtgccaggagaggtgcgtggatgggtgttcctgcccagagggccagctcctggacgaaggcttatgcgtagaatccaccgagtgtccttgcgtgcactctggcaaacgatatcctcccggaacaagtctgagtcgagactgtaacacttgcatctgtcggaactcccagtggatttgctctaacgaggagtgccctggcgagtgtctggtgaccgggcagagtcacttcaagtctttcgacaatcgttatttcacattctctgggatttgtcagtacctcctagcccgcgactgccaggatcactccttctctattgttattgagacagttcaatgcgcagacgatcgggatgccgtgtgtaccaggtctgtgaccgttaggttgccaggattgcataatagcctggtcaaattgaagcacggcgccggggtcgctatggacggccaggatgtacagctgccactcctgaagggcgacttaaggatacaacacacagtgacagcctctgtccggctgagctacggcgaggatctgcagatggactgggacgggcgaggaagactgctggtgaagttgtctcccgtttatgctggcaaaacatgcggcttatgtggaaattataatggcaaccagggggatgattttctaaccccatccgggctggccgagcctcgcgtggaggatttcgggaatgcatggaagctacacggagactgccaggatctccagaagcagcattctgacccctgtgctctcaacccaaggatgacaagattttcagaggaggcctgtgctgtcctcacctcacccacattcgaggcatgccacagagctgtttcccctctaccatatctgagaaactgtcgttatgatgtgtgttcctgcagtgatgggagagagtgtctgtgcggggcactggcttcatacgcagccgcctgtgcagggaggggagtgcgtgtggcttggagggagcctgggcgatgcgagcttaactgtcccaagggtcaagtgtaccttcaatgtgggacaccttgcaatctcacttgtcgcagcctctcctatcccgatgaggagtgcaacgaggcctgcctggagggctgcttctgtccccccgggctgtatatggatgaacgaggcgattgcgtgcccaaggctcagtgcccatgctactacgacggggaaattttccagcccgaagacattttctccgatcaccataccatgtgttactgtgaggatgggtttatgcactgtacaatgtccggcgtgcctggatctctcctgcctgatgcagtgctcagcagccctctatcccaccgttctaaaaggtctctgtcttgcagaccacctatggttaagttagtctgcccagctgataacctgcgagctgaagggctagagtgtaccaaaacttgtcagaactatgatttggagtgcatgagtatgggttgcgtctctgggtgcctgtgccctcctggcatggtgcggcatgagaaccgttgcgtggcactggaaagatgcccatgtttccatcaaggcaaagagtacgctcctggcgaaaccgttaaaatcggctgcaatacctgcgtctgccaggatcgaaaatggaattgtacagatcacgtttgcgatgccacttgttcaaccataggcatggcccactacctgacattcgacggactgaagtacctgttcccaggcgagtgccagtatgtactggtccaggactattgtgggtccaaccccggcacctttagaattctagtgggaaacaagggttgcagtcacccaagcgtgaagtgtaaaaagcgcgtgaccattctggtggagggaggcgaaatcgagttatttgacggtgaggtcaatgtgaagcgtcctatgaaggacgagacccatttcgaagtggtggaatccgggaggtatattatcttgcttttggggaaggccctctctgttgtatgggatcgacatctgtccattagcgtggttcttaaacagacttatcaggaaaaagtgtgtggcttatgcggcaatttcgacgggatccagaacaatgatctgacaagcagtaatctccaggtagaggaagacccagtggactttggaaactcatggaaggtgagcagtcagtgtgctgacacaaggaaggtcccactggattcctccccagcaacatgccacaataacattatgaagcagaccatggtggacagcagctgcaggatcttaaccagcgacgtgtttcaggattgcaataagctagtcgaccccgagccatacttggacgtgtgcatttatgacacatgttcctgtgagtccataggcgattgtgcatgcttttgtgacacaatagctgcttacgcacacgtgtgcgcccagcacgggaaggttgtgacatggcgtaccgcaaccctgtgtccccagtcctgtgaggaaagaaatctgcgggagaacgggtacgagtgcgagtggcgttacaatagctgtgctcctgcatgccaggttacatgtcaacacccagagcccctggcctgccctgtacagtgtgtagaaggatgccatgcccactgccctcccggtaaaatcttagatgaactcttacagacttgcgtcgatccagaagattgccccgtgtgtgaagtggccggtcgcagattcgcctctgggaagaaggtgacactcaacccgtccgacccagagcattgtcagatttgtcactgtgacgtggtcaatctgacttgtgaggcctgtcaggaacctggcggccttgtcgtcccacctactgatgctcctgtgtccccaaccacactctacgtggaggatataagcgaacctcctctccacgacttctattgctccaggctgctggacctggtgttcctcctggacggctcatctcggttatccgaggcagaatttgaggtcttgaaggcttttgttgtcgatatgatggagaggttgcggatctctcaaaaatgggtcagagttgctgttgtcgaatatcatgacggcagtcacgcctatataggtctgaaagaccgtaaacgcccttctgaactgcggcggatagcaagccaagtgaaatatgccggctcccaggtcgcctccaccagtgaggtgctgaagtacaccctattccagattttctccaagatcgatcggccagaggccagcaggatcacactgcttttaatggccagtcaggagccccaacggatgtcaaggaacttcgtgcgctacgttcaggggttgaaaaaaaagaaagtgatcgtgataccagtcgggattgggccccatgctaatctgaagcaaattcgcttgattgagaagcaggcccctgaaaacaaggccttcgtccttagttccgttgatgaactggagcagcagagagacgagatagtgtcttatctgtgtgacttggcacccgaggctcctccgcccaccctccctcccgacatggcacaggtcaccgtgggtcccggtctgctgggggtgtccaccctgggcccaaagaggaattctatggtgctggacgtggctttcgtgttagagggcagcgataagatcggtgaggctgacttcaacaggagtaaggaatttatggaggaagtgatccagcgaatggacgttggccaggatagcatacacgttaccgttttacagtattcctatatggtgactgtcgaatacccattcagcgaggcccagagcaagggcgatattctccagagagttagggagatacgctaccaaggtgggaaccgtacaaatactggattagccctgagatacctgagcgatcatagctttctagtgtcacagggcgatagagaacaggctccaaacctggtgtatatggtcaccggcaatcccgcctctgatgagatcaaacgcctacctggcgatatacaggtggtgcccatcggagtgggtcccaatgctaacgtgcaggaactggagcgcatcggctggcctaacgcacctatcttaattcaggatttcgagacactgccaagagaagcccccgatctagtcctccagcgctgttgcagcggcgaggggctccagatcccaacactgagcccagctccagattgtagccaaccattggacgtgatactccttttagatggttctagttcctttcctgcttcttattttgatgagatgaagtctttcgctaaagcatttattagcaaagctaacattggtccacgcctgacccaggtctccgtgctgcagtatggatctatcaccactatagacgtgccctggaacgtggtgcctgagaaggcacatctgctatccctggtggatgttatgcagagagaaggcggccctagccaaatcggagacgctcttggattcgcagtgcgatacctgacatctgaaatgcacggcgcccgtcctggagccagcaaagccgtggtgattctggtgaccgacgtgtctgtggacagcgtcgacgccgccgccgatgccgccagatccaatagagtgaccgtgttccccattgggattggggaccgctacgatgcagcccaactgcgcatactggctggacctgctggcgatagtaatgttgtcaagctgcagaggatcgaagatctgccaacaatggtgacactaggcaactccttcctccataagctctgcagtgggtttgttcggatttgtatggacgaggacggcaatgagaagcgcccgggcgatgtgtggactctaccagaccaatgccacactgtgacatgccagccagacggccaaacactgctgaaaagccacagagttaattgcgataggggccttcggcccagttgtcccaacagccaatctccagtgaaagtagaagagacttgcggatgtagatggacctgtccttgcgtctgcactggctcaagtacacggcacattgtgactttcgatggccagaacttcaagctgacagggtcctgtagttatgttctattccagaacaaggaacaggacctcgaagtgatcttgcacaacggagcttgctctccaggtgcacggcaaggctgtatgaagtcaatagaggtcaagcattccgccctatcagtcgagctgcatagtgacatggaggtaactgtgaatggccgcctagtgagcgttccctatgtgggagggaacatggaggtcaacgtgtacggagccatcatgcacgaggttagattcaatcatctgggccatatatttaccttcacacctcagaataacgaattccagctacagctgtccccaaaaaccttcgcctccaagacttacggtctgtgtgggatatgtgatgagaacggagcaaatgactttatgttaagggatggtaccgtcaccaccgactggaaaactctggttcaggagtggactgtgcagagacctggccaaacttgtcagcctattttggaggaacagtgcttagtgcctgattcctcccactgtcaggtgctcctgctgccgctgttcgccgaatgccacaaggtactggctcccgcaaccttttacgcaatttgtcagcaggacagctgtcaccaggagcaggtgtgcgaggttattgcctcttatgcacatctgtgtcgtactaacggcgtttgcgttgactggcgaacccctgacttctgcgctatgtcctgtcccccttcattggtctataaccattgtgaacacggctgtcctagacattgtgatggaaacgtatcttcttgtggagaccacccttcagagggctgtttttgcccaccagacaaggtgatgctcgaaggcagttgcgttcccgaagaggcctgtacccaatgtatcggggaagatggggttcagcaccagtttctcgaggcctgggtgcccgaccatcaaccctgtcaaatttgtacctgcctaagcggaaggaaggtgaactgcactacacagccatgccctaccgcaaaggccccaacctgtggtttgtgtgaggtggccagactgcggcagaacgctgaccaatgctgtcctgagtatgaatgcgtctgcgaccccgtgagctgcgacctgcctcccgtcccacattgcgaacgtggcctacaacccaccctcactaatccaggcgaatgtagacctaacttcacctgcgcttgtaggaaagaagagtgcaagcgcgtgagccccccctcttgccctccacacaggctaccaacattgcgcaaaacacaatgctgtgacgagtatgagtgcgcttgcaactgcgtgaacagtacagtgagctgcccactgggctatctcgccagcactgctactaatgattgcgggtgtacaaccacaacttgcttaccagacaaggtttgtgtacatcggagcaccatatatcctgtaggccagttttgggaagagggctgcgatgtgtgcacctgtacagacatggaggacgctgtgatgggcctgcgcgtggcacagtgtagccagaagccttgcgaagatagctgccggagtggctttacctatgtgctgcatgaaggggagtgctgcgggaggtgtctgccaagcgcttgcgaggtggttaccggctccccaaggggcgacagccagagcagttggaaatctgtggggtctcagtgggcatcacccgagaacccatgtttaataaatgagtgcgtgagagtgaaggaagaagttttcatccagcagcgcaacgtgagttgccctcagctagaggtgccagtctgtccctccggcttccagctgtcttgtaagacttcagcctgctgtccttcttgtcggtgcgagcgaatggaggcatgtatgctaaacgggaccgttatcgggccagggaaaacagttatgattgacgtgtgtaccacctgcagatgcatggttcaggtgggcgtgatcagcggattcaaattagaatgtagaaagactacctgcaatccatgccctttggggtacaaggaggaaaacaacacaggcgaatgttgcggcaggtgcctgcctaccgcctgcactattcaacttcggggcggccagatcatgactttaaagagagacgaaactcttcaggatggctgcgacacccatttttgcaaagttaatgagcgcggcgagtacttttgggagaagagggtgacaggctgtcccccattcgatgagcacaaatgcctggccgaaggcggtaagatcatgaagatacccggcacctgctgtgatacctgtgaggagcctgaatgtaatgatattacagccagactgcagtacgtgaaggtcggctcttgtaaatcagaagtggaggttgacatccactactgtcaggggaagtgcgcatccaaggcaatgtattctatagatatcaacgatgttcaggaccagtgctcctgctgtagccccacccggactgagccaatgcaggtggcattacactgtacaaatggctcagtcgtgtaccacgaagtcctgaatgccatggagtgcaaatgttcccctcgtaaatgctctaag

SEQ ID NO: 12543 - DNA, 8439 bp, Artificial Sequence
  derived and/or modified sequence
atgatcccagctaggtttgccggagtcctcctcgccctcgcactgatactccccgggacactctgcgctgaagggacacggggacggtcatctactgcaaggtgctctctgtttggaagtgatttcgtcaatacattcgatggatccatgtactccttcgcagggtactgttcatatctgctcgccggaggatgtcagaaacggtccttctcaattataggagattttcaaaatggaaaacgggtgtctctatccgtgtatctgggagagttctttgatattcacttgtttgtcaacgggactgtgacacagggagatcagagagtcagtatgccctatgcctcaaaagggctctacttggaaacagaagctggatactacaaactttcaggggaggcctacgggtttgtcgctcgcatcgatgggagtggaaactttcaggtgcttctctcagatcgatatttcaataaaacatgtggactttgtgggaactttaacatctttgccgaagacgatttcatgacacaggaaggaacattaacatcggatccttatgatttcgctaactcctgggctttatcctcaggggaacagtggtgtgaacgagccagtcccccctcttcctcttgcaacatttctagtggggagatgcagaaaggactgtgggaacagtgtcagcttctgaaatccactagtgtcttcgccagatgtcatccactggtcgatcctgagcccttcgtggctctctgtgagaaaacactctgcgaatgtgctgggggactagaatgtgcctgtcccgcattactagaatatgccagaacatgtgcccaggaaggaatggttctatatgggtggactgatcatagtgcgtgtagtcctgtctgtccagctgggatggaatacaggcagtgtgtgagtccctgtgctagaacatgtcagtccttgcatattaacgagatgtgccaggagcgctgtgtggatggatgctcctgtcccgaagggcagctactcgatgaagggctttgtgtggagtccacagagtgtccttgtgttcattcagggaaacggtatccccctggaacttctcttagtcgcgactgcaatacatgtatctgtagaaactctcagtggatatgtagtaatgaagaatgccccggggaatgtctcgtcacagggcagtcacattttaagtcctttgataacaggtattttacattctccggaatctgtcagtatttactcgccagggattgccaagaccattcttttagtatcgtaatagaaactgtgcagtgcgccgatgacagagatgccgtttgcactagatccgtgactgtgcggttacccgggctccacaattcactcgtcaaattaaagcatggggccggagttgctatggatgggcaggatgtgcagttacccttactgaaaggggatcttaggattcagcatactgtaacagcctccgtgcggctttcctatggggaagacttacagatggattgggatggacgagggcggctgctggtgaaattaagtcccgtttatgcagggaaaacatgtggactgtgtgggaattacaatgggaatcagggggacgactttcttacaccctccgggctggcggaacctcgagtggaagattttggaaacgcctggaaactgcatggggattgtcaggatcttcagaaacagcacagtgacccttgcgcactcaacccccggatgacgcgattcagtgaagaagcatgcgccgtcctcactagtcctacattcgaggcatgtcatcgggccgtgagtcctctcccatatcttagaaactgcagatatgatgtgtgtagttgttctgatggacgggaatgcctgtgtggggcactcgcctcttatgcagctgcatgcgctggacggggagtgcgggtcgcctggagagagcctgggaggtgtgaattaaattgccctaagggacaggtctatctccagtgcgggacaccatgtaaccttacatgtaggtctctgtcatatcccgatgaagagtgtaacgaagcttgcctggaagggtgtttttgtccccccgggctctatatggatgaacgaggagattgtgtccctaaggcccagtgtccatgttattatgatggggaaatattccagcctgaagatatattctctgatcatcacacaatgtgttactgtgaagatgggtttatgcactgcacaatgtcgggggttccaggaagtcttctgcccgatgcggtgctatcatcacctctgtcacaccggtcgaaaaggtccctgagttgccgacccccaatggtgaagttggtgtgtccagcagataacttacgcgctgaagggcttgaatgtacgaaaacatgtcagaactatgatctggaatgtatgtcaatggggtgcgtatcagggtgcctttgccccccaggaatggtgagacacgaaaataggtgtgtagctctggaaagatgcccctgctttcaccaggggaaagaatatgctccaggggaaacagtgaaaatcggatgcaatacttgtgtttgccaggatcggaagtggaattgcacagatcacgtgtgtgatgcaacatgtagtactatcggaatggctcattatctcacatttgacggattaaaatatctgttcccaggggaatgtcagtatgttctggttcaggattactgcggatctaaccctgggacatttcgcatcctcgtggggaacaaagggtgctctcacccttcagtgaaatgtaaaaaacgcgtaacaatcttagttgaaggaggagaaatagaactcttcgatggagaggtgaatgtcaaaagacccatgaaagacgaaacacacttcgaggtggtcgaatccggaaggtatataatccttctcctcggaaaagctttgtctgtcgtctgggataggcacctgtctatctcagtcgtcctcaagcagacttaccaggaaaaagtctgtggactatgtggaaattttgatggaatccagaacaatgatctcacttcttcaaacttgcaggtcgaagaagaccccgtggatttcggaaattcatggaaggtctcttcacagtgtgctgatacaagaaaagtccccttagactcttccccagccacatgccacaacaacattatgaaacagacaatggtggattcgagttgtcgcatcctcacttccgatgtattccaggattgcaacaaactcgttgatccagagccatatcttgacgtgtgtatatatgatacatgttcatgtgagtctattggagattgcgcatgcttctgtgatacaatcgccgcctacgcccatgtttgcgcacagcacgggaaagttgttacatggcggactgctactctgtgtccacagtcttgtgaagaacggaacttgagagaaaatggatatgaatgtgaatggcggtataattcctgcgccccggcatgtcaggtgacttgtcagcaccccgagcccctggcatgtcccgtgcagtgcgtcgaggggtgccatgcacattgccctccgggaaaaatcctcgatgagcttctgcagacatgcgtagatcccgaagattgtcctgtttgtgaggttgcaggacggagatttgcaagtgggaaaaaggtgacactgaacccatccgatcccgaacattgccagatctgtcactgtgatgtggttaatcttacttgtgaagcatgccaggaacccggaggattagtggtccccccaactgacgcacctgtatccccaactactctatatgtggaagatatatcagaacctcctctgcatgatttttattgctctcggctattagacttagtgttccttttagacgggtcctcaaggttgtcagaagcagaattcgaagtattaaaagcctttgtggttgacatgatggaacgacttcgcatcagtcagaaatgggtgcgggtagctgtggtcgagtatcacgatggatctcacgcttatatcgggcttaaggaccggaaacgcccatccgaactcaggagaatcgcttctcaggtgaaatacgcaggatcccaggtcgcctccactagtgaagtgctcaaatatacactatttcagattttttctaaaatagatcggcctgaagcttcacgcattacactgctcctaatggcttctcaggaaccacagcggatgagtaggaattttgttcgctatgtgcagggactgaaaaaaaaaaaagtgattgtgattccagtggggatcgggcctcatgctaatcttaaacagatacgacttatcgaaaaacaggcaccagaaaacaaagcatttgtgctgtcttctgtagatgagctggaacagcagagggatgaaatagtttcctatctttgtgatctagcccccgaggccccccctccaacgcttcctcccgatatggcacaagtgacagtcggaccggggctactgggagttagtacacttggacctaaaagaaactctatggttctcgacgttgctttcgtgctcgaagggtcagataaaattggggaagctgatttcaacaggtcaaaagaatttatggaagaagtaatccagcggatggatgtagggcaggattccatccacgtgactgttctgcagtactcctatatggtgactgtcgaataccccttttctgaagctcagtcaaaaggggatattttacagagggtacgggaaataaggtaccaaggggggaaccgcactaatacagggcttgctctccggtatctctctgatcactctttcctcgtgtcacagggggatagagaacaggctcccaatcttgtctacatggtcacaggaaatccagcaagtgatgagataaagaggctacccggggatatccaggtggtgcctataggggttgggcccaatgcaaacgtacaggaactggagaggatcggatggcccaacgctcccatactcatccaggattttgaaacactcccacgtgaggcccctgatctggtgctgcagcggtgctgctctggagagggacttcagatcccaacactttctcctgcccccgattgctcacagcccctcgacgtcatactccttctcgatgggtcttcatcatttcctgcctcgtattttgacgagatgaaatctttcgctaaggctttcatatccaaagccaacataggacccaggctcactcaggtcagtgtactgcagtatggaagtattactacaattgatgtcccatggaacgtggtccctgaaaaagcgcatctgctctcattagttgatgttatgcagagagaaggaggaccctcccagataggagacgccttgggattcgccgtaagatacctgacatctgaaatgcatggagccaggccaggagcttctaaagctgtggtgatcctggtaactgatgtgtctgtagattcggtcgatgctgcagctgatgccgcccggtctaacagagtgactgtctttcccatagggatcggggatcggtatgacgccgcccagcttcggattcttgccgggccagcaggagattctaacgtggtaaaactacagcggatcgaagatctgcctacaatggtgacgctcggaaattccttcttacacaaactgtgctcgggattcgtgagaatttgtatggatgaagatgggaatgaaaaacggcccggagatgtgtggacactccctgaccagtgtcatacagttacatgtcagcccgatgggcagacactcttaaaatcccaccgggttaactgtgatcgcggactgaggcctagttgtccaaattcccagagtccagtcaaagtggaagaaacatgtggatgcaggtggacttgtccctgcgtatgtacagggtcttcaactagacatatcgtgacatttgatgggcagaatttcaaactaactgggtcttgttcatacgtactctttcagaacaaagagcaggatctcgaagtaattctccataacggagcgtgctcccctggagcccgacaggggtgtatgaaaagtatcgaggtgaagcattcggccctctctgtggagcttcattctgatatggaggtgacagtgaacggacggcttgtgtccgttccgtatgtggggggaaatatggaagtcaatgtctatggagcaattatgcacgaggtgcgtttcaaccacctcggacacattttcacttttactcctcagaacaatgaatttcagctccagctctctcccaaaactttcgcctctaaaacatatggactttgcgggatatgtgacgaaaatggggccaacgattttatgttacgcgatgggactgtcactactgactggaaaactctcgtacaggagtggacagtccagcggccagggcagacttgtcagcctatcctggaagagcagtgtctcgttcctgattcttctcactgtcaggtgttattgctccctctgtttgcagaatgtcataaagtcctagccccagctacattctatgcaatctgccagcaggattcatgccatcaggaacaggtgtgtgaagtcattgcaagttacgcacacctttgtcgcactaacggggtatgtgtcgattggcggactccagacttttgtgcgatgtcctgtccgccctccttggtctataaccattgcgaacacgggtgccctcgacattgtgacgggaacgtgagtagttgtggggatcatccctcagaagggtgcttctgtccccccgataaagtaatgctcgaagggagttgcgtccccgaagaagcctgcacacagtgcatcggagaggatggagtgcagcaccagtttcttgaagcttgggtccctgatcaccagccctgtcaaatctgtacttgcttgtctggacgtaaagtgaattgcacaacacagccctgtcctactgctaaagctcccacttgcggactatgtgaggtcgctagactaaggcagaatgccgatcagtgctgtcccgaatacgaatgcgtttgcgaccctgtcagttgtgacctccccccagtaccacactgcgagcgcgggttgcagcccacactaacaaacccaggagagtgtcggcctaacttcacatgtgcttgtcggaaagaagaatgtaaaagggtttcaccccctagttgtcccccccacaggcttcctacacttaggaaaacgcagtgttgtgatgaatacgagtgcgcatgcaactgcgtgaactctactgtctcctgtcctcttgggtacttggcttccacagcaactaatgattgtggatgtactacaactacatgtctgcctgataaagtttgtgtgcacaggtctacaatctatccagtgggacagttttgggaagaagggtgtgacgtttgcacatgtactgatatggaagatgcagttatggggctcagagtggcacaatgttcacagaaaccatgcgaagattcctgtaggtctggattcacttatgtcctacatgaaggagagtgctgtgggagatgtctcccttcagcttgcgaagtcgtaactggaagtccaagaggagattcccagtcttcctggaaaagtgtcgggtctcagtgggcttcacctgagaacccctgcttgataaacgaatgtgtgagggtgaaagaggaagtattcatacagcagagaaatgtgtcatgtcctcagttagaggtgcctgtatgcccctctgggtttcagttatcttgtaaaacatcggcctgttgtccttcatgtagatgtgaacgtatggaagcttgcatgctgaacgggacagtgatagggccagggaaaactgtgatgatcgacgtttgcacaacttgtcgatgcatggtgcaggttggggtcatctcgggattcaaactggaatgtagaaagacaacatgtaacccctgccccttaggatataaagaagaaaacaatactggggaatgctgtggaaggtgtcttcctacagcctgtacaattcagctgaggggaggacaaataatgacactcaaacgcgatgaaacactacaggatgggtgcgatacacacttctgtaaagtaaatgaaaggggggaatatttttgggaaaaaagagtgactggatgtcctcctttcgacgaacacaagtgtctggcagaggggggaaaaattatgaaaatccctggaacttgttgcgacacttgcgaagaacccgagtgtaacgatatcactgcacggcttcagtatgttaaagtagggtcttgtaaatccgaagtggaagtggatatccattattgtcaggggaaatgtgcaagtaaagcaatgtattcaatcgacatcaatgatgtgcaggaccagtgttcctgttgctccccaacaaggacggaacccatgcaggtggctctgcattgcactaacggatccgtggtgtaccacgaagttctgaacgccatggagtgcaaatgtagtccccggaaatgttctaaa

SEQ ID NO: 12544 - DNA, 8439 bp, Artificial Sequence
  derived and/or modified sequence
atgattccagctagatttgcaggtgttttattagctttagctcttattttaccaggaacattatgtgctgaaggaactagaggaagatcaagtacagctagatgttccttattcggttcagactttgtaaatacttttgatggatctatgtattctttcgcagggtattgtagttatttattagcaggtggatgtcaaaaaagaagtttttctataattggggattttcaaaatggtaaaagagtaagtttatcagtatatcttggtgaattctttgacattcatttatttgttaatggaacagtaactcaaggtgatcagcgtgtttcaatgccatatgcatcaaaaggattgtatttagaaactgaagcaggatattataaacttagtggagaagcatatggatttgtagctagaattgatggaagtggaaacttccaagttttactttcagatagatattttaataaaacttgtggactttgtggaaattttaatatttttgctgaggatgatttcatgactcaagaaggaacacttacatctgatccatatgattttgctaatagttgggcattgtcaagtggtgaacaatggtgtgaaagagcatcaccaccatcatcatcatgtaatatttcatctggagaaatgcaaaaaggattatgggaacaatgtcaattacttaaaagtacatcagtttttgcaagatgtcatccacttgttgatccagagccatttgttgctctctgtgaaaaaactttgtgtgaatgtgctggaggacttgaatgtgcatgtccagctcttttagaatatgctagaacatgtgctcaagaaggaatggttttatatggatggactgatcattcagcatgtagtcctgtatgtccagcaggaatggaatatcgacaatgtgtatctccttgtgcaagaacttgtcaatctcttcatattaatgaaatgtgtcaagaaagatgtgttgatggatgttcatgtccagaaggacaacttttagatgaaggattatgtgttgaatcaacagaatgtccatgtgttcatagcggaaaaagatatccaccaggaactagtttaagtcgtgattgtaatacatgtatatgcagaaattcacaatggatttgtagtaatgaagaatgtccaggtgaatgtttggttaccggacaatctcatttcaaatcatttgataatcgttactttactttttcaggaatttgtcaatatcttttagcaagagattgtcaagaccattcattttcaattgttatagaaactgttcaatgtgcagatgatagagatgctgtttgtactaggtcagttacagttagattaccaggacttcataatagccttgttaaacttaaacatggtgcaggtgtggcaatggatggacaagatgttcaacttcctttgcttaagggagatttaagaattcagcatactgtaacagcttcagttagacttagttatggtgaagatttacaaatggattgggatggaagaggaagactacttgttaaattaagtccagtatatgctggaaagacttgtggattatgtggtaattataatggtaatcaaggggacgatttcttaacaccatcaggtttagcagaaccacgagtagaagattttggtaatgcctggaaacttcatggagattgtcaagatttacaaaaacaacactcagacccatgtgctcttaaccctagaatgactcgtttctcagaagaagcttgtgctgtattaactagtccaacttttgaagcttgtcacagagctgtctcaccattaccatatctaagaaattgtagatatgatgtctgtagttgttccgacgggagagagtgtctttgtggagcattagcatcatatgcagctgcttgtgctggaagaggagtccgagtggcctggagagaaccaggaagatgtgaattaaattgccctaaaggacaagtttatcttcagtgtggaactccatgtaatcttacttgtagatctttatcatatccagatgaagaatgtaatgaagcttgtttagaaggttgtttttgtccaccaggattatatatggatgaaagaggagattgtgttccaaaagcacaatgtccatgctattatgatggagaaatttttcaaccagaagatatttttagtgatcatcatactatgtgttattgtgaggatggatttatgcattgtactatgagcggtgttccaggttctcttttaccagatgcagttctttcatctccattatcacatagatctaagcgttctttgagttgtcgtccaccaatggttaaacttgtatgtccagcagataatttaagagcagaaggacttgaatgtactaaaacatgtcaaaactatgatcttgaatgtatgtcaatgggatgtgttagtggatgtttatgtcctccaggaatggttagacatgaaaatagatgtgtagcattagaaagatgtccatgttttcatcaaggaaaggagtatgccccaggagaaacagttaaaattggttgtaatacatgtgtgtgtcaagacagaaaatggaattgtactgatcatgtctgtgatgctacttgttctacaattggaatggctcattatttaacatttgatggactcaaatatttatttccaggtgaatgccaatatgtcttagtacaagactattgtggttcaaatcctggtacattcagaatattagttggtaataaagggtgctctcatcctagtgttaaatgtaaaaaaagagttacaattttagtagagggaggagaaattgaattatttgatggagaggtcaatgttaaacgaccaatgaaagatgaaactcattttgaagtagttgaaagtggacgatatattatattattattgggaaaagctttaagtgttgtatgggatagacatttatcaatttcagttgttctaaaacagacatatcaagaaaaagtatgtggactttgtggaaattttgatggaatccaaaataatgatcttacaagttcaaatttacaagttgaagaagatcctgttgattttggaaatagttggaaagttagtagtcaatgtgctgatacaagaaaagttccacttgattcatcaccagctacatgtcataataatattatgaaacaaacaatggtagattcttcttgtagaattttaacttcagatgtatttcaagattgtaacaaattggtagatccagaaccttatttggatgtatgtatttatgatacatgttcatgtgaaagtattggtgattgtgcatgtttttgtgatacaattgcagcttatgctcatgtttgtgctcaacatggaaaggtagttacatggagaacagcaaccttatgtcctcaaagttgtgaagaaagaaatttaagagaaaatggatatgaatgtgaatggagatataatagttgtgcaccagcatgtcaagtaacttgtcaacatcctgaaccacttgcatgtccagtacaatgtgtggaaggatgtcatgctcattgcccaccaggaaagattttagatgaattgcttcaaacatgtgttgatccagaagattgtcctgtttgtgaggtagctggaagaaggtttgcatctggaaagaaagttactcttaatccttctgatccagaacattgtcaaatttgtcattgtgatgttgttaatttaacatgtgaagcttgtcaagaaccaggaggtttggtagttccaccaactgatgctcctgtatcaccaacaacattatatgtagaagatatttctgaacctccacttcacgacttttattgctcaagattattggatttagtattcttattggatggatcatcaagattaagtgaagctgaatttgaagtactaaaagctttcgtagttgatatgatggaaagacttagaattagtcaaaaatgggtaagagtggctgttgttgaatatcatgatggttctcatgcttatattggattaaaagatagaaaaagaccatcagaacttaggagaattgctagtcaagttaagtatgcaggttcacaagttgcaagcacttcagaagtactcaaatatacactttttcaaattttctctaagattgatagaccagaagcttcaagaattacattacttttaatggcttctcaagaaccacaaagaatgagtagaaattttgttagatacgtgcaaggattaaaaaaaaaaaaagttattgttattccagttggtattggaccacatgctaatttaaaacaaattagacttattgaaaaacaagcaccagaaaataaggcatttgttttaagttctgttgatgaacttgaacaacagcgtgacgaaattgttagttatttgtgtgatttagcaccagaagcaccaccacctacacttccaccagatatggctcaagttacagttggtccaggtttattaggagtttcaactcttggaccaaaaagaaattcaatggtattggacgttgcatttgttcttgaaggttcagataaaattggagaagcagatttcaatcgttcaaaagaatttatggaagaagttattcaaagaatggatgtaggtcaagatagtattcatgttactgttcttcaatactcttacatggttacagttgaatatccattttctgaagctcaatcgaaaggagacatcttacaaagagttagagagataagatatcaagggggaaatagaacaaatactggacttgcacttcgatatctttcagatcattcttttcttgttagtcaaggggatagagaacaagcaccaaatcttgtctatatggttacaggaaatccagcatcagacgaaattaagagattacctggagatattcaagttgtaccaattggagtaggtccaaatgctaatgtacaagagttagagagaattggatggccaaacgctccaattttaattcaagattttgaaactttaccaagagaagctcctgatttagttttacaaagatgttgttctggagaaggattacaaattcctacgttaagtcctgcaccagattgttcacaaccattagatgttattttattgcttgatggatcatcttcttttccagcttcatattttgatgaaatgaaatcttttgctaaagcatttatttctaaagctaacataggaccaagattaactcaagttagtgtacttcaatatggaagtattacaaccatagatgtaccttggaacgtggttcctgaaaaagctcatttgttatctcttgttgatgtaatgcaacgagaaggaggaccatcacaaattggagatgctttgggattcgctgttagatacttaactagtgaaatgcatggtgctcgtccaggagcatcaaaggctgttgtgattttagttaccgatgtttcagttgattcagttgacgcagcagctgatgctgcaagatcaaatagagtaacagtttttccaattggaataggagatcgttatgatgctgcacaattaagaatattagcaggaccagcaggagatagcaatgtagtaaagcttcaaagaattgaagatcttccaactatggtaacattaggaaacagttttttacataaattatgttctggatttgttcgaatttgtatggatgaagatggaaatgaaaaaagaccaggagacgtttggactttaccagatcaatgtcatactgttacttgccaaccagatgggcaaactttacttaagtcacatagagtaaattgcgatagaggattaagacctagttgtccaaattcacaaagtccagttaaagttgaagaaacatgtggatgtagatggacatgcccatgtgtttgtactggttcttcaactcgacatattgttacttttgatggacaaaattttaaattaactggaagttgtagttatgtacttttccaaaataaagaacaagatttagaagttatattacataatggagcttgttcaccaggagcacgtcaaggatgtatgaaatctatagaggttaaacattctgcattatctgttgagttacatagtgacatggaagtaactgttaatggaagattagtttcagtaccatatgttggaggaaatatggaagtaaatgtttatggtgctattatgcatgaagttcgatttaatcatttaggacacatttttacattcacacctcagaacaatgaatttcaattacaactttcaccaaaaacattcgcttctaagacttatggattatgtggtatatgtgatgagaatggtgctaacgattttatgcttagagatggtaccgttactactgattggaaaacacttgttcaagaatggacagttcaaagaccaggtcaaacatgtcaacctattttggaagaacaatgtttagtaccagatagttctcattgtcaagttttgttattaccactttttgcagaatgccataaagttttagcaccagcaactttttacgctatttgtcaacaagattcctgtcatcaagaacaagtatgtgaagtaatcgcatcatatgcacatctttgtagaacaaatggtgtatgtgttgattggagaacaccagatttttgtgctatgtcatgtccaccatcattagtttataatcactgtgaacatggttgcccacgacattgtgatggaaatgtatcaagttgtggagatcatccaagtgaaggatgcttttgtccacctgataaagttatgttagaaggatcgtgcgttccagaggaagcttgtacacaatgtattggagaagatggagttcaacatcaatttttagaagcatgggttccagaccatcaaccatgtcaaatatgtacctgtctttcaggtagaaaggtgaattgtacaactcaaccatgtccaactgctaaggcaccaacttgtggattatgtgaagtagctagattaagacaaaacgctgaccaatgttgtcctgaatatgaatgtgtttgtgatccagtgagttgtgacttaccaccagtacctcattgtgaaagaggattacaaccaacattaacaaatcctggagaatgccgtccaaattttacatgtgcttgtagaaaagaagaatgtaaaagagtgtctccaccatcttgtccacctcatagattaccaactttaagaaaaacacaatgttgtgacgaatatgaatgtgcatgtaattgtgttaacagtacagttagttgcccattaggatatttagcatctacagctactaatgattgtggttgcacaacaactacatgtttaccagataaggtttgtgttcatcgttcaacaatttatccagtaggtcaattttgggaagaaggatgtgacgtatgcacttgtacagatatggaagatgcagttatgggattaagagttgctcaatgttctcaaaaaccttgtgaagattcatgtagaagtggattcacttatgttttgcatgaaggtgaatgttgtggaagatgtttaccatctgcatgtgaagttgttactgggtctccacgaggagattctcaaagttcttggaaatctgttggtagtcaatgggcttcaccagaaaatccatgtcttattaatgaatgtgttagagttaaagaagaagtatttattcaacaaagaaacgtttcatgtccacaattggaagtaccagtttgtccatcaggatttcaattgagctgtaaaaccagtgcttgttgtccatcatgtcgttgtgagagaatggaagcatgtatgttaaatggaactgtgattggtccaggaaagactgtaatgattgatgtgtgtactacatgtagatgtatggttcaagttggagttattagtggatttaaacttgaatgtcgtaaaactacttgtaatccatgtccattaggatataaggaagaaaataatacaggagagtgttgtggaagatgtcttccaacagcatgtacaattcaattaagaggaggacaaattatgacattaaagagagatgaaacattacaagatggttgtgatacacatttctgcaaagtaaatgaaagaggagaatatttttgggaaaagagagtcacaggatgtcctccatttgatgaacataagtgtttagcagaaggaggaaagattatgaaaatcccaggaacttgctgtgatacttgtgaagagccagaatgtaatgatataactgctagattacaatatgttaaggttgggtcatgtaaatcagaagttgaagttgatattcattattgtcaaggtaaatgcgcttcaaaagcaatgtatagtattgacattaatgacgttcaagatcaatgtagttgttgctctccaactagaacagaacctatgcaggtagcattacattgtactaatggttcagttgtatatcatgaagttcttaatgctatggaatgtaagtgttcaccaagaaaatgtagtaaa

SEQ ID NO: 12545 - DNA, 8439 bp, Artificial Sequence
  derived and/or modified sequence
atgattcccgccagattcgccggcgtcttgctggctctggccctgattctgccgggaactctgtgtgctgaaggaaccaggggaaggagctccaccgcccggtgcagtctgttcggaagtgatttcgtgaacacatttgatggctcaatgtatagcttcgcaggatattgctcctatctgctcgccggtgggtgtcagaagcgatccttctcgatcattggcgatttccagaatggcaagcgcgtatccctgagtgtgtatctgggggagttttttgatatacatctcttcgtgaacggaacagtcacccaaggtgaccagagggtgagtatgccatacgctagcaaaggactctatttagagaccgaggccgggtattacaagctgtccggcgaggcttacggtttcgtggccaggatcgatggatctggcaatttccaggtgctccttagtgataggtattttaacaaaacctgcgggctgtgtggaaatttcaatattttcgccgaggatgattttatgacacaggaaggaacactaacgtctgacccttatgacttcgccaatagctgggcattgtcttccggtgagcaatggtgtgagagagcgtctcccccttcatcctcttgcaacatttcatcaggggagatgcagaagggcttatgggagcaatgccagctattgaagagcacttcagtgtttgcccgctgccacccccttgtggacccagaacccttcgtcgccttatgcgaaaaaacactttgtgaatgcgcgggaggactggaatgcgcatgccccgcgttgctcgaatatgccagaacatgcgctcaagagggaatggtgctgtacgggtggaccgatcactccgcctgtagccccgtttgtccagcaggtatggaatacaggcagtgcgtgtcgccctgtgcccgtacctgccaatcactccatatcaacgaaatgtgtcaggaaaggtgtgtagatggatgttcctgtcccgaagggcaactgctggatgagggactttgtgtggaatccacggaatgcccctgcgtacattctggaaagagatacccaccgggaacaagtttatctcgggactgtaatacctgcatctgccgtaactcacaatggatctgctctaatgaagagtgcccaggcgagtgcctagtaactggtcagtctcactttaagagctttgacaatcggtacttcaccttcagcgggatctgccaatatctgctggcgcgagactgccaggatcattcgttcagtatagtgatagaaaccgttcaatgtgcagatgacagagacgctgtgtgtacccgttccgtgaccgttcgcctgcccggccttcataattctctagtgaagttaaagcatggggcaggcgtagccatggacggacaggatgtgcagctcccactcctcaagggcgacctgagaatccagcataccgtgaccgcgagcgtccgtctcagctacggggaggatctgcagatggattgggatggccggggccggttattggtgaaattgagtcccgtatatgcgggcaagacctgcgggctgtgcggtaactacaatggaaatcaaggcgacgatttcctgactccgagtgggctggctgagcccagggtggaggactttggtaatgcctggaaattgcacggagactgccaagaccttcagaagcagcacagtgacccatgcgcactcaacccgaggatgacacgctttagcgaagaagcgtgtgccgtccttaccagtcccacgttcgaggcctgtcacagggccgtatctcctctgccttaccttagaaactgtcggtacgatgtgtgtagctgttctgatggtcgcgagtgcctgtgtggagccttagcctcatacgcggcggcatgtgctggccggggcgtccgcgtagcttggcgagaaccagggcggtgcgagctgaattgccctaagggacaggtgtacctccagtgcggcaccccctgcaacttgacttgcaggagcctgagctatcccgacgaggagtgtaacgaagcgtgtctggagggttgcttctgtcctccgggcctgtatatggacgaacggggcgattgcgtgccaaaggcccagtgtccgtgttattacgatggagaaatctttcaaccggaggatattttttcagaccaccacacaatgtgctactgcgaggatggtttcatgcattgtacaatgagtggagtacccggctctctgctgcccgacgcagtattgtcctcgcctctcagtcacagatctaagaggagcctgagctgtcgaccgcctatggtaaaactggtgtgtcctgctgacaatttgagggccgaaggccttgaatgtaccaagacgtgccagaactatgaccttgaatgcatgtccatgggctgtgtgagtggatgtctctgcccaccaggaatggtgcgccatgagaatcgatgcgtcgcgctggagagatgcccctgctttcaccaggggaaggagtacgcgccaggagaaacagtgaaaatcggctgcaatacatgtgtttgtcaagataggaaatggaattgtaccgatcacgtgtgcgacgcaacttgtagtaccattggaatggcccattatctgacctttgatggcctgaaatacctgttccctggcgagtgtcagtacgtcctcgtgcaggactattgcgggagcaaccctgggaccttccgcatactagtgggtaacaagggatgctcacatccttctgtcaaatgcaagaagagagtaacgatcttggtggaaggcggtgagatcgaactgtttgacggagaagtcaatgtgaagaggcctatgaaggacgagacccactttgaagtcgtcgagtcaggccggtacatcatcttattgctgggcaaggctctgagcgtcgtgtgggaccggcatctgagcatttctgtggtgctcaaacagacataccaggagaaggtatgcggcctgtgcgggaactttgacggtattcagaataatgaccttactagtagcaatctccaggttgaggaagaccccgttgactttgggaactcttggaaagtctcgagccagtgcgccgataccaggaaggttcctctcgacagcagcccagccacttgtcacaataacattatgaaacagacaatggtggattcttcatgcagaatcttaaccagcgatgtgttccaagactgcaataagctagtcgatccagaaccttatttggatgtatgcatctacgacacttgtagctgcgaaagtataggcgattgtgcctgcttctgtgatacaattgctgcgtatgcacatgtgtgcgctcagcatggcaaagtggtcacctggagaactgctaccttatgcccccagtcttgtgaagagaggaaccttcgagaaaatggctatgagtgcgaatggagatataattcttgcgcgccagcttgtcaggtgacgtgccaacaccctgaaccgctggcttgccctgtccaatgcgttgaggggtgccacgctcactgccccccaggcaagattctcgacgagctgttgcagacatgcgtagaccccgaggactgcccagtatgtgaagttgcgggtcgaaggttcgctagcggaaaaaaggtgactctgaacccttcggaccccgagcactgccaaatctgccattgcgatgtagtcaatctaacctgcgaggcctgccaagagcccggaggtttagtagtgccccccaccgatgccccagtttcacccactaccctgtacgtggaggacatttccgagcccccgctgcatgatttttactgttctcggttgcttgatctggtcttcctgctggatggcagttcgaggttgagcgaggccgagttcgaggtgcttaaagcttttgtggttgatatgatggagagactgaggatttctcagaaatgggtgcgggtcgcggtcgtcgaatatcacgatggaagtcacgcctacattggcctcaaggaccggaagaggccttctgagttaagacgaatagctagccaagtgaagtatgcagggtcccaagtggccagtacaagtgaggtgttgaagtatacgctcttccagatctttagcaagatcgatagacctgaggcctcacgtatcacactccttcttatggccagtcaggagccgcaaagaatgtcccgtaattttgtgcggtatgtgcaggggcttaagaaaaagaaagtcatcgtaatacccgtggggattggaccgcacgcgaaccttaagcaaatccgcctcatcgagaagcaggcaccggagaacaaagctttcgtgctcagcagtgtggacgaacttgagcagcagagggacgagatcgtgagctacctgtgtgatctggcaccagaggccccacctcctacgttaccccccgatatggcacaagtgacggtagggccaggacttcttggagtatccacactgggtcctaagcggaattcgatggtcctggatgtggcttttgtcctcgaggggtccgacaaaataggcgaggccgacttcaaccgttccaaggagttcatggaagaggtgatacaaagaatggacgttggccaggactcaatacacgtaacagtgctgcagtattcctatatggtaactgtggaatatccattttcagaggctcagtcaaagggcgacatcttgcagcgagtaagagagatccgatatcagggggggaatcgcaccaacacggggctggcactgcgatatctctctgatcatagctttctggtttcccaaggggatcgggaacaggctccaaatttggtttatatggtaaccggcaatcctgcctccgatgagataaagcggctgcctggagacatccaggtagttcccatcggagtcggccctaacgcaaacgtgcaggaattagagcggatcggttggccgaacgccccgatcttgatccaggatttcgagactctgcctagggaggctccagatctggttctccagcggtgttgtagtggcgaggggctgcagattcctactctctctcccgctccggactgctcccagcctctcgacgttatattgctgctggacgggtcctctagctttcctgccagctatttcgacgaaatgaagagttttgctaaagccttcatctccaaggcaaacatcggccccagattgacccaggtgagcgtcctgcagtacggttcgatcaccaccatcgatgttccgtggaacgttgttcccgagaaggcgcaccttctgtcactagtggacgtcatgcagcgagagggtggtccatcacaaattggcgacgccctaggctttgccgtgaggtatctcacatctgaaatgcacggggcgagaccaggcgcctctaaagcggtggttatcctggtgacggatgtctctgtggacagcgtcgatgctgccgccgatgcagcccggagcaaccgggtcaccgtctttccaatcggtatcggagaccggtatgacgcagctcagctgagaatactggctggcccggctggagactccaacgttgttaaactgcagagaattgaggacttaccaacaatggtgaccttaggcaattcttttttgcacaagctctgcagcgggttcgttagaatctgtatggatgaggatggcaatgaaaagagacccggggacgtgtggaccctgccagaccagtgtcacacagtgacctgtcaacctgatggccagaccctgctgaaatcccacagagtgaattgcgatcgcggattgcgtccgtcctgcccaaacagccagtctccagttaaagtggaggaaacctgtggctgtagatggacctgcccttgtgtgtgtacaggaagtagcacaagacacatcgtgacttttgacgggcagaacttcaaattgacgggttcttgctcatacgtgctttttcagaataaggagcaggatctggaggtgatcctccacaacggagcttgttcaccaggtgcgagacaaggatgtatgaagtccatcgaagtgaagcacagtgccctgtctgtcgaactgcattccgatatggaggtgaccgtgaacgggcgattagtatccgtgccctatgtgggcgggaatatggaggtaaacgtgtatggtgccattatgcatgaagtgaggttcaatcacctggggcatattttcactttcaccccccagaacaacgaatttcaactgcagctttctcctaagacctttgcctccaagacatatggcttgtgcgggatctgtgatgaaaatggcgcgaacgattttatgttgcgggatggcacagttaccaccgactggaaaaccctggttcaggagtggaccgtgcagcgcccaggtcagacttgccaaccgattctggaggaacagtgcctggtgcctgattcctcccattgtcaggtactgctgttgccactgtttgcggagtgccacaaggtcctggcaccagcgaccttctacgcgatctgtcagcaggattcttgccaccaggaacaggtctgcgaggtgatcgcctcatatgcacacctctgtaggaccaacggcgtgtgcgtagattggcggactcccgacttttgcgcaatgtcatgcccaccctctcttgtctataaccactgcgagcatgggtgtccacgccattgcgacgggaatgtgagttcttgcggcgaccatccgagtgaagggtgcttctgcccccctgacaaggtgatgctcgaggggtcctgcgtgccggaggaagcttgcacacagtgtataggagaggatggggtgcaacatcagttcctggaagcctgggtgccagaccatcagccctgtcagatttgcacttgtctgtctggccgcaaagtgaactgtaccacccagccatgcccgaccgcgaaggcaccaacttgcgggctttgcgaggtggcacgcttacgccagaatgctgaccaatgttgcccagagtacgaatgtgtttgcgacccagtgtcctgcgacctgcccccagtacctcactgcgagcggggcctgcagcccaccctgacaaatcctggcgagtgtaggccgaactttacttgcgcatgtcgaaaagaagagtgtaaaagggtctcccccccgagctgtccaccccacagactgccaaccttgcggaaaacacaatgctgtgacgagtacgaatgcgcatgtaactgcgtaaacagcacggtgagttgccctctgggatatctggcctccactgccacaaacgattgcggatgcaccacaaccacttgtcttcctgataaggtctgcgtgcacagatcaacaatttatccagtcgggcagttttgggaagaggggtgcgacgtctgtacatgcaccgacatggaagacgccgtgatgggtctgcgagtggcgcagtgctcacaaaaaccgtgcgaggatagctgccggagtggttttacctatgtgctccatgagggcgaatgctgcgggcggtgtctgccatccgcctgtgaggtcgtcactggctcgcctcggggtgacagtcagagctcctggaaatccgtcggtagtcagtgggccagtcctgaaaacccctgcttgattaacgaatgcgttcgtgtgaaagaagaagtgtttatacagcagcggaatgtgtcttgcccacagttagaagtgcccgtgtgccccagcgggttccagctgtcttgtaagacatctgcctgttgcccgtcttgccgatgtgagcggatggaggcttgtatgctcaatggaactgtgattggtccaggcaaaacagtaatgatcgatgtgtgcacgacatgtcggtgcatggttcaggtgggtgtgatctctgggttcaaacttgaatgcagaaaaactacatgcaatccttgtccgctaggatataaggaggagaataataccggcgagtgttgcggcagatgtctacccaccgcctgtactatccagcttcgcggtggccagatcatgactctgaaaagggacgagaccctgcaggacggatgtgatacccatttttgcaaggtgaatgagagaggagaatacttttgggagaagcgggttaccggttgcccaccatttgacgagcacaaatgtttggccgaaggaggcaagattatgaaaatacctggaacatgttgtgacacatgcgaggagccggaatgtaatgacataacagctagactacagtatgtgaaggtgggaagctgcaagtctgaagttgaagtagatattcactattgccaaggcaagtgcgctagcaaggccatgtactctatcgacatcaacgatgtccaggatcagtgctcttgctgtagcccaacgcggacagagccaatgcaggtagcactgcattgtaccaacggctctgtcgtttatcacgaggtgctcaacgctatggagtgcaaatgctccccacgtaagtgctccaag

SEQ ID NO: 12546 - DNA, 8439 bp, Artificial Sequence
  derived and/or modified sequence
atgattcctgccagatttgccggcgtgctgctggcgctggccctgattctcccaggaacgctgtgtgccgaaggaacacggggtaggtccagtactgcgcgctgtagcctgttcggtagcgactttgtcaataccttcgacggcagcatgtattcctttgccggttactgctcttatctgttggcgggaggatgccaaaagaggtcctttagcatcataggagattttcagaacggcaagagggtctccttgtccgtgtatttgggcgagttcttcgacattcacctgttcgtgaatggaacagtgacacagggggaccagcgggtctcaatgccttacgccagtaagggtctctatcttgaaaccgaagcaggctactataagctctctggggaggcttacggcttcgtcgcgcggatcgacggctccgggaattttcaggtcctgctctctgatcggtatttcaataagacatgcggtctgtgtggcaactttaatattttcgccgaagatgatttcatgacacaggagggtacattgacgagcgatccttatgacttcgccaatagctgggccctgtcctctggcgaacaatggtgtgaaagagcgtccccccccagtagctcctgtaacatctcttccggcgagatgcagaagggtctgtgggagcaatgccaactgctgaagtcaacctctgtgttcgccaggtgccacccccttgtcgaccctgagccgttcgttgcgctctgtgaaaagactctgtgcgagtgtgcaggcggactcgagtgtgcatgtcctgcgctgctggagtatgctaggacttgcgctcaggagggaatggtgctgtacggttggacagatcactctgcttgttctccggtgtgcccagctggtatggaatatagacagtgtgtcagcccgtgcgcccgaacgtgtcagagccttcatataaacgaaatgtgccaggagagatgcgtggatggttgttcatgcccggaaggacagctgctggacgaaggcctctgtgtggagtctaccgagtgcccctgcgtgcactctgggaagcggtacccaccaggcaccagtctgtcccgggattgtaatacctgtatctgtcgaaactcacagtggatttgcagcaatgaggaatgtcccggtgaatgtttggtaactggccagagccatttcaaaagtttcgacaatagatattttacatttagtggcatctgccagtatctcctcgccagggactgtcaggatcactcctttagcattgtcatcgagactgtacagtgtgcggacgaccgcgacgctgtgtgtacccggagtgtgacagtccggctgcccgggcttcataattccctcgtcaaactgaaacacggggcaggcgtagccatggatggtcaggatgtgcaactgccgttgctgaaaggcgatctgaggatccagcacacggtgactgcatcagtcaggctgagctacggggaggaccttcagatggattgggacggccgcggcaggttgctcgtgaagttgtcccccgtctatgctggaaaaacctgcgggctctgtggtaactacaatggcaatcagggggacgacttcttgacaccctctggccttgccgagcccagagttgaggactttggcaacgcgtggaagttgcatggcgactgccaggaccttcaaaagcaacatagcgatccctgtgccctgaatcctcggatgacccgcttcagcgaggaggcttgcgccgttctgacatctcctactttcgaagcctgccaccgggcggtatctcctctgccctaccttcggaattgcagatacgatgtgtgtagttgttcagacggccgagagtgcctgtgcggtgccctggcatcttacgccgctgcatgcgctggcaggggggtcagagtggcctggcgggagcctggtcgatgtgaacttaattgccctaaggggcaagtatatttgcaatgcggaactccttgcaatctgacatgtcgcagtttgtcttatccagatgaggaatgcaacgaggcctgcctcgaggggtgcttctgtccccctgggttgtatatggatgagcggggggattgtgtgcctaaggcccagtgcccatgctactatgacggcgagatcttccagcctgaggacatctttagtgaccaccacacaatgtgttattgtgaggatgggttcatgcattgcactatgagcggtgtgcctgggtccttgctgccagatgccgtgctcagtagccccctctcccacaggtccaagcggagcctctcctgccgccctcccatggtaaaactcgtgtgcccagccgacaacctgcgcgccgagggcttggagtgtacgaaaacttgccaaaactatgacctggagtgtatgtccatgggctgcgttagcggatgcctctgtccacccggcatggtgagacacgaaaaccgctgtgttgcactcgaacgctgtccttgctttcaccaggggaaagaatatgcaccaggggagactgtcaagatcggctgtaatacctgcgtgtgtcaggacaggaaatggaactgtaccgaccatgtctgcgatgccacctgctccacaatcggaatggcccattaccttacctttgacggcctcaagtacctctttcctggggaatgtcagtacgttctggtccaagattattgcggatctaaccccggtaccttccggatcctcgtgggtaataaaggatgctctcaccccagcgtcaaatgtaagaagcgcgtgacgatcctggtggaaggtggcgaaatcgagctgtttgacggcgaagtgaatgtgaaaagacccatgaaagacgaaacacacttcgaggtcgttgagagcggaagatatattatccttttgctgggaaaggctctttctgtggtttgggatcgccacctctccatctccgtggttctgaagcagacctaccaagagaaggtttgtgggctctgtggaaacttcgacggaatccagaataatgaccttacaagcagcaacttgcaggtggaagaggatcccgtcgacttcggtaacagttggaaagtgagctcccagtgtgcggatacccggaaggtgcccctggactcctctcccgcaacatgtcataacaacatcatgaagcaaacaatggtggattcctcttgtcgaatcctgacatctgatgtgtttcaggactgcaataagctggtggacccagagccatatctggacgtctgcatttacgacacctgttcctgtgaatccatcggcgactgcgcttgtttttgcgacacaatcgccgcatacgctcatgtctgcgctcagcatgggaaggtggtcacgtggaggacggccacactctgccctcagagttgtgaggagagaaacctgcgcgagaacggctacgaatgtgaatggcgctataacagctgtgcccccgcttgtcaagtgacctgtcagcaccccgaaccactggcctgccctgttcagtgcgttgaggggtgtcatgctcattgtcccccggggaagatactggacgagctgctccagacatgcgttgatcccgaggattgccctgtctgcgaggtggctgggcggcggttcgcctctgggaaaaaggtcactctgaacccatctgacccggagcactgtcagatttgtcattgcgatgtggtgaacttgacttgcgaggcatgccaggagcccgggggcctggtcgtgccgccaaccgatgctcccgtgagcccaaccactctgtacgtagaagatattagcgaaccccctctgcacgatttctactgcagtcggctcctggatcttgtattcctgctcgacgggagttctcgcttgagcgaagcggagtttgaggtgctgaaggcatttgtggtggatatgatggaaaggctgagaatcagccagaagtgggtccgcgtcgccgtggtggaatatcacgatgggagccatgcttacattggcctgaaagaccgaaagcgcccctctgagctgcgcagaatcgcaagccaggtgaagtacgccggcagtcaggtggcaagcacaagcgaggtgctgaagtacacgctgtttcaaatattttccaagattgatcggcctgaggcctcacgcattaccctgctcctgatggcctcacaggaaccccaaagaatgtcacggaattttgtgagatatgtgcaaggtctcaagaaaaagaaggtgatcgtcattcccgtaggcatcgggccccacgcgaatttgaaacagatccggctgattgagaagcaggcaccagaaaacaaggcctttgttcttagttccgttgacgaattggaacagcagcgagacgaaatagtgtcctatctgtgcgatttggcccctgaggcccctcctcctacgcttccccccgatatggcacaggtcacagtggggcctggactcctcggcgtgtccacactggggccaaagcggaactctatggtcctggacgtcgctttcgtactcgaaggaagcgacaagattggagaggccgacttcaacagatctaaagaattcatggaggaggtgatccagcggatggacgtcggccaagatagtattcatgtcactgtcttgcagtacagctatatggtgacggtggagtacccgttcagtgaggcccagtctaagggggatattctccagagggtccgagagatccggtaccaaggggggaaccggaccaacactgggttggctctgaggtaccttagcgatcattccttcctggtgtcacagggcgacagggagcaggcccccaatctcgtctacatggttactgggaaccccgcaagcgatgagatcaagcggttgcccggagatattcaagtggtaccaattggcgtgggtcccaatgcgaacgtgcaggagttggaacgaatcgggtggcccaatgcccctattcttatccaggatttcgaaactcttccccgggaggcccccgatctcgtgctgcagaggtgttgctctggtgagggattgcagataccgaccttgtccccggctccagattgcagtcagcccttggacgtgatactgttgctggatggctcatcttcctttcctgcaagctattttgacgaaatgaagtcatttgcaaaagccttcatttctaaggcgaatataggaccaaggctgacccaagttagcgtgctccagtacggttcaatcaccacaattgatgtaccttggaatgtggttcccgagaaggcccacctcttgtccttggttgacgtgatgcagcgagagggaggccctagccagattggtgacgccctcggcttcgctgtccgctacctgacgtctgagatgcacggtgcacgaccgggcgcctctaaggcagtggttattctcgtcacggatgtgagtgtggatagtgtggatgcagccgccgatgcggcaagatctaatcgagtgaccgtcttccccatcggtatcggagaccggtacgacgcagctcagctgcgcattctggctggcccagccggtgactctaatgtcgtgaaactccagaggatcgaagacctgcctaccatggtgaccctgggaaactctttcctccacaagctgtgctccggttttgtccggatttgtatggacgaagacggtaatgaaaagagacccggggacgtgtggaccctgccggaccagtgtcacaccgtaacttgtcagccggatggccaaacattgctgaaatcccatcgagtcaactgcgacagagggctcagaccttcctgcccgaactctcagtcacccgttaaggtggaggagacatgtggatgtagatggacctgcccttgcgtttgcactggatctagtacaaggcacattgttaccttcgatgggcaaaattttaaactgacaggatcctgcagctatgtgttgtttcaaaacaaggagcaggaccttgaggtcatcctgcataacggcgcctgttctcccggcgcgcggcagggctgtatgaagagtatcgaggtaaaacactcagccctgtccgtggaactgcattccgacatggaagttactgtcaacggcaggctcgtgtcagtgccctatgtgggcggaaatatggaggtcaatgtctacggcgccatcatgcacgaggtacgcttcaaccatctcggccacatcttcacatttactcctcagaataatgagtttcagctgcagttgagtcccaaaacctttgccagtaaaacctatggtttgtgcggaatctgtgacgagaatggggctaatgactttatgcttagggacggcacagtcacgactgattggaaaactcttgtccaggagtggacagtgcaaaggcctggccagacctgtcagcccatactggaggagcagtgcctcgtgccggattcatcccactgtcaagtgcttctcctgccgctgtttgcagaatgccataaggttctcgcgccggccacattctatgcaatttgtcagcaggatagttgccaccaggagcaggtctgtgaggtgattgcctcatatgcgcatctctgtcggaccaatggcgtctgtgtggattggcgcaccccggacttctgtgcgatgtcatgcccgccctccctcgtgtataatcattgtgagcatggctgcccccggcactgtgacggaaatgtgagctcatgcggcgatcacccaagcgaagggtgtttctgccctccagacaaagtgatgctggaagggagctgtgtcccagaggaggcctgcacgcagtgcatcggcgaagacggcgtacagcaccagtttctggaagcttgggtccctgaccaccaaccttgtcagatctgtacatgtctgtctggtagaaaggtaaattgcacaacccagccttgcccaaccgctaaggcacccacctgtggactctgtgaagtggcccggctccggcagaacgccgaccagtgctgtccagaatatgagtgtgtctgcgaccctgtctcctgcgatctgcccccggtgccccattgtgagaggggtctccagcctacactcactaacccaggggaatgtaggccaaatttcacttgtgcttgccggaaggaggagtgtaagagagtgagccccccttcttgtcccccacaccggctccccacactgcggaagactcaatgctgcgacgagtacgagtgtgcatgcaattgcgtcaatagtacagtgagctgtcctctcggttatctcgcatctacagccacaaacgactgtggatgtacaactacaacctgcctgcctgataaggtgtgcgtgcaccggtctacaatctatcccgtggggcaattttgggaggaagggtgcgacgtatgtacctgtacagacatggaggacgccgtgatgggcctgagagtagcccaatgttcccaaaaaccctgtgaggactcctgtagaagcggctttacctatgtccttcacgagggagaatgttgtggtcgctgtctgccgtccgcgtgtgaagtggtgacaggatctccccgcggggacagccagtctagctggaaaagcgttggcagccagtgggccagccctgaaaatccatgtcttattaatgagtgcgtacgcgtgaaagaggaagtgtttattcagcagagaaatgtttcctgcccgcaactcgaggttcccgtgtgtcctagtggatttcagctgagttgcaaaaccagtgcgtgctgtccatcctgccgatgtgaaagaatggaagcttgcatgctcaatggcactgtcatcggaccggggaagactgtgatgattgacgtctgtacaacttgcagatgtatggtacaagtgggggtcatttctggctttaagctggaatgcaggaaaacgacgtgcaacccctgcccactgggttacaaggaggagaacaataccggtgaatgttgcggtaggtgcctgccaactgcatgcaccattcagttgaggggggggcagattatgactttgaaaagggacgaaactctgcaagacgggtgcgatacccatttttgtaaggtcaatgagcgcggagagtatttctgggaaaagcgcgtgaccggttgtccaccttttgatgaacacaagtgtctcgccgagggtggtaagatcatgaaaattcctggaacatgttgtgacacatgcgaggaaccagagtgcaacgacattaccgcacgattgcagtacgtgaaggttggatcatgcaagagcgaggtcgaagttgacatccactattgtcaaggtaaatgtgcatctaaggccatgtacagtatcgatatcaacgatgtgcaagaccaatgctcatgttgctctccgaccagaacagagccaatgcaagtggctttgcactgtacgaacgggtctgtggtgtatcacgaagtgctgaacgctatggaatgcaagtgttccccaagaaaatgttctaaa

SEQ ID NO: 12547 - DNA, 8439 bp, Artificial Sequence
  derived and/or modified sequence
atgatccccgccagattcgcgggagtactgctcgctctggcacttattttacccgggacactctgcgcagaagggactagagggcggtcttccactgctaggtgctccctctttgggagtgatttcgtgaatactttcgatggatccatgtatagtttcgctgggtactgctcctacctacttgcaggaggatgccagaaacggagtttttccatcattggggacttccagaacggaaagagagtgagtttatcagtgtacttaggagaatttttcgatatacacctcttcgtgaatggaacagttacacagggagatcagcgggtaagtatgccatacgcctcaaagggactttatttggaaactgaagcaggatactataaattatctggggaggcctatgggtttgtggcaaggatcgacgggtcagggaactttcaggtccttctctccgatcggtacttcaataaaacttgcggactatgtgggaatttcaacatattcgccgaagatgactttatgactcaagaggggactctaacttccgatccttacgattttgcaaatagttgggccctctcgagtggggaacagtggtgcgagcgcgcctctccaccctcgtcctcatgcaatatttcaagtggggaaatgcaaaaaggactctgggaacagtgccagctcctcaaatccacgtctgtatttgctaggtgtcaccctttagtcgatcccgaaccattcgtcgcattgtgcgaaaaaacactttgtgaatgtgccggaggactcgaatgcgcctgtcctgcacttttggaatatgccagaacatgtgcccaggaagggatggtgctctacgggtggactgatcattccgcatgttcgccagtgtgtcccgcggggatggagtatcgacagtgcgtttcaccttgcgctagaacttgccagtctctgcacattaacgaaatgtgccaggagcgctgcgtggatgggtgttcttgccctgaagggcagctgctggacgaagggctctgcgtcgagtccacagagtgtccatgtgtgcactcaggaaaacgatatccccctggaacatccctgtctcgggattgtaacacatgtatctgtcgaaattcacagtggatctgtagtaatgaagaatgcccaggagaatgtttggtgacagggcagtcccactttaagagtttcgataatagatactttacattcagtggaatctgccagtatttactcgccagggactgccaagatcattctttttctatagtgattgaaactgtacagtgtgctgacgatcgggatgctgtttgtactagaagtgtgacagtaagactaccagggttgcacaacagtctggtgaaactgaagcatggggccggagtggccatggatgggcaggatgtgcagttaccacttctaaaaggagatcttaggatacagcatacagttacagcttccgttaggctctcttatggggaggatctccagatggattgggatgggcggggacgccttttagtgaaactaagtccagtgtatgcagggaagacatgtggactctgcggaaattataacgggaatcagggggatgattttctcacacctagtgggctggccgaaccacgggtggaagatttcggaaacgcttggaaactgcacggggactgccaggaccttcagaaacagcattctgatccctgcgctctcaacccaaggatgactaggttttctgaggaagcttgtgctgtgctcactagtcctacattcgaagcctgtcatagagccgtttcaccactcccttatctcagaaactgtcggtacgatgtttgcagttgctcagatgggcgggagtgtctctgcggggctctggcctcttatgccgctgcctgtgctggacggggagttagggttgcatggagggagcctggacggtgtgaactaaattgccccaaagggcaggtctacttacaatgcgggactccctgtaatctgacatgcagatcactcagttatcctgatgaggaatgtaacgaggcttgcctggaagggtgtttttgccctcctgggttatacatggatgagcggggggactgtgtgcccaaagcccagtgcccctgttattatgatggggaaatcttccagcccgaagatatattttccgatcaccacactatgtgctactgcgaagatgggtttatgcattgtacaatgtctggggtgcccgggtctctccttcccgatgctgtactatcttctcccctgtctcatcgctccaaaagatcactttcctgtaggcccccgatggtaaaactagtctgccctgctgataacctcagagccgaaggactcgaatgcactaaaacatgtcagaactatgatctcgagtgtatgtccatggggtgtgtgtccgggtgtctttgtccacctgggatggtgcggcacgaaaatagatgtgttgcacttgaaagatgtccatgttttcatcaggggaaagagtacgcccctggagaaacagtcaaaataggatgtaatacatgcgtgtgccaggatcgcaaatggaactgcacagatcatgtgtgtgatgctacatgctctacaatcggaatggctcattatctgacatttgatggactcaaatatctcttccccggagaatgtcagtatgtgctagtccaggattactgtgggagtaatccaggaacttttcgtatccttgtggggaataaagggtgctcacacccctctgtgaaatgcaaaaaacgggtgacaatcctggtagaaggaggagaaatcgaacttttcgatggagaagtgaatgttaaaaggcccatgaaggatgaaacacacttcgaagtggttgaatccggaagatacatcatcctgcttctcgggaaggctctctctgtggtatgggatagacacctctcgatttccgtggttcttaagcagacttatcaggaaaaagtctgtgggctctgtggaaattttgacggaatccagaacaacgaccttacaagttcaaatctgcaggtggaagaagatcctgttgatttcgggaattcctggaaggtgtcttcccagtgtgctgacactagaaaagtacctctcgattcatcccccgccacttgtcacaataatattatgaaacagactatggtagattccagttgcaggatcctcacttccgatgtttttcaggattgtaacaaactagttgatcccgaaccatatcttgatgtatgtatttatgatacttgttcatgcgaatccattggggactgtgcttgcttctgtgatactatcgcagcatacgcccacgtctgcgcccagcacgggaaagtcgtgacttggagaacagcgactttatgtcctcagtcatgcgaagaaagaaacttacgagaaaatggatatgaatgcgagtggcgatataattcctgtgctcctgcctgccaggttacgtgccagcatcccgaaccactcgcgtgtcctgttcagtgtgtggaagggtgccatgcccactgtcctcccgggaaaattcttgatgaactactccagacttgtgtcgatcccgaagattgcccagtatgtgaagttgccgggcgacgctttgcatctgggaaaaaagtaactcttaatccatccgatcctgaacattgccagatctgccattgtgatgtggtgaatcttacatgcgaggcttgtcaggagcctggaggactggtagtcccccctactgatgcgcctgtctctccaacaacgctatatgtcgaggatatatcagaaccccccctgcacgatttttattgctcaagactcctagaccttgtattcctcctcgatgggtcatctcgactaagtgaagccgagttcgaagtgttgaaggccttcgtggtcgacatgatggaacgcctaaggatatcacagaaatgggtgagggttgctgtcgtcgaataccatgatggatctcatgcatatatagggcttaaagaccggaaaagaccctctgaacttaggcgaatagcgagtcaggtgaaatatgctggatctcaggttgcctcaacttccgaagtgctaaaatatactctctttcagatattctctaaaatagatcggccagaggctagtagaataacacttttgctgatggcgtcccaagaaccccaacgaatgtccagaaattttgtgaggtacgtgcaggggttaaagaaaaaaaaagtaattgtcatccctgttggaattggacctcacgcaaatttaaaacagatccggcttattgaaaagcaggcccccgagaacaaagcctttgtactctcctcagtcgatgagctagaacagcagcgcgatgaaatcgtgtcatatctgtgtgatctagcacccgaagccccccctcccacattacctccagacatggctcaggtgactgtggggccggggcttttaggagtttctactcttggacccaaaaggaactctatggtgctagatgtggcatttgtacttgaaggaagtgataaaattggggaagctgacttcaatagatcgaaggaatttatggaagaggtgatacagcgcatggatgtggggcaggactcgatccatgtgactgtgctacagtattcttatatggttactgtagaatatcccttttctgaagctcagtctaaaggggatattcttcagcgagtcagagagataagataccagggggggaatcggacaaacacagggctcgcacttcggtacctgtccgatcattcattcctggtatctcagggagatcgcgaacaggcccctaacctggtgtatatggtgactgggaacccagcttcggatgaaattaaacggcttcctggagatatccaggtcgttcctataggagtagggcctaacgctaatgtgcaggaactggaacggataggatggcccaatgccccaatcttaatacaggatttcgaaactctcccccgggaggcaccagatctggtactacagcgatgctgttcaggagaagggctccagattccaacactctcccccgccccagattgcagtcagcccctagatgtgatactacttctcgatgggtcttccagtttccctgcctcttatttcgatgaaatgaaatcctttgcaaaggcctttatatctaaggccaacatcgggccacggctaactcaggtgtccgtgctccagtatgggtcaattacaacaatcgacgtgccctggaacgttgtgccagagaaagcacacctcctcagtctcgttgatgtgatgcagagagaaggagggcctagtcagatcggagatgctctcggatttgcagtacgctatttgacttcagaaatgcacggagctcggcccggggccagtaaggctgtggtgattcttgtaacagatgtgtcagtggattcagttgatgcagccgctgacgccgctaggagtaacagggtaacagtatttccaatcggaataggagataggtatgatgctgcacaactccggatccttgctggaccagctggggattcaaatgtggttaagttacagagaatagaagatcttcctacaatggtaacattagggaattcttttctacataagctgtgttccgggttcgtgcgcatatgcatggatgaggatggaaacgagaaaagacctggggatgtatggacactcccagatcagtgtcatactgtaacttgtcagcccgatggacagacacttctaaaatctcacagagtgaactgcgataggggactcaggcccagttgtcccaactcacaatcaccagtaaaggtagaagaaacttgtgggtgtagatggacttgcccttgtgtctgtactggatcatccacacggcacatagtcacattcgacggacagaatttcaaactgactggatcgtgtagttacgttttatttcagaacaaggaacaggacctcgaggtgatcctgcataatggggcctgctctccaggagcgagacagggatgcatgaaaagtatcgaagtaaaacatagtgcactgagtgtagagcttcactcagacatggaggtgactgtgaatggacgcctcgtgagtgtgccttatgtcggagggaacatggaggttaacgtgtatggggccataatgcacgaagtccgcttcaatcatctgggacatatctttacatttacaccccagaacaatgaatttcagctccagctctcccccaaaactttcgctagtaaaacatatggactgtgcgggatttgcgatgaaaatggagcaaatgattttatgcttagagatgggactgtaacaactgactggaaaactttggttcaggaatggactgttcagcggcccgggcagacatgccagcctatccttgaagagcagtgtctcgttcctgacagtagtcactgccaggtgctactcctccccctgttcgccgaatgtcacaaagtcttagctccagccactttttatgcaatctgtcaacaggattcttgccatcaggaacaggtgtgcgaggttatcgcctcttacgcacacctctgccgcactaatggagtttgtgtggattggagaacacctgatttctgcgcgatgtcctgtcccccttcactcgtgtataatcactgtgaacatgggtgtcctagacactgtgacggaaatgtttcctcctgtggagaccatccatcggagggatgcttttgtccgcctgataaagtcatgctcgaagggtcatgcgttcctgaagaagcatgcactcagtgcataggagaagatggggttcagcatcagtttcttgaggcctgggttcccgaccaccagccttgtcaaatctgtacttgtctatccggaagaaaggtgaattgcactacacagccttgtcctacagccaaagcccccacatgcggactctgtgaggtggccagattgagacagaacgctgatcagtgctgccccgaatatgaatgtgtttgcgatccagtttcttgtgaccttccacccgtgcctcattgtgaacggggactacagcctacactcacaaacccaggggagtgcaggcccaatttcacatgtgcctgcaggaaagaagaatgtaagcgggtgagtccaccctcatgtcccccacacagactccccacactacgcaaaacacagtgctgtgatgaatatgaatgcgcgtgtaactgcgttaactccacagtgagttgccccctggggtatctcgcttccactgcaacaaatgactgtgggtgtactactactacatgtctgcctgataaagtgtgtgtccaccggtccactatatatcctgttggacagttttgggaagaagggtgcgacgtttgtacatgcacagatatggaagacgccgtgatggggctgcgggtggcacagtgtagtcagaaaccctgtgaagattcctgcaggtccggattcacttacgtcttacacgaaggggaatgctgtggacggtgcctcccctctgcctgcgaggtggtcacagggagtccccggggagatagtcagtcttcctggaaaagtgtggggtctcaatgggcctcccctgaaaatccctgtctaattaatgaatgtgtacgagtcaaagaagaagtttttatccagcagcggaatgtttcctgccctcagcttgaagtgcctgtgtgcccctccggattccagctgtcttgtaagacgtctgcttgctgtcccagttgcagatgcgaaaggatggaggcgtgtatgcttaacggaacagttatcggacctgggaaaacagtaatgattgatgtgtgcacaacatgccggtgtatggtgcaagtgggagtgattagtggattcaaattagaatgtcgaaaaactacatgcaatccttgtccactcgggtataaagaagagaacaatactggagaatgttgtggacgctgtcttcccacagcttgtacaatccagctgcgcggggggcagattatgactctgaaacgcgatgaaacactacaggatgggtgcgatactcacttttgtaaggtgaacgaacggggagagtatttttgggaaaaacgagtcactgggtgccccccattcgatgaacataaatgtctcgccgaaggaggaaaaattatgaagataccagggacttgctgtgatacttgcgaggaacccgaatgcaatgatataacagctagattacagtatgtgaaagtgggatcttgtaaatctgaggtcgaagtcgatatacactattgccaggggaagtgtgcctctaaagcgatgtattccatagatatcaacgatgtccaagatcagtgtagttgttgcagtcctacaaggactgaacccatgcaggtggccttacattgtacaaacgggtccgtggtgtatcatgaagtgttaaatgcaatggaatgcaaatgctctcctaggaagtgttccaaa

SEQ ID NO: 12548 - DNA, 8439 bp, Artificial Sequence
  derived and/or modified sequence
atgatacccgcaaggtttgctggggtactattggctctcgctctgattctgccaggtaccttgtgcgccgaagggacacgaggcaggtccagcacagctagatgctctctttttggcagcgatttcgttaatacttttgacgggtctatgtattcattcgccggctattgtagctatctgctggccggaggttgtcagaaaagaagcttctcgatcatcggagacttccagaacggaaagagagtctctttgtccgtgtacctaggcgaattttttgatatccacttattcgtgaacggaaccgtgacccagggtgatcagagggtgtcaatgccctatgcctctaagggtctatatctcgagaccgaagctggatactacaagctaagtggggaagcctacggattcgtggcaaggatcgatggaagcgggaatttccaggtgctcttatccgatcgttattttaataagacctgtggcctgtgcggaaacttcaatatatttgccgaggatgattttatgacccaagaaggtactttgacatcggacccatatgacttcgccaattcatgggctctgtcttcgggagaacagtggtgtgagagagcctcccctcccagctcctcctgcaatatctcatccggcgagatgcagaaaggactgtgggaacagtgtcagctgttgaagagcacatcggtctttgcccgttgccaccccctggtagacccagaaccctttgtggccctttgcgaaaagacactgtgcgaatgtgctggtggactggagtgcgcttgcccagccttgcttgagtacgcccgcacctgtgctcaagaaggcatggttttatatgggtggaccgaccactccgcctgttcgccagtctgtccagctggcatggagtacagacaatgcgtgagcccttgcgctaggacatgtcagtctcttcatatcaatgagatgtgccaggagaggtgtgtagacggatgcagttgccccgagggacagctgttggatgaaggcctgtgtgtcgaaagtaccgagtgcccctgtgtccactcaggcaaaaggtatccacccggtacatccctgtcgcgagactgcaatacttgcatctgccgtaatagccaatggatttgttccaatgaagagtgtccaggcgagtgtctggtgacaggccagtcccactttaagtcatttgacaacagatacttcacctttagcggaatttgccagtacctcctggcccgagactgccaagaccatagcttcagtatcgtgatagaaaccgtgcagtgcgctgacgaccgagacgcggtgtgcactagatccgtgacggtcaggctgcccgggcttcataatagcctggtgaaactgaaacatggcgcaggagtggcaatggatgggcaggacgttcaactgccactgcttaaaggcgacctgagaatccagcacactgtcactgcatcagtccgactgtcttacggtgaagacctgcagatggattgggatggtagaggcaggctactggttaagttaagcccagtatacgccggcaaaacctgcggactctgtggcaattataatggtaaccagggtgatgattttctgacaccgagtggcctcgccgaacctagggtcgaggacttcggcaacgcgtggaagctgcacggagactgtcaggatttgcagaagcagcatagtgatccgtgcgccctgaatcctagaatgacgaggttcagcgaagaagcatgtgcagtgctgacaagtccaacatttgaagcgtgtcaccgcgctgtgtccccactgccctatctgaggaattgtaggtatgacgtgtgctcttgctcggatgggcgagaatgcctgtgcggggctctggctagttacgctgccgcctgtgcaggtcgaggcgtccgggtggcttggagagaacctgggcgttgcgaattgaactgtcctaaaggtcaggtttaccttcagtgcggcacaccatgcaacttgacctgtcgttccctcagctaccctgacgaggaatgcaatgaggcctgcctggagggatgcttctgtccccctggcctttatatggatgagcgaggcgattgcgtcccaaaggcccagtgtccctgctactatgacggcgaaatatttcagcctgaggacatattctcagaccaccatactatgtgttactgtgaagatggattcatgcactgtaccatgtcaggcgtgcccggcagcctgttgcccgacgctgtcttgtctagccctctttctcatcgaagcaagaggtccctctcatgccgtccccccatggtgaaactcgtatgccctgcggataatcttcgggcagagggattagaatgcacaaagacttgtcagaactacgatttagaatgcatgagtatggggtgtgtctccggctgcctttgtcctcccggtatggtgcggcacgaaaaccgatgtgttgccctggaaaggtgcccttgtttccaccaggggaaagagtacgctcctggagagacagtgaagattggatgcaatacgtgcgtgtgtcaggatagaaagtggaattgtacagatcatgtgtgcgatgccacttgtagtactataggcatggcacattacctgaccttcgatggccttaagtatctattccctggcgaatgccagtatgtgctggtgcaagattattgtggctccaatcctggaacgttccgaattttggtcggaaacaaaggttgcagccatcctagtgtaaagtgcaagaaaagagtaaccatccttgttgagggcggagaaattgagcttttcgatggagaggtaaacgtgaagagaccaatgaaagatgagactcactttgaagtggtcgagtctggtagatatattatccttctgcttggtaaggcactgtctgtggtgtgggatcgccatctgagtatttccgtagtactcaagcagacctaccaggaaaaggtctgtggtttatgtgggaattttgatggaattcaaaacaacgacctgactagctccaacctgcaggtcgaagaggaccccgtggatttcgggaactcatggaaggtcagctcccagtgtgcggacacccgaaaggtacctctggattccagccctgcaacttgccataataatattatgaagcagactatggtggactcatcctgccgaattctcaccagtgacgtgttccaggattgcaacaagttggtggaccccgagccatacctggatgtgtgtatttacgacacatgctcctgtgagtccattggcgactgtgcatgtttttgtgatacgatagccgcctacgcccacgtgtgcgctcagcacggtaaagtggtgacttggaggacagcaaccctgtgccctcaaagctgcgaagagagaaatctcagggaaaacgggtatgagtgcgagtggcgatataacagttgcgcccccgcgtgccaggtgacatgtcaacacccagaacctttggcttgtcctgtgcagtgtgtagaaggctgtcatgctcactgtccacccggcaagatattggacgaacttctgcagacttgtgtcgaccctgaagactgcccagtttgtgaggttgccgggaggcgttttgctagtggaaaaaaggtcactctaaatccttctgatcccgagcactgccagatttgtcactgtgacgtggtgaatctgacatgtgaggcctgtcaagaacccggtggcctggtggtgccccctactgacgcccccgtaagccccactacattgtatgtcgaagacatcagcgagcctccactccatgatttctactgtagccgtctgctagatttggtttttctgttggacggttccagcaggttaagtgaggccgagttcgaagtgttgaaagccttcgttgttgacatgatggaaagactccggatcagccagaaatgggtgagagtggccgtcgtcgagtaccacgacggttcccacgcgtatatcgggctgaaggacaggaaaaggccgtctgaactgagaaggatcgcttctcaggtcaagtatgctgggagccaggtagcctccacctctgaggtgcttaagtataccctgttccagattttttcaaaaatagataggccagaagcatcacggattaccctccttctgatggccagtcaggagccccagaggatgagcagaaacttcgtaaggtacgtgcaaggcctgaaaaaaaagaaggttatcgtcatccctgtgggaatcggaccacacgcaaatttgaaacaaatacgactgatcgagaagcaggccccagaaaataaggccttcgtgctttccagcgttgatgagctggagcagcagcgcgatgagatagtctcttacctctgtgatctcgctccagaagccccaccccctacccttccaccagacatggctcaggttacagtgggtccaggtttactgggcgtctcaacccttgggcccaagcgcaactcaatggtcttggatgtggccttcgtgctcgaagggtccgacaagataggggaagccgacttcaataggtcgaaggagttcatggaggaggtgatccagcgaatggacgtcggccaagattccatccatgtgacagtcctgcaatattcatatatggttacagtggagtaccctttcagcgaggcccagtccaagggcgacatactgcaaagggtgcgtgagattcgctaccaaggggggaatcgtaccaataccggattagccttgcgatacctgtcagaccactcatttttggtctcccaaggcgacagggagcaggcgcccaatcttgtttatatggtcaccgggaaccctgcctccgacgagatcaagcgattgcccggcgatatccaggtggtcccaattggagtaggacccaacgcaaacgtccaggagctggaaagaataggctggcccaatgctcccattctcatacaagattttgagaccctccctagggaagcacctgaccttgtgttgcagcggtgttgttcgggcgagggacttcagattcccaccctgtcacctgccccagactgcagccagccactcgacgttatcctgctgcttgacggttcttcctctttccccgcctcctacttcgatgaaatgaagagctttgcgaaagcctttatttcgaaggcaaacatcggacccaggttaacacaggtgtctgtacttcagtatggctctataacgacgatcgatgtgccgtggaacgtcgttcccgagaaagcacatctgctaagtttggtggacgtgatgcagagagagggaggaccatcccagatcggtgatgccctgggctttgccgtccgatacttgacctcggaaatgcacggcgcacgaccaggcgcgtctaaggcagtggtgatcttggtgaccgacgtgtctgtggactctgtggacgccgctgcggatgcagccaggtccaaccgagtaaccgtctttcccatcgggattggcgaccggtacgacgcagctcagctgagaatactggcaggccctgcaggagacagcaacgtggtcaagctgcaacgaattgaagatcttcccacaatggttaccttaggtaattcgttcctgcacaagttgtgctcaggattcgtaagaatttgcatggacgaagatggcaatgaaaaaagacctggcgatgtctggactttacctgatcagtgtcacaccgtaacctgccagcctgacggtcagaccttactaaaaagccatcgtgtcaactgcgacaggggtctgagacccagttgtcctaattcacagtcccctgtgaaagttgaggagacttgcggatgccgatggacatgtccctgcgtttgcactggctccagtaccaggcatatcgtgacattcgatggccaaaatttcaagcttactggctcttgttcatacgtgctttttcagaacaaggaacaagatctcgaagtcatcctgcacaatggcgcttgcagtcccggcgcccgacagggatgcatgaagagcattgaggttaagcacagcgccctgtctgtggagctccattctgatatggaggtaaccgtcaacggtagactggtgtccgtgccttatgtcggcggtaacatggaggttaatgtgtatggggccataatgcacgaggtgagatttaatcacttggggcatatctttactttcaccccccagaataatgagttccaacttcagctttcccccaagacgtttgccagtaagacttacggcctatgcggtatatgcgacgagaacggcgccaacgattttatgctcagggacggcactgtcaccaccgattggaaaaccctggtgcaagagtggactgtgcagcgacccggacagacctgtcagccaatcctcgaagaacaatgtctggtgcccgattccagccattgccaggtgctgctgctgcccctgttcgccgagtgccacaaagtcctggccccggccacgttctacgctatttgtcagcaagatagctgccatcaggaacaggtctgcgaggtgattgcatcatatgcccacttatgtagaacaaatggcgtgtgcgtcgactggcggaccccggatttttgcgctatgtcttgtccccccagtctggtgtataaccattgtgaacatggctgtcccaggcactgtgacgggaacgtgtcttcatgcggtgatcacccaagcgagggttgcttctgccctcctgataaggtgatgctcgaaggttcgtgcgtgcctgaagaagcctgcactcaatgcattggagaagatggggtccaacaccagttcctggaggcttgggtgcccgaccaccagccatgccaaatctgtacttgcctaagcgggaggaaggtgaattgcaccacccagccctgtccgacagcgaaagcgcctacttgtggactgtgtgaagtggctcgactgagacaaaatgcggaccagtgttgtcccgagtatgaatgcgtgtgcgatcctgtgtcttgcgatctcccccctgtcccacactgtgagcgcgggctgcagccaactctgacgaatcccggagaatgtaggcccaactttacttgtgcctgtagaaaggaagaatgcaaaagggtgagccctcccagctgcccaccacaccggttgcccacccttcgaaagactcagtgctgtgacgaatatgagtgcgcatgcaattgcgtaaacagcacggtcagctgccccttaggatacctcgctagcacagcaacaaacgactgtggctgtaccacgactacttgtctccctgataaagtctgcgtgcaccgcagcacaatttatccggtgggccaattctgggaggaagggtgcgacgtttgcacttgtactgatatggaggacgctgtcatgggcctgcgagtggcacagtgttcacagaaaccttgcgaggattcttgccgatccggcttcacgtatgtgctgcacgaaggcgaatgttgcggtcgatgtctgccatcggcctgtgaagtcgtcactggaagcccacggggggacagccagagttcatggaagagcgtaggaagccagtgggcctcccccgaaaacccatgtctaattaatgaatgtgtgagggtgaaagaagaggtgtttatccagcaacgaaacgtgagctgtccacagttggaagtgccagtctgcccatcaggcttccaactgtcttgcaaaacatctgcctgctgcccaagctgtagatgcgagcgaatggaggcttgtatgctgaatgggaccgtgatcggaccaggaaaaactgtaatgatagacgtgtgtactacatgtagatgtatggtgcaggtgggagtcatcagcggattcaagctagaatgtagaaaaacaacttgtaatccctgcccactgggctacaaagaagagaacaatacaggcgaatgttgcggtcgctgcctccctacagcctgcacaatccagctacggggtggccagatcatgactctgaagagggatgagactttgcaagatggttgcgacacccacttctgcaaggtcaatgaaagaggtgagtacttctgggagaagagggttaccggctgccctccctttgatgaacataagtgtctggctgagggaggtaaaattatgaagattcccggcacctgttgcgatacttgtgaagagcctgagtgtaacgatatcaccgcacgattacagtacgtaaaggtcggcagctgtaaatccgaagtggaggtggacatccattactgccagggaaaatgtgcgtcaaaggcgatgtatagtatcgatataaacgatgtgcaggaccagtgttcctgttgcagcccaacccgaactgaaccaatgcaggtagcattacattgcacaaacgggagcgtggtgtatcacgaagtgctgaacgctatggagtgcaaatgctcccctagaaaatgttctaag

SEQ ID NO: 12549 - DNA, 8439 bp, Artificial Sequence
  derived and/or modified sequence
atgataccagcccggttcgccggcgtccttctggcactcgccctgatcctaccgggaacactgtgcgccgagggcacgcggggccgttctagcacagctcggtgcagcttatttggaagtgacttcgtgaacactttcgacgggtccatgtacagctttgccggttactgtagttacttactggcgggaggctgccagaagcggtccttcagtataatcggggacttccagaatgggaaacgggtgagcttgtcagtctatctgggagagtttttcgacatccatcttttcgtgaacggcacagtgacccagggggaccagagggtttcaatgccttacgcctcaaaaggcctgtacttagagacagaggctggatattataaattgtccggcgaggcttatgggttcgtggcgcgtatagatgggagtggaaatttccaggttctcctaagtgacaggtacttcaataagacttgcggcctgtgtgggaactttaacatctttgctgaagatgatttcatgactcaagagggtacgctcacatctgacccctatgacttcgcgaattcatgggcgctaagttctggggaacagtggtgtgaaagggcaagcccaccctcttccagctgcaatatctcatctggagagatgcagaagggcctttgggagcagtgccagctcctcaagtccaccagtgtctttgctagatgccacccccttgtggatcctgaacccttcgtcgctctgtgtgagaagacgctgtgcgagtgtgccggtggcttggaatgtgcctgtcctgctctgctcgagtatgccagaacctgtgctcaggagggaatggtgctttatgggtggactgaccactcagcatgctccccggtgtgtcccgccggaatggagtatcgccagtgtgtctcaccgtgtgctcggacctgtcagtctctacacataaacgaaatgtgccaggagcgctgtgttgatggctgcagctgtcccgagggacagctactggatgaaggactttgcgtcgagagcaccgagtgtccttgtgtccactctggaaagcggtatccccccggtacctccctgagtcgggactgtaatacctgtatctgtcgtaacagccagtggatatgttcgaacgaagagtgccccggcgagtgtctggtgacaggccagtcccattttaagagcttcgataatcggtacttcactttctctggaatctgccagtacctgctcgcccgggactgccaagaccattccttcagtattgtaatagagacggtgcagtgtgctgacgatagagacgctgtgtgcactaggagcgtcacagtgcgactaccaggacttcataattctctggtcaagctcaagcatggggccggagtcgcaatggatgggcaggatgtgcagctccctctgttgaaaggagatctcaggattcagcacaccgtaacggcttctgtccgtctgagttacggcgaggatttacagatggactgggatgggagggggcggttactggtgaagctgtcgcccgtctatgccggaaaaacatgtggtctttgcggtaactataacggaaatcagggtgacgatttcctgactccaagcggcttagccgaaccccgagtggaggatttcggcaacgcttggaaattgcatggggattgccaagacctccaaaaacagcactcggacccatgcgctctcaatcccagaatgacccgattctccgaagaagcctgtgctgtattgacatcacctaccttcgaggcatgtcatcgagcagtgtctccgcttccctatctgagaaactgtcggtacgatgtatgcagttgttctgatggacgtgagtgcttgtgtggagcgctggcctcatacgcggccgcctgcgctggacgcggagtgcgcgtggcttggagagagcccggccggtgcgaacttaattgcccaaagggccaggtgtatctccagtgcgggacgccctgtaaccttacgtgtaggagtctgtcttatcctgatgaagagtgtaacgaagcttgtttggagggctgtttttgtcctcccggcctgtatatggacgaaagaggcgactgtgttcccaaagcccagtgtccatgctactatgatggtgagatctttcagcccgaagacattttttcagaccatcacacaatgtgctattgtgaagatggcttcatgcactgcactatgtctggcgtcccaggatctctgctccctgacgccgtgctctcttctccactgagccaccggagtaagcggtccctgtcttgtcggccgcctatggtgaagctcgtgtgtcccgccgataacctgcgcgcagaggggctggaatgcactaagacttgccaaaattatgacctggagtgtatgtcaatggggtgtgttagcggatgcctatgcccccctgggatggtcagacatgaaaacagatgtgtggcccttgagagatgcccctgcttccatcaggggaaagaatatgctcctggtgagacagtgaagatcggctgtaacacgtgtgtgtgccaggaccggaaatggaattgcacggaccacgtttgtgacgcgacttgctctacaatcgggatggctcactatttgacatttgacgggttgaagtacctgtttcccggggagtgccaatatgtgttagtacaggattactgtgggtctaatcctggtactttcagaattctcgttggaaacaagggatgcagccatccttctgtcaaatgcaagaagcgtgtgactatcctagtggagggaggagagattgaacttttcgatggcgaggtcaacgtcaagcggcccatgaaggatgagacccacttcgaggtcgtagagtcagggaggtacatcattctgctcctcggcaaagcactgagcgtggtgtgggatcgccatctctctattagcgttgtgctcaagcagacttatcaggagaaagtgtgcgggctgtgtggaaattttgacgggatccagaataacgacctgactagcagcaatctccaggtagaagaagatccggtcgatttcggtaatagctggaaggtgtcatcacaatgtgccgatacaagaaaggttccactcgactcttcccccgctacctgccataataatatcatgaaacaaactatggtggatagtagctgccgcattcttacatcagatgtttttcaggattgcaacaagttggtggaccctgaaccatatctcgatgtgtgtatttacgatacatgctcatgcgagagcataggcgattgtgcttgtttttgtgacaccatagccgcctacgcacatgtgtgcgcacagcacggaaaggttgttacctggcgcacagcaaccctttgtccgcagtcgtgcgaagagcggaatttacgggaaaacgggtacgagtgcgaatggcgctacaattcatgcgcaccggcatgccaggtgacgtgccagcacccagaacctcttgcgtgtcccgtgcagtgcgtggagggatgtcacgcgcattgccctccaggaaagattcttgacgagctccttcaaacttgtgtggacccggaggactgcccggtttgcgaagtggccgggcggcgctttgcgtcaggaaagaaagtcactcttaaccccagtgacccagaacactgtcagatatgccattgcgatgtagtaaatttgacatgcgaggcatgccaggagccgggaggattggtggtacctccaaccgatgcccctgtcagtccgaccactctgtacgtagaggatatctctgaaccccccctacatgatttctattgttcacgcttgctggacttggtgttcctgctggacgggtcttcgcggctgtcagaggctgagttcgaagtcttgaaagcttttgtggtggacatgatggaaagactccgcattagtcagaagtgggtcagagtggcagtggtcgagtaccacgacggatcacacgcttatattggtcttaaggatcgcaagcgaccaagtgaacttcgcagaatcgcttcccaggtgaaatatgccgggagtcaagtggcttcaactagtgaagtgctgaagtatacgctgtttcagatctttagcaagatagatcgtccggaggccagccgtataaccctgctgctgatggctagtcaagagccccagaggatgagccggaatttcgtacgctatgtgcaagggctcaagaaaaaaaaggtgatcgtcatcccagtggggatcgggccgcacgccaatttgaagcagattcgattaatcgaaaagcaggcacccgaaaacaaggcgtttgtgctgtcatctgtggatgagcttgagcagcagcgagacgaaatagtgagctacctgtgtgatctagcacctgaggccccaccccctaccctcccacctgatatggctcaagttacagtcggaccaggcctcctgggcgtctcgacgttgggacccaaacgcaacagcatggtcttagacgtggccttcgttctcgagggatccgacaaaataggggaggcagatttcaacaggagcaaagagttcatggaggaggtcatccagagaatggacgtgggccaggattcaatccatgtgactgtactacagtattcttatatggtgactgttgagtatcctttctccgaggcccagtccaagggcgacatcttacagagagttcgcgaaatccgctatcagggtggcaaccggactaatacaggtctcgcactcaggtaccttagcgaccattccttcctcgtctctcagggagaccgcgagcaagcacccaatctggtgtacatggtcaccggcaacccagcatcagacgaaatcaagcggctgcccggcgacatacaggtagtccccatcggcgttggaccgaacgcaaacgtgcaagaacttgagcggatcggttggcctaacgccccaatcctgatccaagactttgaaactctgccccgcgaagcgcccgatcttgtgctgcagagatgctgctcgggggaaggactccagatcccaacactgtctccggctcccgactgcagtcaaccactcgatgtgatcctactactggatgggtcgagcagcttcccagcatcttacttcgacgagatgaaatcgtttgccaaagcttttatcagtaaagcgaatattggcccacggttgacccaagtgtcagtgttgcagtacggttcaatcaccaccattgacgtgccctggaacgtcgtccctgagaaagctcaccttctcagcctggtcgacgtgatgcagagagaaggaggcccaagtcagattggggatgctttgggctttgcggtgcggtacctaacgtcagaaatgcacggagccaggcctggagcctccaaggcagttgtgatacttgttaccgacgtttcagttgatagtgtcgatgccgcggctgacgcagccaggtccaacagggtgactgtgtttcccatagggatcggggatcggtacgatgcagcccagctgcggattctcgcaggacccgctggtgatagtaatgtggtgaagctgcaaaggatagaagacttgccgacaatggtgaccctgggaaactcattcttgcacaagctgtgtagcggcttcgtgcggatttgcatggatgaggacgggaatgaaaaacgacctggagacgtgtggacccttcctgatcaatgtcatacagtaacctgtcaacctgacggtcagaccctgctgaaaagccaccgggtgaactgtgaccgcggcctccgaccttcctgtcccaacagccagtcacctgtgaaggtcgaggagacgtgtggttgtcgttggacctgtccatgtgtatgcaccgggagcagcacacggcacattgttactttcgacggtcagaactttaagcttacggggagttgcagctatgtattgtttcagaataaagagcaggacttagaagttattctgcacaacggcgcgtgcagccccggggctcgacagggatgcatgaaaagtattgaagtgaaacatagcgctctatctgttgagctccacagtgacatggaagtgactgtgaacgggcgattagtgtcagtaccatacgtgggaggcaatatggaagtgaacgtgtacggcgcgattatgcacgaagtgcggtttaaccacctggggcatatcttcacatttaccccccagaacaacgaattccagctccagctgtctccaaaaacatttgcctctaaaacatacgggctgtgcggaatttgcgacgagaacggcgcaaatgacttcatgctccgtgacggcacagtgaccaccgactggaaaaccctggtacaggagtggacggtgcaacgcccgggccagacatgccagcctatcctggaggaacagtgcctggtccccgattcttctcattgtcaggtgctgttgcttcctctgtttgcagagtgtcataaagtcttggcgcctgccacattttatgcaatctgtcagcaagattcctgtcaccaggagcaggtgtgtgaggtgattgcttcctatgctcatctatgcaggacaaacggggtgtgcgtggactggagaaccccggatttctgtgcgatgtcatgccccccttccctggtttacaatcactgcgagcacggctgtccaaggcactgtgacggtaatgtgagctcgtgtggcgatcacccctcagagggatgcttctgtccccccgacaaggtaatgctggaaggctcttgcgtacctgaggaggcatgcacccagtgtattggcgaggacggtgttcaacaccagtttctcgaagcctgggttccggatcaccaaccctgtcagatctgcacctgcttgtctgggcgcaaggtgaactgcaccactcagccatgcccaactgcaaaagccccaacatgtgggttgtgcgaggttgccagactgagacagaacgccgatcagtgctgcccagagtacgagtgtgtttgcgacccagtgtcctgcgacttgccccctgttccacactgtgaaaggggactacagcccacactgacgaatcccggtgaatgcagacctaattttacttgtgcctgccgcaaggaggaatgcaagcgcgtcagcccgcccagttgcccccctcataggctgccaaccttgaggaagacccaatgttgtgacgagtacgaatgcgcctgtaattgcgtaaactcgactgtctcatgtccactaggctacttagcctccaccgcgacaaacgactgtggatgcaccaccacaacctgtctgcctgataaagtgtgtgtccaccggtccactatttaccctgtcgggcagttttgggaagagggatgcgatgtctgcacttgcaccgacatggaggatgcagtgatgggtctgcgcgtggctcagtgcagccagaaaccatgcgaagattcttgcagatcgggattcacatacgttctccatgaaggggagtgttgtggtcgatgcctgcccagtgcatgtgaggtggtaaccggctctccccgaggggactcacagtctagctggaaatctgtaggaagtcagtgggcgagtcccgaaaatccctgtctcataaacgagtgcgtgcgcgtgaaggaagaggtcttcattcagcagcggaatgtcagctgtccccagctcgaggttcccgtctgtccatctgggtttcagctgtcatgtaaaacctccgcctgttgtcctagttgccgctgtgagagaatggaagcctgtatgcttaacggtacggtaatcgggcctggaaaaacagtcatgatcgacgtctgtaccacctgcaggtgtatggttcaggtgggtgtcataagtggttttaaactggagtgtcgaaagaccacctgcaatccatgtccactcggctacaaggaggagaacaataccggtgagtgttgcgggcgctgcctgcccacggcatgcacaattcagctcagaggcggccagatcatgaccctgaagagggacgagaccctccaggacgggtgcgacacccacttttgcaaagtgaacgaacggggggagtatttttgggaaaaaagggtaaccggatgtccaccattcgacgagcacaaatgtctggccgaaggcggcaaaataatgaagattccaggcacatgttgtgacacttgtgaggagcctgagtgcaatgatattactgcacggttacaatatgtgaaggtagggtcctgcaagagcgaagtggaggttgacattcattactgccaaggtaaatgcgccagcaaggccatgtactctatagacattaacgacgttcaagaccaatgttcttgttgcagccccacgaggacggaacccatgcaggtggctctgcactgcacgaacgggagcgtcgtttatcacgaagtcctgaatgctatggagtgtaagtgctctccaaggaagtgctctaag

SEQ ID NO: 12550 - DNA, 8439 bp, Artificial Sequence
  derived and/or modified sequence
atgattcctgcaagatttgctggcgtgcttctggccctagcgttaatcctgccaggcacgctttgcgcagagggcacccgggggcgcagcagtactgccaggtgctcactttttgggtcagacttcgtgaacacattcgatgggagcatgtactcattcgcggggtactgtagctacctgctggccggtggatgccagaaaaggagcttctccattattggcgacttccaaaacgggaaaagggtttccttatcagtgtacttgggcgagttctttgatatccacctgtttgtcaacgggaccgtgacccaaggcgaccagcgtgtatcaatgccatatgcgtccaagggcctttacctcgaaacggaagctggttactacaaactgagcggagaggcttatgggtttgttgctaggatcgacggcagcggaaatttccaggtgttgctgtccgaccgctatttcaacaagacatgcgggctctgcgggaacttcaacatcttcgcagaggacgactttatgacacaagagggaaccctgacttcagatccctatgactttgcaaacagttgggccttgtcaagcggggagcagtggtgtgagagggcttctcctccctccagttcatgtaacatatcaagcggggagatgcagaaaggcctgtgggagcagtgtcaactccttaaatcaacaagcgtctttgcacgatgtcatcccctggtggatcctgagcccttcgtagccctttgcgagaagacactgtgcgagtgcgccggcggactggagtgtgcttgtcctgcactgctcgaatatgctagaacatgcgcacaggaggggatggtcctgtatggctggactgaccattccgcctgtagtcccgtttgccctgccggcatggagtatcggcaatgcgtttccccgtgcgcaaggacctgtcagagtctgcatatcaatgagatgtgtcaagagcgctgcgtcgatgggtgcagttgcccagaaggacagctgcttgatgaaggactgtgcgtcgagtcgactgagtgtccgtgcgtgcattcagggaaacggtacccaccaggcacatccctgtcccgagattgcaatacctgtatttgccggaattctcagtggatctgctctaatgaggaatgccccggggaatgtcttgtcacaggccagtctcatttcaagtctttcgataatagatatttcaccttctcgggtatttgtcagtacttgttagcccgggactgccaggaccacagctttagtatcgtgatcgaaaccgtccagtgtgctgatgatcgagacgcagtgtgtacacggagcgtcactgtacgtcttcctggattacacaactccttggtcaaactcaaacacggcgctggcgtcgcgatggatggccaggatgtacaactgccactgttaaagggggacttaaggatccaacacactgttactgcgtcagttcgcttgtcttacggcgaagatctccaaatggactgggatggtagaggacggctccttgtgaagctgagccccgtgtacgcgggcaaaacttgcgggttatgtgggaactacaatggcaaccagggcgatgatttcttgacgcccagtggactcgccgaacctagggtggaggattttggaaatgcctggaagctacatggggattgccaagacttgcagaagcagcactcagatccttgtgccctgaaccctagaatgaccaggttttctgaggaagcttgcgcggtgttaacaagcccaacgttcgaagcgtgtcacagagccgtctcccctctgccctatctgcgcaattgtcgctatgatgtctgttcatgctccgacggccgcgaatgtctttgtggcgcgttggccagctatgccgccgcgtgcgcgggaagaggcgtccgcgtggcctggagagagccaggccgctgcgagctaaattgtccgaaaggccaggtgtatctgcagtgcggaacaccatgcaacctgacatgtcgtagtctgagctaccccgatgaggaatgcaacgaggcatgcctggaaggctgcttctgtcccccaggcctctatatggacgagcggggagactgcgtacccaaagcccaatgtccgtgttattacgacggagagatctttcagccagaggatatcttcagcgaccaccacacgatgtgctattgtgaggacgggtttatgcactgtactatgagcggggtcccaggatccctactacccgatgcagtgctgtcttctcccctctcgcaccgcagcaagcggtccctctcatgccgaccacctatggttaagctggtgtgcccagccgataaccttagggccgaaggacttgagtgcaccaagacctgtcaaaactatgatctggagtgtatgtcaatgggctgcgttagcggttgcctgtgcccaccgggcatggttcgccatgaaaataggtgcgtcgcactggagcggtgcccatgtttccaccagggaaaagagtacgctccaggggagacagtaaagatcgggtgtaatacatgcgtgtgtcaggatcgcaagtggaattgcactgaccacgtgtgcgacgccacatgctcgaccatcggcatggcccactacctgacgttcgacggccttaaatacctgtttcctggggaatgccagtacgtgctcgtacaagactattgtggctcaaaccctggcacctttcgaatcctcgtgggtaataaggggtgttcccacccttcagtcaagtgcaagaagcgtgttactatactggtggagggaggggaaattgagctgtttgatggagaagtaaacgtgaagcgaccgatgaaagatgagacacactttgaggtggttgagtccgggcgctatatcatactcctgctcggcaaagcgctgagcgtggtttgggataggcacctgtccattagtgtagttctaaagcagacttaccaggaaaaagtgtgcggtttgtgcggaaacttcgatggcattcagaacaacgatctcacgagctctaatctgcaagtggaagaggatccagttgacttcggcaattcttggaaggtttcgagtcagtgcgctgatacacgcaaagtgccactcgatagttcgccagccacctgccacaataacatcatgaagcaaactatggttgactccagttgcaggatcttgacttccgatgttttccaggattgtaacaagcttgtcgaccccgaaccgtacttggacgtatgcatctacgatacctgctcatgcgagtccatcggtgattgcgcctgcttctgcgatactattgcagcatatgctcacgtttgtgcccaacatggcaaggtggtgacttggcggactgccaccctgtgtccccaatcgtgcgaagagagaaacttgagagaaaacggctatgagtgtgaatggcgatacaatagctgcgcccccgcttgtcaggtgacatgccagcatccagagcctctagcttgtcctgttcagtgtgtggaggggtgtcacgcacactgtccccccgggaagatcctcgacgaactgctccagacgtgtgtagatccagaagattgtccagtgtgcgaagtagcgggccgacgtttcgcttccggcaagaaggtgactctgaacccctcagaccctgagcactgccagatttgccactgcgacgtagtcaacctcacatgcgaagcttgccaggagcccggcggcctggtggtgccaccaaccgacgccccggtgagccctacgaccctgtacgtcgaggacatttcggagcctccgcttcatgacttttactgttcccggctgttggacctcgtgttcttgctggacggatcctcacgactttcagaggccgagtttgaagtgctaaaagcctttgtggtggatatgatggaaagattgaggatatcacagaaatgggtacgcgtggcagtcgtggagtaccacgatgggagtcacgcctacattggtctcaaggatcgtaagcgcccatccgaactcagacgcatagctagtcaggtcaaatacgccgggagccaggtggcttcgaccagcgaggtacttaaatacaccctgtttcagatcttttctaagatcgatcggcccgaagcttccaggatcactctgcttctgatggcctcacaggaaccgcagcgcatgagtagaaactttgtaaggtacgtacagggtcttaaaaaaaagaaggttatagtcatcccagtggggattggtccccacgccaatttgaagcagatccggctgattgagaaacaagccccagaaaataaagcatttgtgttatcttcggttgatgagctggaacagcagcgggacgaaattgtaagttacctttgcgacctcgcaccagaggcgcccccgccaaccctaccacccgacatggctcaagtaacagttggcccggggcttctcggcgtgtctacactgggaccgaagagaaattccatggtgttggatgtcgcgtttgtgctggagggctctgataaaatcggcgaggccgatttcaaccggtcgaaggaatttatggaggaagtgattcagagaatggatgtgggccaggactccatccatgtcacagttcttcaatacagctacatggtgactgtggaatatcctttctctgaagcacagtcgaaaggggacatccttcaaagggtccgtgagattcggtaccagggcggcaatcggaccaataccggcctggccctgaggtatttatccgaccactctttcctggtgtcccagggagaccgcgagcaggctccaaacctggtctacatggtgactggtaacccagcatccgacgaaattaagcggttgccaggcgacattcaagtggtcccaattggggttgggcccaacgctaatgtgcaggaattggaaaggatcgggtggccgaatgccccaattctgatccaggatttcgaaaccttgccacgagaagcgcccgatctcgttttacagcggtgctgtagcggcgagggcctgcagattccaacgctttcacctgcccccgactgctcccagcccctggacgtaatactgctgcttgacgggtcatcgtcatttccagccagttattttgatgagatgaaatcgtttgccaaggccttcattagcaaagctaacataggtcctcgcctcactcaggtgtcagtgctgcagtacggttccatcaccacaatcgacgttccttggaacgtcgtccccgaaaaggcacatctcttgtcattggttgacgtcatgcaacgcgaaggcgggccctcacaaattggggacgcccttggcttcgcagtgagatatttgacttctgaaatgcacggcgcaagaccgggcgcaagcaaggctgtggtgatactcgttacagacgtatcagtggattcagtagacgccgccgctgatgccgcgcgttctaaccgtgtcaccgtgttcccaatcggcataggcgaccgctatgatgctgcccaattgaggatcctggccggacccgccggcgacagtaacgtcgttaagttacagcggatcgaggaccttcctacaatggtcacactaggaaactcgtttcttcataagctgtgctccggctttgtgaggatctgtatggacgaagatggtaacgaaaagcgcccgggggacgtttggacattgcccgaccaatgccacacggtgacctgccagcccgatggtcagaccctacttaagagccatagggtgaattgtgaccgcgggcttaggccttcttgtccaaattctcagtctcccgtgaaagtggaagaaacctgcggctgccgttggacttgtccatgtgtctgcacggggagttctacccggcacattgttaccttcgatgggcaaaactttaagctgacgggtagctgtagctatgtcctcttccagaacaaagagcaggatctcgaggtgatactgcataacggcgcatgttctccaggagcccgtcagggctgcatgaaaagtatagaggttaaacacagtgccctgagcgttgaactgcacagtgatatggaggtgaccgtaaatggccgactggtgtcggttccatatgttggcggtaacatggaagttaacgtgtacggggccattatgcacgaagtaagattcaatcacctgggtcatatctttacattcacacctcagaacaacgagtttcaactccagctgtcacccaagacgttcgccagcaaaacttatggcttgtgtgggatctgtgacgagaatggcgcaaacgactttatgctgagagacgggacagtaactactgactggaaaactctggtgcaggaatggacagttcaaaggccaggccagacgtgccaacctatactcgaagagcagtgtttggtgcctgactccagccactgtcaggtgctcttgctgcccctctttgcggagtgtcacaaggttctggcgccagccacattctatgcgatatgtcaacaggatagttgccatcaggaacaggtgtgtgaagtaatagctagctacgctcacttgtgccgaacaaatggtgtgtgtgtggactggcgcactcctgatttttgcgccatgagctgcccacctagcctcgtctataaccattgtgaacacggctgccccaggcattgcgacggcaacgtatcctcatgcggtgaccatccatccgaagggtgtttttgcccccccgacaaggtcatgctggagggaagctgtgtgcctgaagaggcttgcacccagtgtatcggcgaggatggagttcagcatcagttcttagaagcttgggtgccagaccaccagccttgccaaatttgcacatgcctgagcggcagaaaagtcaactgtaccacacagccttgtcctactgctaaagcacctacatgcggactctgtgaagttgcccggctcaggcagaacgcggatcagtgctgtcctgaatatgagtgtgtctgcgatcccgtgtcctgcgatcttccaccggtgccacactgtgagaggggactgcaacccacactgacaaatcccggagagtgccggccaaacttcacgtgcgcatgtcggaaagaagaatgcaagcgagtaagtcccccgtcttgccccccacaccggctccccactctccggaaaactcagtgctgcgacgagtatgaatgcgcgtgcaactgcgtgaacagcacggtctcttgccctctgggctatcttgccagtaccgctacaaacgactgtggctgtaccaccacaacatgcctgccggacaaggtgtgcgtgcacaggagcaccatctaccccgtggggcagttctgggaagaaggttgcgatgtctgcacttgtacggatatggaggatgccgtcatggggcttagggttgcccaatgtagccagaagccctgcgaggacagctgccgatctggttttacttatgtgctccacgagggtgaatgctgcggaagatgcctacccagtgcctgcgaggttgtgaccggctctcctcgaggagactcacagtcttcctggaaatccgtcggaagccaatgggcgtcccccgaaaacccatgtctgataaatgaatgcgtgcgagtgaaggaggaagtgtttattcagcaaagaaatgtttcttgtccccagctggaggtgccagtgtgcccctctggattccaattgtcatgcaagacgtcagcttgctgtccttcgtgccgctgcgaaaggatggaggcctgcatgttgaacggaacggtcatcggccctgggaagacagttatgattgatgtgtgcactacctgcaggtgtatggttcaggtgggtgttattagcggatttaagttggagtgtagaaagacaacatgcaacccatgcccactggggtacaaagaagaaaataacacgggagagtgctgtggaagatgtctccctactgcttgcactatacagttgcgggggggacagatcatgacgctcaagagagatgaaacccttcaggatgggtgtgacactcacttttgcaaggtgaatgaacgcggggaatacttttgggagaagcgcgttactggttgccccccgtttgatgagcacaagtgcctggccgagggcggaaaaataatgaagatacccggaacgtgctgcgatacttgcgaagaacctgagtgcaatgacataacagcccgccttcagtatgtcaaagtgggctcatgtaaatccgaggttgaggtcgatattcactattgtcaagggaagtgtgcatcgaaagctatgtactccattgatatcaatgacgtgcaggaccagtgttcttgctgttcaccaactcgcacagagcctatgcaagtggctctccactgcaccaacggatctgtggtgtatcacgaagtgctgaatgccatggagtgtaagtgtagccctaggaagtgctcaaag

SEQ ID NO: 12551 - DNA, 8439 bp, Artificial Sequence
  derived and/or modified sequence
atgattccagctcgatttgcgggagttcttttggctcttgctcttattctaccgggcaccttgtgcgcagagggaactcgaggtcgtagttcaactgcgagatgttccttgttcggttccgatttcgtcaacacgttcgatggatcaatgtacagttttgctggatactgttcatacctccttgcaggcggctgccaaaaacgatcgttcagcattatcggagactttcaaaatggaaagcgagtttccctcagtgtatatttaggtgagttctttgacattcatcttttcgtaaatggcactgttacacaaggtgaccagcgtgtatcaatgccctatgcttcaaaaggactttatcttgaaactgaagcaggatactataaactctctggagaggcatatggcttcgtcgcgcgtattgatgggtcgggtaactttcaagttcttctttctgatcgttattttaacaagacgtgcggactttgcggaaacttcaatattttcgcagaagatgattttatgacccaagaaggtacactgacatctgatccgtatgacttcgccaacagctgggcattatcctctggagagcaatggtgtgagagagcatcgcctccgtcgtcaagttgcaacataagttcaggagaaatgcaaaaaggcctgtgggaacaatgccagttgctgaagtccacaagtgtttttgcacgttgtcatccacttgtggatccagaaccgttcgtagctttgtgtgagaaaactctttgcgaatgtgctggtggactggaatgcgcatgcccagcactccttgagtatgcacgtacttgtgcacaagaaggtatggtcctgtatggatggacagatcatagtgcttgtagcccagtgtgtccagccggaatggagtaccgacagtgcgtttcgccttgcgcacgtacgtgtcagtctctccatattaatgaaatgtgccaggaacgatgtgttgatggctgctcctgcccagagggtcaattacttgacgaaggactttgtgtcgagtcaacagaatgtccatgtgtgcattcgggtaagcggtatccaccgggaacctcactttccagagattgcaacacctgtatctgccgtaactcgcaatggatatgtagtaatgaagaatgcccgggagaatgcttggtgacaggccaatctcatttcaaatccttcgataaccgatattttacattttcgggaatctgtcaatacctgttggcgcgagattgccaagatcactcattctccattgtgatcgaaacagttcaatgcgccgatgatagagatgctgtttgtacgagatcagttacagtccgtttacccggccttcataacagccttgtcaagttgaagcacggagctggagtggctatggatggacaagatgtacaattgccacttctcaaaggtgatcttcgtattcaacataccgttactgcatctgttcggctttcatacggagaagatcttcaaatggactgggatgggaggggtcgtcttctggtcaaattgagccctgtttacgcaggaaagacctgcggactttgcggaaattataatggtaaccaaggggacgatttccttactccgtctggtttggcggagccacgagtagaagatttcggaaatgcatggaaattgcacggcgattgtcaagaccttcaaaagcaacattccgacccgtgtgctttgaatccgagaatgactcgattttcagaggaagcatgcgctgtcctgacatctccaacattcgaggcctgccatcgtgcagtctcgccacttccatacttgagaaattgcaggtatgatgtttgctcatgttccgatggtcgtgaatgcctttgcggtgccttggctagttacgcagctgcttgtgcgggaagaggggtgagagttgcttggcgtgaaccaggccgttgtgaacttaattgcccaaaaggtcaggtgtatctgcaatgtggtactccatgcaatttaacttgtcgttccttgtcgtatccggatgaagaatgcaatgaggcttgcttggaaggttgcttctgcccgcctggactttatatggacgagagaggcgattgtgttcccaaggcacaatgtccatgttactacgatggagaaatcttccaaccagaagatattttttcagatcatcatactatgtgttactgcgaggatggtttcatgcattgtactatgtccggagtaccaggatcactgctaccagacgctgtgctttccagtccattgtctcatcgttcaaagcggagcctttcttgcaggccaccaatggtgaagctcgtgtgcccagccgataatctccgcgctgaaggactagagtgcaccaaaacatgtcaaaattacgatttggagtgcatgtccatgggctgtgtgtctggatgcttgtgtccaccaggaatggttcggcatgaaaatcgttgtgttgcccttgaacggtgcccgtgctttcatcagggtaaagagtatgcaccaggtgagaccgttaagattggatgcaatacttgtgtttgtcaagatagaaaatggaactgtaccgatcacgtttgcgatgctacttgctccactatcggtatggcacattatctgactttcgatggacttaaatacttattcccaggagaatgtcagtatgtcctggtgcaggattactgcggctctaatccgggaaccttcagaattcttgttggaaacaagggatgctcccatccaagcgtcaaatgcaaaaaaagagtaacaattttggtggaaggaggagagatcgaactttttgacggcgaggttaatgtgaagagacctatgaaagatgagactcatttcgaggttgtggaatccggtcgatatatcatactcctcttaggtaaagccctttctgtggtgtgggatcgacacttatcaatttccgtagtactcaagcagacttatcaggaaaaagtctgcggtctttgtgggaatttcgacggaatacagaacaacgatcttacgagttctaacctccaagtggaagaagatcctgtggacttcggcaattcatggaaagtgtcgtctcaatgcgcggatacccgcaaagtgccgttggattcatcaccagctacgtgccacaataacattatgaagcaaactatggttgattcatcgtgtagaattctgacttctgatgtatttcaggattgtaacaaactcgtagatccagaaccttacttagatgtatgcatttacgacacttgctcatgcgagagtatcggagattgtgcatgtttctgtgacacaattgccgcttatgcccatgtatgtgctcaacatggaaaagtagtaacctggagaacagcaactctctgtccacaatcatgcgaggaacgtaatctcagagaaaatggttacgagtgtgagtggcgttacaacagttgtgcaccagcatgccaagtcacgtgtcaacacccggagccattggcatgcccagttcaatgcgtggaaggatgtcacgcacattgccccccgggaaaaatccttgatgaacttctacaaacgtgtgtggatcccgaggattgtcctgtctgtgaggtggctggtagaagattcgcatcgggaaagaaggttactctgaacccgtctgatccagagcattgccaaatttgccactgtgatgtggttaatcttacatgtgaggcatgccaagaaccgggaggattagttgttccgccaactgatgccccagtgtcaccaactactctttatgtagaagacattagtgagccaccccttcatgatttctattgtagtcgattactcgatttggtttttttactggacggttcatcgcgtctatcagaagcggagttcgaagttttgaaagccttcgtagtagatatgatggaaaggttacgtatttctcagaaatgggtgagggtcgcagttgtggagtatcacgatggtagccatgcttacatcggattgaaagacagaaaacgtccctcggaacttcgacgtattgcctcacaagttaagtatgcgggatcacaagtggcgtctacgtcagaagtacttaagtatactctttttcaaattttttctaaaatcgaccgcccagaagcgtctagaattaccttgcttctgatggcatcacaggaaccacagaggatgtctcgaaactttgtacgatatgttcaaggactgaagaaaaaaaaggtaattgtcattccggttggaatcgggccacacgcaaacttaaaacaaattcgcctgattgaaaaacaagcaccggaaaataaggcctttgttctgtcgtctgtggatgaattagagcagcaacgagatgagattgtttcctacttatgcgatcttgctccagaagctcccccgccaacactgccaccagatatggctcaagtgacggttggaccaggcctcttgggtgtttcaactcttggtcctaagcgtaactcaatggttcttgatgtggcattcgtgttagaggggtcagataaaatcggtgaagcagactttaataggtcgaaggagtttatggaagaggtgatacaacggatggacgtcgggcaagattccattcatgtaacagtcctccagtatagctatatggttacagtcgaatatccattttcggaagcacaatccaaaggagatattctccaacgtgtcagagagataagatatcaaggaggaaatcggacgaacactggattggctttgcgatacttatctgatcattcttttctggtgtctcaaggagatcgcgaacaagctcctaacttagtatacatggttacaggaaatccagcttctgatgaaattaaaaggcttccgggagatattcaagtggtaccgataggggttggaccaaatgcaaatgtacaagaacttgagcgtatcggttggccgaatgccccaattctaattcaggatttcgagaccctacccagggaggctccagaccttgttctacaaagatgctgctctggagaaggacttcaaattcctactctcagtccagctccggattgttctcaacctttggatgtcatcttgctattggatgggagctcttcatttccagcatcatattttgacgaaatgaaatcatttgcaaaagcattcattagtaaggctaatattggacctagacttactcaagtgagtgtgctgcagtatggatcgatcacaacaatcgatgtgccatggaatgtcgttccggaaaaggcacatcttctctctctggtagatgtgatgcagcgcgagggcggaccttctcaaattggagatgccttgggcttcgcagtccgatatttgacatcagaaatgcatggggcacgaccaggagcttcaaaagccgttgtgattctggtgactgatgtgagtgttgactccgtagatgctgctgcagatgctgccagaagtaatcgtgtgactgtttttccaattggaattggagacagatacgatgctgctcaactccgtatcctcgcaggacctgcgggggactccaacgtggtcaagttgcagcggattgaggatctaccaacgatggttacgttaggtaactcattccttcacaagttatgctccggatttgttcgtatctgtatggacgaggatggaaacgaaaaacgtccaggagatgtatggactcttccagatcagtgccataccgtaacttgtcagccagatgggcagactctgcttaaatcacatcgagttaattgcgacagaggattgagaccgtcctgcccaaattcgcaatctccagtgaaagtggaggaaacttgcggatgccgttggacatgcccatgcgtgtgtactggaagctcgacacgtcatatcgttacattcgacggacaaaatttcaaattgactggatcgtgctcatatgtgctttttcagaataaagaacaagatctagaagttatattgcacaacggagcttgttccccaggagctcgacagggttgtatgaaatcaattgaagttaaacactcagctctttccgtagaactccattccgatatggaagtgacagttaatggacgactggtgtcagtgccatacgtgggaggaaacatggaggttaacgtatacggagcaattatgcatgaagtaagatttaatcatttaggacacatcttcacgttcacaccacaaaacaacgagttccagctacaattgtctccgaagacgttcgctagtaagacttatggactttgtggaatatgcgatgaaaatggagcaaatgatttcatgttgcgtgacggtactgttaccacagactggaaaacactcgtgcaggaatggacggtacaacgtccaggacaaacatgtcagcctattcttgaagagcagtgtctagtgccagactcgtcacattgtcaagtgcttttgttgcccctttttgctgaatgccataaagtgctggctccggcaacattctatgccatttgccaacaagatagttgtcatcaggaacaggtctgcgaggtgattgcttcttatgcccatttgtgccgaacaaatggtgtatgtgtcgattggcgcactcccgacttttgtgctatgagctgtcccccatctctcgtttataatcattgtgaacacggatgcccgcgtcactgcgatggaaacgtgtcgagttgtggtgatcacccatcggaaggatgtttttgtcctccagataaggtgatgctggaaggatcgtgcgtccctgaagaggcctgtacacaatgcatcggcgaggatggagtccaacaccaatttctagaggcttgggtacctgatcaccaaccatgtcaaatctgcacctgtctttccgggagaaaggtgaattgcacgacccaaccatgtcctactgctaaagcaccaacttgtggtctgtgcgaagttgcgcgtctacgacaaaacgcagaccaatgctgcccagagtatgaatgcgtgtgcgacccagtttcatgcgatctcccgccagtaccccattgtgaaaggggtctacaacccacactgacaaacccaggagaatgcaggcctaacttcacgtgtgcttgccgtaaagaagagtgtaagagagtttccccgcctagttgcccaccccatcgcttaccaactctgcgcaaaacacaatgttgtgatgaatatgaatgtgcgtgcaattgtgtgaattctactgtgtcttgcccattaggttatcttgcttctactgctacaaatgattgtggttgcacaacaaccacctgcttgcccgataaagtttgtgtccataggtcaactatttatccagtaggtcaattctgggaggaaggatgtgacgtctgtacttgcactgacatggaggatgctgttatgggcctccgtgtggctcaatgttctcaaaaaccgtgtgaagattcgtgccgcagtggtttcacgtatgtattgcatgagggagaatgttgtggccgatgtttgccgtcagcctgcgaagtggttacaggatctccacgaggagattctcaaagctcgtggaaatcagttggatcccaatgggcatcgccagaaaatccttgtttaattaatgaatgtgtccgagttaaagaggaggtttttattcagcaaagaaacgtctcctgcccacaattagaagtgcctgtgtgtccatcgggctttcagctctcttgtaaaacttcagcatgctgcccatcatgtagatgtgagcgtatggaagcgtgcatgctcaacggtacagttatcggccctggaaaaacggttatgattgatgtttgcactacatgccgttgtatggtccaagtgggagtgatttcgggatttaagcttgaatgtcgtaaaaccacgtgtaacccatgcccactcggatacaaagaagaaaataacacaggcgaatgctgtggcaggtgcttgccaactgcttgtacgatacaacttagaggcgggcaaattatgaccttgaaacgagacgaaacacttcaagacggttgcgatactcatttctgcaaggtcaatgaaaggggagaatatttttgggagaagcgcgttacgggttgcccgccttttgacgagcataagtgtctagctgaaggaggaaaaatcatgaagatcccaggaacctgttgtgatacatgtgaggagccagaatgcaatgatattacggctagattgcaatacgtgaaagttggttcttgtaaatcagaagtagaggtcgacatccactactgtcaaggaaagtgcgcttccaaagcgatgtacagcattgatatcaatgatgtgcaggatcaatgctcttgctgttccccaacgagaactgaacctatgcaagttgctcttcattgtacaaacggctcagtggtgtatcacgaagtgcttaacgcgatggagtgtaaatgttcaccacgcaagtgctcgaaa

SEQ ID NO: 12552 - DNA, 8439 bp, Artificial Sequence
  derived and/or modified sequence
atgattccagcccgattcgccggggtgcttctcgcactggctctaatcctcccgggtacattatgtgcagaggggacgcggggtagaagcagcactgcccggtgttcattgtttggctccgatttcgtgaacacattcgatggctctatgtactcattcgctgggtattgcagctacctgctcgcgggtggatgccagaagagaagcttttccattatcggcgacttccagaacgggaagagagtttctttatccgtgtatctaggagagttcttcgatattcatctgtttgttaatggtacagttacacaaggcgaccagcgagtttcaatgccttacgcatctaagggcctgtacttagagaccgaggctggatactacaaattgtccggagaggcatacgggttcgtcgcgcggatcgacggcagcggaaatttccaagtgctgctgtccgatcggtacttcaataaaacttgtggcctctgtggaaattttaacatcttcgctgaggatgattttatgacgcaggaaggtactctgacctccgatccctacgactttgcaaacagctgggccctaagcagtggagagcagtggtgcgagagggcgagcccaccatctagctcgtgtaatatttcttctggcgagatgcagaagggcttgtgggaacagtgccagctgctgaagagcacatcggtgtttgccaggtgccacccgctagttgacccagaacctttcgtggccctctgtgagaagacactgtgtgagtgtgcggggggcctcgagtgcgcttgtcccgctcttctggaatatgctagaacctgcgcccaagaagggatggtcttgtatgggtggacagaccattccgcatgcagccctgtgtgcccagctggaatggagtaccgccaatgcgtaagcccttgcgcccgcacatgccagtctctgcacataaacgagatgtgtcaagaacgttgcgtcgacggctgctcatgtccagaaggccagctactggacgaggggctctgcgtcgagagtacagaatgcccttgcgtgcactctggcaaaaggtatcctcctggaacctcactgagtcgtgactgtaatacttgcatctgtagaaacagtcagtggatctgctctaacgaagagtgtcctggggagtgccttgtaaccgggcaaagtcacttcaaatctttcgacaaccggtacttcactttctctggaatctgtcagtaccttctcgcacgtgattgccaggaccactccttcagcatcgtaatcgagacagttcagtgcgctgatgaccgtgatgcagtttgcacccgttcagtcaccgtgaggctccccggattgcataacagtctcgtgaaactgaagcacggcgctggggtggccatggacggtcaggatgtgcagctccctcttcttaagggtgatttgaggattcagcacaccgtcaccgccagcgtaaggctgagttacggggaagacctgcagatggactgggacggacgaggccgacttctggtcaaattaagtcccgtgtatgcagggaaaacctgtgggctgtgtggcaattacaacggaaaccagggagacgattttctgacacctagtggacttgcggaaccacgtgtggaggattttggaaatgcttggaaactgcacggcgattgtcaggatttgcagaagcagcactcagacccttgcgctctaaaccctagaatgacccgcttttcggaggaggcctgcgctgtcctcacttctcctacttttgaagcttgccacagggctgtgtccccgttgccgtacctgcgtaattgtcggtacgatgtgtgttcctgcagcgatggcagggagtgcctatgcggagcactggcaagttatgccgcagcttgcgcgggaagaggggtgcgagtggcttggcgcgagcccggccgctgtgagctaaattgtccaaaggggcaggtgtacctgcagtgtggaactccgtgtaacctaacctgtaggtccctgtcttacccggatgaggagtgtaatgaggcctgccttgagggctgcttttgccccccaggcctgtatatggacgagcgcggggattgcgtcccaaaagcgcagtgtccatgttattacgatggggaaatatttcagcccgaggatatcttttctgaccatcatacaatgtgttattgtgaggacggtttcatgcactgtaccatgtcgggggtgcccggaagcctattaccggatgcggttctctcctcacccctgtcccaccggtccaagagaagcctgtcctgtcggcctccaatggtcaagttagtgtgtcccgcagacaacctgagggctgagggattggaatgcactaagacttgccagaattacgatctggagtgtatgtctatggggtgtgtcagcgggtgcttgtgtccacccggaatggtacggcacgaaaatagatgtgtggcgttagagcgctgtccatgtttccatcagggaaaggagtatgccccaggcgaaactgttaagattggctgtaacacttgcgtgtgccaggaccggaaatggaactgtactgaccacgtgtgtgacgcaacgtgtagcacaattggaatggcccactatctgactttcgatggcttgaaatatctgttcccaggtgaatgccagtatgtgttggtccaagattactgcggctccaatcctgggacatttcggatcctcgtcgggaataagggatgttcacatccctcagtcaaatgcaaaaaacgcgtaacgatcctggttgagggaggcgaaatagaactctttgatggcgaggtgaatgtgaagcgaccaatgaaggatgaaacgcattttgaagtggtggaaagcggacgctatatcattctgctccttgggaaagctctgtcagttgtttgggatagacacctcagcatcagcgtggtgctgaagcagacgtaccaagagaaagtgtgcgggctttgtggcaacttcgatggcatccagaataatgatctaacctcgagtaatctgcaggtggaggaggacccagtggacttcggcaactcatggaaagtgtctagtcagtgtgcagacacaaggaaagtgccactggacagctctccggccacctgtcataataacattatgaagcagacaatggtggactcatcctgtcgaattttgacttcagatgtgttccaagactgtaataaacttgtggatcctgaaccatatctggacgtgtgtatatacgacacttgcagttgcgagtcgatcggtgattgtgcctgcttttgtgatacaatcgctgcctacgcccacgtctgtgcccagcacgggaaagtcgttacttggcggactgccaccttgtgtcctcagtcttgcgaagagagaaacctgcgagaaaatggttatgagtgcgaatggcgctacaacagctgcgcccccgcttgccaggtgacatgccagcacccggagcctctggcgtgtcccgttcaatgtgtagaaggatgtcatgcgcactgcccacccggaaagatattggatgaattactccaaacctgcgtggatcccgaagattgccccgtgtgcgaggtagccggcaggaggttcgcgtccggcaaaaaggtaaccctgaacccttctgacccagagcactgtcaaatttgtcactgtgatgtggtgaatttgacctgcgaagcatgtcaggagcctggtgggctcgtggtccccccaaccgacgccccagtgtctccaacaacactatatgttgaggacatctccgaacccccattgcacgacttctactgcagccggctgctggacctggtgttccttttagacggatcttcacgactctccgaagccgaattcgaagtgctcaaagcatttgtcgtagacatgatggagcgtctgcgtatcagtcaaaagtgggtcagagtggccgttgtggagtatcacgatgggagccacgcatacatcggtttgaaggaccggaagaggccctccgaactgcgccggatcgctagccaggtgaaatacgccggcagccaggttgcgtccactagtgaggtccttaagtataccctgtttcaaatttttagcaagattgatcgtcccgaagcctcccgaataacactcctgctgatggcctctcaagagccccagcgcatgagccgaaatttcgtgcgctatgtccaaggcctgaaaaagaagaaggtgatagttattcctgtaggcattggcccgcatgcaaatttgaaacagatcaggttgattgagaagcaggcgcccgaaaataaggcttttgttctgtcgtctgtggatgagcttgagcagcagagagatgagatagtgtcgtacttgtgtgacctcgctcccgaggctcctccacctaccctacctcctgatatggctcaggtgaccgtgggtcccggactgcttggagtctcaactctggggccgaaacgcaactccatggtgttagacgttgccttcgtcttagaaggaagcgataaaatcggcgaggctgattttaacaggtcaaaggagttcatggaggaagtgattcagcggatggacgttggccaggactctattcatgtgacagtactacaatactcctacatggttaccgtggaatatccgttttcagaggcgcagtcaaaaggagacatccttcagcgtgtacgcgaaattcgctaccagggtggtaataggactaacaccggtttagctctaagatacctctctgatcattctttcctggtgtctcagggtgaccgagaacaggcgccaaatcttgtttacatggtcaccgggaaccctgcttcagacgagatcaaaaggttgcctggcgatatacaggtcgtgccaataggagtaggacccaacgccaatgttcaggagctggagcgcattggatggcccaatgccccaatcctgatccaggactttgagacactgcctcgggaggcacccgacctcgtactgcagcggtgttgctcaggcgagggcctccagattccaacactttcccccgccccggattgctctcagcctctggatgttatcctacttctcgacgggagctccagcttccctgcgtcttatttcgacgagatgaaatcattcgccaaagctttcattagcaaggcgaacatcggaccccgactgactcaggtctccgtattacagtacggaagcattactactatcgacgtgccatggaacgtcgtgcctgagaaggcacatctgctgtcacttgtggatgtgatgcaacgcgagggcgggccttcacagatcggcgatgctctcggctttgctgttaggtacttgacctcagaaatgcacggcgcccgaccaggcgcaagtaaagccgtggttatcttggtcacagacgtttctgtggacagcgttgatgctgcagcggatgctgctcggtctaacagggtgaccgtgtttccaattggcatcggtgaccggtacgatgccgctcagctgcggatactagcagggcccgctggggacagcaacgtggtgaagctccagcgtatagaagatttgccaacaatggttactctgggaaactccttccttcacaaactgtgtagcggctttgtcaggatttgtatggatgaagatggcaatgagaagcgtcccggcgacgtgtggacactgcctgaccagtgtcatactgttacgtgccagccagacggccagactttattgaagtcccaccgggtgaattgcgaccggggtctgaggccctcctgccccaactcccagtcacccgtcaaggtggaagaaacgtgtggatgtcgatggacttgcccctgtgtatgtaccggctcctcgaccaggcacattgttacatttgacgggcaaaactttaaactgactggaagctgctcctatgttctcttccagaataaagaacaggacctcgaggttattctgcacaacggggcctgttctcccggagcaaggcagggctgtatgaaatctatcgaggtcaagcattctgccctaagtgtagaactgcactcagacatggaagtgacggtgaacgggcggcttgttagtgttccctatgtaggtggcaatatggaagtcaatgtctatggggccataatgcatgaagtcagatttaaccaccttggtcacatatttacttttacgccccagaataacgagtttcagcttcagttgagcccaaaaacctttgcgagcaagacctacgggctgtgcgggatctgtgacgagaacggagctaatgatttcatgctgcgcgacgggacggttacaaccgattggaaaacactggtgcaggaatggaccgtgcagaggcccggacagacgtgccagcctatactggaggagcagtgtctcgtccccgacagcagccattgccaagttctcctcctacccctgtttgccgaatgtcataaggtcctggctccagccacgttttatgcaatctgtcagcaagattcctgtcatcaggagcaggtctgcgaagtgatcgcatcttatgcccatttgtgccggactaatggcgtttgtgtggactggcgcactcccgacttctgtgccatgagctgccctccatcattggtgtataaccactgtgagcatggttgtcctcgacactgtgacggcaatgtcagcagctgcggcgatcacccctctgaaggttgcttttgcccaccagataaggtgatgctggaaggaagttgcgtgccagaggaggcctgtacccaatgcataggggaagacggggtgcagcatcagtttttggaggcttgggtccccgatcatcagccttgtcagatttgcacgtgtctgtctggccggaaggtcaattgcacaacccaaccttgtcctaccgccaaggccccgacatgcggcctttgcgaagtggcacgcttgcgccagaatgccgaccagtgttgcccagagtacgaatgtgtgtgcgaccctgtttcctgcgacctccctccggtaccccattgcgaacggggactgcagcccactttaactaacccaggagaatgccggcccaactttacatgcgcctgtaggaaagaggaatgtaagcgcgtctcccctcccagctgtccaccacacaggctgcccaccctgcgaaagacccagtgttgtgacgaatacgagtgcgcttgtaactgcgtgaacagtacagtgtcatgccccctgggatatcttgcctctaccgccactaatgattgtggatgtactactacgacatgcctgcccgacaaggtctgcgttcataggagcaccatctatcccgtcggccagttttgggaagagggatgcgacgtttgcacctgtacagacatggaggacgctgtgatgggtctcagggtggcgcaatgtagtcaaaagccctgtgaagatagttgcaggagtggctttacatacgtgcttcacgaaggcgagtgctgtggcaggtgtttgccgtctgcctgcgaagtcgtcacaggctcaccccggggagacagccagtctagctggaaatctgtcggaagtcagtgggcctcacccgagaatccatgcctcatcaatgagtgcgtaagagtcaaggaggaagtgttcattcagcagaggaatgtgtcatgccctcagttagaggtgcctgtttgcccttccgggttccagctatcctgcaagacatctgcgtgttgtccgtcctgtcgctgcgagcggatggaagcttgtatgcttaatgggaccgtgattggtcccggaaagacagttatgattgacgtgtgcacgacatgccgctgtatggtgcaagtaggggtgattagcggattcaaattagagtgtcggaagaccacatgtaacccttgcccactcggatacaaggaagaaaacaacaccggggagtgctgcggacggtgtctgccaaccgcgtgtaccatacaactccggggcgggcaaattatgaccctgaagcgcgatgagaccttgcaggatggttgcgacacccacttttgtaaggtgaacgaaaggggtgagtacttttgggagaaaagggtgacaggatgtcctccatttgacgaacacaagtgtctagccgaggggggcaaaatcatgaaaatacccggtacctgctgcgacacttgcgaggaaccagaatgcaacgatataacagccaggttgcaatacgtgaaggtaggatcctgtaagtctgaggtggaggtcgacatccattattgtcagggtaagtgtgcctccaaagcaatgtattctatagatattaacgatgtgcaagatcagtgttcctgttgctcaccaaccaggacagaacctatgcaggtggccctgcattgcacaaacggaagcgtcgtgtatcacgaggttctcaacgctatggagtgcaagtgttctcctcgcaagtgttccaag

SEQ ID NO: 12553 - DNA, 8439 bp, Artificial Sequence
  derived and/or modified sequence
atgattcctgcaaggtttgcaggagtgctcctggcgcttgccctcattctcccaggcacattatgtgcagaaggtacacgcggacgttcttcaacagcacgctgttctcttttcggatcagattttgtgaatactttcgacggcagcatgtatagtttcgctgggtactgctcttacctgctggctgggggttgtcagaaaagatccttctccatcataggggacttccaaaatggtaagagggtttccctatctgtgtacctcggagagttcttcgatatccatctctttgttaacggaaccgtgacccaaggcgaccagcgtgtatccatgccctacgccagcaagggtctataccttgaaaccgaggcagggtactataaactgagcggggaggcgtacggcttcgttgccaggatcgatggttctggcaatttccaggtgctcctgtctgaccgctacttcaataagacgtgcggtctctgtgggaattttaatattttcgctgaggacgattttatgactcaggagggtacattgacctctgatccctacgactttgcgaactcctgggctttatcttctggagaacagtggtgtgagagagcatcgcccccatctagctcatgtaacatcagctcaggggagatgcagaaaggattgtgggagcagtgccagcttctgaagtcaacctcagtgttcgccagatgtcaccccctggtcgacccagagccttttgtggccctgtgtgaaaagacactgtgtgaatgcgctggcggactcgagtgtgcctgtcccgcgctgctcgagtacgcacgaacctgtgctcaggaaggaatggtcctatatgggtggacagatcattccgcttgttctcccgtgtgtccagctgggatggaataccggcagtgtgtaagcccgtgtgccaggacatgtcagagtctccacatcaacgaaatgtgccaggagcggtgcgttgatggatgtagctgtccggagggtcagctgctggacgaaggtctgtgtgtcgaatccacggagtgcccgtgtgtgcattccgggaagcgatatcctcccggtacgtcactgtcccgggattgtaacacctgcatatgccgcaattcccagtggatttgtagcaacgaagaatgtccaggagagtgtttggtcacaggtcagagccatttcaaaagcttcgataaccgatacttcaccttttccggaatatgccagtacctccttgcgagggactgccaagaccatagtttttccattgtgatcgaaaccgttcagtgcgccgacgaccgggacgccgtttgcacacggtccgttactgtcaggctgcctgggctgcacaacagtctagtcaagctcaagcacggcgccggggtggccatggacggtcaagatgtgcagctgccactcctcaagggtgacctccgaatccaacatacggtgactgcttccgtacggctgagctacggtgaagacctgcagatggactgggatgggcgcggacgcctgctggtcaaactgtccccagtgtacgccgggaagacttgcggcctttgcgggaactataacggcaatcagggggatgattttctgactccaagtggtctggcggaaccacgggtggaagactttggaaacgcgtggaaattgcacggcgattgccaggatctacaaaaacagcacagtgacccttgcgccttgaatccccgcatgactcggtttagtgaggaagcatgtgcagttctgaccagtccaactttcgaggcctgccacagagcggtgtctcctttgccctacctcagaaattgccggtatgacgtctgcagttgctcggatggaagagagtgcctgtgcggcgcgcttgcaagttacgcagctgcttgtgctggaagaggtgtgagagtggcctggcgagaacccgggaggtgtgaattaaactgtcctaaaggacaggtgtacctccagtgtggtactccttgcaacctgacttgtcgctccctcagttacccggacgaggagtgcaacgaggcctgcttggagggttgcttttgcccacccggactgtacatggacgagcgcggagactgcgtgcccaaggcgcagtgtccctgctactacgacggggagatctttcagcccgaagacattttcagtgaccatcatacgatgtgttactgcgaagatggctttatgcattgcactatgagtggagttccggggagtctgttaccggatgctgtgttgtcatctccattgtcccaccgctcaaagcggtctctcagttgcagacctcccatggtgaagctggtctgtcctgctgataaccttcgcgcggagggtcttgagtgcaccaaaacttgccagaattatgatcttgagtgcatgagcatgggatgtgtgtctgggtgtttgtgcccgccgggcatggtacggcacgaaaaccgctgcgtcgcattggaaaggtgcccatgcttccatcaggggaaggagtatgcacctggggaaacggttaaaatcggctgcaacacctgcgtgtgtcaggacaggaaatggaactgcaccgatcacgtttgtgatgctacgtgttcaaccatcggcatggcccactatcttacctttgacgggctgaaatatctcttccccggagagtgtcagtacgtcctggtccaggactactgtggaagtaacccaggcacgtttcggattctagtgggcaataaaggctgctcacacccctcagtgaaatgcaagaagcgtgtgaccattctggtggagggaggagaaatcgagttgtttgatggggaggttaatgttaagcggcctatgaaggatgagacacatttcgaagtggtggagtccggacgctacattatcctgcttctgggtaaagcccttagcgtcgtgtgggaccggcacctatctatatcggtggtgcttaagcagacgtatcaggagaaggtgtgcggtctttgcggaaactttgatggtatacaaaacaacgacttaacgtccagcaacttgcaggtcgaggaagatcctgtcgacttcggaaattcttggaaagtgagctctcagtgtgcagacacaaggaaagtacccctggactcttcacctgctacctgtcataataatataatgaaacagacgatggtcgattcctcctgcaggatactcactagtgacgtctttcaagactgcaacaaactcgtcgaccctgaaccctacctggatgtgtgtatctatgatacatgctcctgtgaaagtattggcgactgcgcttgcttttgtgatacaatagctgcgtacgcgcacgtgtgtgctcagcacggaaaggtcgttacctggcgtaccgcaacactgtgtcctcagtcatgtgaagaaagaaaccttcgcgagaatggctatgagtgtgaatggagatataattcttgtgcccccgcatgccaggtgacttgccagcatccagagccgctggcttgtcccgtgcagtgcgtggaggggtgtcacgcacattgcccgcctgggaaaatcctcgacgagctactccagacatgcgttgatccagaagattgtcccgtttgcgaggtggctgggagacgattcgcatcaggaaagaaggtgacgctcaatccttcagatcctgagcactgccagatctgtcactgtgacgtagtaaatctgacatgtgaagcatgtcaggagccgggtggcctcgtggttcccccaactgacgcccccgtgagtcctaccaccctgtacgttgaggatatatcggagcccccactacacgatttctactgcagccgcctgctggacctcgtttttttgctggacggaagctcccgcctcagtgaagcagaattcgaagtgctcaaagcctttgtggttgacatgatggaaagactgagaatttcccagaagtgggtccgggtggctgttgtcgaataccacgatgggagccacgcatacatcggcctcaaagataggaagaggccgagtgagctgcgacgaatagcctctcaagtgaaatatgcaggcagtcaggtggcttctacatcagaggtgctaaagtacaccttatttcagatcttctctaaaatcgacaggcctgaagcttcccgcattaccttactattgatggcatcacaggagccccagagaatgtccaggaacttcgttagatacgttcaggggctcaaaaaaaagaaggtaatcgtcatccctgtgggcatcgggccacacgctaacctgaaacagatccgccttatcgagaaacaggcgcctgagaataaggcttttgtgctctcatctgtggatgagttagaacagcagagggatgaaatcgtatcttatctgtgcgatttggcacctgaagcaccccctcccacactgccgcccgatatggcacaagtgaccgttggacccggactgctcggagtttccactctgggcccgaaaagaaactcgatggttttagacgtagcatttgtgctcgagggctcagacaaaattggtgaggccgacttcaacaggtctaaggagttcatggaggaagttatccagcgaatggatgtcggacaggattctatccatgtaactgtactgcaatacagctacatggtaaccgtggaatatccattctcagaggcccagagcaaaggcgacattcttcagagggtgcgagagatccgataccaaggcgggaatagaaccaataccggcctcgctcttcggtatcttagcgaccatagcttcctcgtcagtcaaggcgaccgggaacaggctccaaacttagtttatatggtgacaggaaatccagccagcgacgagattaagagactcccgggggacatccaggtggtgcctatcggcgtgggacccaacgcgaacgtccaggagctggagcggataggatggcccaacgcccctatcctgatccaggatttcgaaaccttaccgagagaagcccctgacctggtgctgcaacgctgctgctcgggagagggcttacaaattccaacccttagccctgcccctgattgcagccagcctttggatgttatactgctcctggatggaagtagcagtttcccagcttcttacttcgatgagatgaagtcatttgctaaggctttcatttcaaaggctaacataggtccacggctcactcaagtctcggtgttgcagtacggatctatcaccacaattgatgtgccttggaatgtggtgcccgagaaagctcacctgttgtctctggtagacgtgatgcagcgcgagggggggccaagtcagatcggggatgcgctggggtttgcagtccggtacctgactagcgagatgcacggggcacgacccggcgcgagcaaagccgtggtcatactcgtgaccgatgtgtctgttgactctgtcgacgcggctgcagatgcagctcgaagcaatagggtgacagtgtttcctatcggaattggtgatcggtacgatgcagcgcagctgagaattttggccggccccgccggcgacagcaatgtagtcaaactccaacggatcgaggatctgcccaccatggtgactctgggtaactcatttttacacaagctttgctcaggctttgtcaggatatgcatggacgaggacggaaacgagaagagacctggagacgtatggacactgccggaccagtgtcatacagtgacgtgtcaaccggatgggcagactctgctgaagagtcacagagttaactgcgacagggggctccgacccagttgtccgaatagtcagtctcccgtgaaagtcgaggaaacatgtggctgtagatggacctgtccttgtgtctgtaccgggagttccacccggcatatcgtgacctttgacggccagaatttcaagctaactggatcgtgcagctatgtgctgttccagaacaaggaacaagacttggaggtgatcctacataatggggcttgcagccccggtgccaggcagggatgtatgaagagcatcgaggtgaaacacagtgccttgagtgtagaattgcatagcgacatggaagtgactgtaaacggtaggctggtgtctgtgccatacgtcggaggcaacatggaggtaaatgtgtacggcgctatcatgcacgaggtccgatttaatcatctcgggcacatctttacgttcaccccacaaaacaacgagtttcagctacagctgagtccaaagacctttgcgtctaaaacttacggcctatgcggcatttgcgacgagaacggagccaatgactttatgctgcgcgacggtacagttacaactgactggaaaacattagtccaggaatggactgttcaacgccctggccagacctgccagcctattctcgaggaacagtgtttggtaccggacagcagccactgtcaggtgctgctcctgcctctctttgctgagtgccacaaggtcctggcccctgcaaccttttatgctatttgtcagcaagacagctgtcatcaggaacaggtctgtgaggttatcgcgtcgtatgcccacctgtgtcggaccaacggagtgtgtgtggactggagaactccagatttttgcgcaatgtcatgtccaccatcactggtatataaccattgcgaacacggctgtcccaggcactgcgatgggaacgtaagctcctgtggtgatcatccgagtgaaggatgcttctgcccaccggacaaagtcatgctagagggttcgtgcgtcccggaagaggcttgcacacagtgcattggagaggatggagtacagcatcaatttttggaggcctgggtgcccgaccaccaaccatgtcaaatttgcacttgcctgagcggaaggaaagtgaactgcactacccagccatgtcctactgccaaggcacccacttgtgggttatgtgaagtggctaggctgcgacagaatgccgaccagtgttgcccagaatatgagtgcgtttgcgacccagttagctgcgacctgccaccagtgccccattgcgagcgcggcctccagcctactctgaccaaccctggggagtgcagacccaacttcacatgcgcttgcaggaaagaggagtgtaaacgcgtatcccccccctcttgtccaccccatagactcccaaccctgcggaaaacccagtgctgcgacgagtatgagtgcgcctgcaactgtgtgaatagcaccgtgtcctgtcccctgggatatcttgcatcaacagcgactaatgactgcggctgcaccaccacaacctgtctaccggataaggtttgcgtgcatagatctacaatctatcctgtgggacaattctgggaggaagggtgtgatgtctgtacgtgcacggatatggaggacgcagtgatggggctgagagtggctcagtgctcacaaaaaccatgcgaggactcatgtcggtccggtttcacctatgtgctgcatgaaggcgaatgttgtggaaggtgtctgccatccgcatgcgaagtggtgacaggctccccgcgcggagatagccaatcttcctggaaatctgtgggatcacagtgggcttctcctgaaaacccctgcctcattaacgagtgtgtacgagtgaaggaggaagtgtttatacagcaacggaatgtcagctgcccccagctagaggtgcccgtgtgtccgtcagggttccagttaagttgtaagacatctgcttgctgtccctcatgtaggtgtgagaggatggaggcttgtatgctgaacggtactgtcattggccctggcaaaactgttatgattgatgtgtgtacgacctgcagatgtatggtgcaggttggagtgattagcggcttcaaacttgagtgtcggaagactacatgtaacccctgcccccttggttacaaggaggaaaacaacaccggtgaatgttgtgggaggtgtctgcccacggcatgcaccattcagcttcggggtgggcagattatgaccctgaagcgggacgaaacactgcaggacggctgcgatacgcacttctgcaaagtcaatgaacgaggtgagtatttctgggagaagagagtaaccggttgccccccttttgatgagcacaagtgtctggctgagggcggcaagatcatgaagatacccggtacttgttgtgatacttgtgaggagcctgagtgtaacgacatcacggccaggctgcagtacgtcaaagtggggtcttgtaagtctgaagtggaagtcgatattcattactgccagggcaaatgtgccagcaaggcgatgtacagtatcgatattaacgacgtccaggaccagtgcagctgctgttctccaactcgaaccgaacctatgcaggtcgcattacactgcactaatgggtctgtggtataccacgaggtgctgaacgcaatggagtgtaagtgttcaccaagaaagtgttctaaa

SEQ ID NO: 12554 - DNA, 8439 bp, Artificial Sequence
  derived and/or modified sequence
atgattccggcaagattcgcgggcgttctcctggctctggcgctgattctgcctggcacactgtgtgcggaaggtacaagaggccgcagttctaccgcccgttgctcgttatttggcagcgactttgtgaatacgtttgatggatcaatgtactcattcgccggttattgctcttacctcttggcagggggctgccagaagcgttctttttccatcatcggcgactttcagaacggaaaaagagtcagccttagcgtttacttgggggagttttttgacatccatttgtttgtaaatggaacggtaacgcaaggcgaccaaagggtgagcatgccttacgcgagcaaaggcctttacctcgaaacagaagctggctattataaacttagtggcgaagcatatggatttgtggcgcgtatcgacgggtcaggaaatttccaagtgttactgtcggatcggtactttaataaaacatgcggtctttgcgggaattttaacattttcgcggaagacgattttatgacgcaggagggtacactgacgtcggatccttatgattttgcaaatagctgggccctgagttccggagaacagtggtgtgaacgcgcgagccctccgtcgagctcgtgcaacattagctcgggcgagatgcagaaaggactttgggagcagtgtcagcttttaaaatcaacaagcgtcttcgcccgttgccatccgctggttgatccagaaccctttgtcgcactttgtgagaaaacgctttgcgagtgcgcaggcggtttggaatgtgcatgcccggcgttgctggagtatgcaagaacatgcgcacaggaaggaatggtactttacggatggacggatcactcagcatgttcacctgtctgtcctgctggtatggagtaccgacagtgtgtaagcccttgcgctagaacatgccaatcactgcatattaatgaaatgtgccaggaaaggtgcgttgacggctgctcttgccctgaaggccaactgcttgatgaaggtttatgtgtagaatcaacagaatgtccatgtgttcattctggaaaacgttatccacctggcacctcactcagtcgtgattgcaatacatgtatctgtagaaactctcagtggatttgctcaaacgaagaatgccctggcgaatgtcttgtcacgggccagtcacattttaaatcctttgacaaccggtatttcacatttagtggcatttgccagtatttactggccagggactgtcaggaccattcatttagtatcgtgattgagaccgtgcaatgtgctgatgatagagatgccgtttgcacgagatccgtaaccgttcgtttgccgggcttacataacagtttggtgaaattgaaacatggagctggggtcgcaatggacggccaggatgtgcaacttcccttgttgaagggcgatctccgcatacagcacactgtaacagcatctgtgagactttcatacggcgaggacttacagatggattgggacggccgggggcgtttgctggtcaaactgtccccggtttatgcgggtaaaacttgcgggctctgcggcaattataatggtaaccagggagatgattttctgacgccgagcggcctggccgaaccacgggtggaggacttcggcaacgcgtggaaattacacggtgattgccaggatctgcagaagcaacatagcgatccgtgcgctctgaatccaaggatgacaagattcagcgaagaagcctgcgctgtgttgacaagcccgacttttgaggcgtgtcatcgggcagtgtccccgcttccctatttgcgcaattgccgctatgatgtttgttcatgctctgatggtagggagtgtctttgtggtgctcttgcgtcatatgcggcagcttgtgcgggtagaggcgttcgggtagcatggagagaaccgggaagatgtgaattaaattgcccaaaaggccaagtttacctgcaatgcggcacgccgtgcaatctcacctgtcgcagcctgtcctatccggacgaagaatgcaacgaagcgtgcctggaaggatgtttttgtccaccggggctgtacatggatgaacgtggcgactgcgttccgaaagctcaatgcccttgttattatgatggcgaaatatttcaaccggaggacattttctcagaccatcatacaatgtgttattgtgaagatggattcatgcattgtaccatgagcggcgttccgggatctttattgcctgatgctgttctttctagccccttaagtcatcgctccaagaggagcttgagctgtaggccgccaatggttaaacttgtctgccccgccgataatctgcgggcggaggggttagagtgtaccaaaacttgccaaaattacgacttagaatgcatgtcaatgggatgtgttagcggttgcttgtgcccgccggggatggtacgccacgaaaacagatgtgtagctttagaacgttgtccgtgttttcaccaggggaaggagtacgcaccgggagagacggtgaaaattggttgtaatacatgcgtatgccaagatagaaaatggaattgtacagatcatgtatgtgatgccacgtgttcaacaattggcatggcacattacctgacttttgatggattaaagtacctattccctggcgaatgtcagtacgtactggtccaggattattgcggctctaaccctggaacctttagaatcctcgtcggaaataaagggtgttcgcacccgtcagtgaaatgtaagaaaagagtcacaatcctggttgaggggggcgaaattgaactgttcgatggggaggttaatgttaaaagaccaatgaaagacgagacacatttcgaagtggtagaaagtgggcgctacatcatattgttgctcggcaaagctttaagcgttgtatgggaccgccacctcagcatttcagtcgtacttaaacagacatatcaagaaaaagtctgtggtttgtgtggcaacttcgatggcattcagaacaacgatttaacaagctctaatctgcaagttgaggaagaccctgtagattttggaaattcatggaaagtgtcttctcaatgtgctgatactcgcaaggtcccattggattcatcaccggcaacatgtcacaacaatataatgaaacagacaatggtagattcttcttgcagaatcttgactagcgacgtgtttcaagattgcaacaaacttgtcgatcccgagccgtatcttgacgtatgtatttatgacacatgcagttgcgagtcaattggcgattgtgcttgcttttgcgatacaattgctgcgtatgcacatgtatgtgctcaacacggtaaagtcgtaacctggagaacagcaacgttatgcccgcagagctgtgaagagcgcaacctacgagaaaacggatatgaatgcgaatggcgctacaactcttgcgcacctgcgtgtcaggttacatgtcaacacccggaacctctggcgtgcccggtgcagtgtgtcgaaggatgccatgcacattgcccccctggcaagatcttagatgaactgctccaaacatgcgttgatccggaagattgtccagtttgtgaagttgccggacgtcgattcgctagcggcaagaaagtaactctgaatccgtcagatcctgaacattgccagatctgccattgcgatgtggtcaacttgacttgcgaggcttgtcaggaaccgggcggtcttgtggtaccgccgacagatgcgccggtctcccccacgacattatatgtggaagatatctctgaaccgccgttacatgatttctactgttctagacttctagatctggtatttctgcttgatggcagttctcgtcttagcgaagcagagttcgaagttctgaaagctttcgtcgtcgacatgatggaacgcctgagaatttcacagaaatgggtccgagtagccgttgttgaatatcatgacggctctcatgcgtatatcggcttgaaggaccgaaagcgaccgtccgagcttagaagaattgccagccaggtaaaatatgcagggtcacaggtggcctcaacgtccgaagttctgaaatatacgctttttcaaattttttccaaaattgataggcctgaagccagtcgcatcacgctcctattgatggccagccaggagccacagagaatgagtaggaacttcgttcgttacgtacagggacttaagaaaaaaaaagtgatagtaattccggtaggcattgggccgcatgccaaccttaaacagatacgtctaattgaaaagcaagcacccgaaaataaggcctttgtattatctagtgtagatgagcttgagcagcagcgcgatgaaatcgtatcttatctttgtgaccttgccccggaagcccctccgcctacgttgccacccgatatggcccaggtgaccgtggggccggggcttctgggcgtgtctactctaggcccaaaacgcaacagcatggttctcgacgtagctttcgtcttagaagggagtgataaaatcggagaagcagattttaacagatctaaagagtttatggaagaagtgattcaacgaatggatgtagggcaggattcgattcatgtcactgtgctgcagtattcatatatggttacagttgagtacccgtttagcgaagctcaaagcaaaggagacatccttcagcgcgttcgtgaaatcagatatcaggggggtaatcggacgaacaccggcctagctttacggtatctttctgatcactcttttctggtaagccaaggagatcgtgaacaggcgccgaacctggtgtatatggtgacaggtaaccctgcgtcagacgaaattaaacgccttcctggagatattcaggtcgtaccgattggcgtcggacctaacgcaaatgtgcaagaattggaacgtatcggatggccgaatgcaccgattctcatccaagatttcgagacgttgccgcgcgaagcacctgatttggttctgcagagatgctgcagcggcgagggccttcagattccgaccctttctccggcgccggactgtagtcaaccgctcgatgtaatcctccttctggatggaagcagctcgttcccggcatcttatttcgacgaaatgaaatctttcgcaaaagcatttatttctaaggcaaatatcggcccgcgcctgactcaggtttcagtattgcaatacggctcaattacgacaattgatgtcccgtggaatgtggtacccgagaaggcccatttgctttctcttgtagatgtgatgcaacgagaaggaggtcccagtcaaattggcgacgccttgggcttcgcagttcgctatttgacctccgagatgcatggagcaagaccaggagcaagtaaagccgtggtcattcttgttacagatgtgtccgttgatagcgtcgatgccgccgcagatgcggcaagaagcaatagagtcacagtctttccgattggtattggtgatcgctatgatgcggcacagcttcgtattttagccggccctgcgggggattcaaacgtcgtcaagctgcagcgtatcgaggatctcccaacaatggtaacacttggcaatagcttccttcataaactgtgcagcggttttgtaagaatctgcatggatgaagatggtaatgaaaaacggccaggggatgtatggacgcttccggatcagtgccatacagtgacgtgtcagccggatggacagactctccttaaatctcatcgggtcaactgcgatcggggccttcgcccctcatgccctaatagccaaagcccggtcaaagttgaagaaacatgcgggtgtcgatggacatgtccgtgcgtgtgcaccgggtcttccacacgccatattgttacatttgacggccagaattttaaattgacaggctcttgcagctatgtgctcttccaaaacaaagaacaggatctggaagtgatactgcacaacggtgcgtgcagtcctggggctcgccaaggttgcatgaaatcgatagaagtgaaacatagcgcgttgagcgtcgaacttcattctgatatggaagtaacagttaatgggcgtcttgtttccgttccatatgtcgggggtaatatggaagtgaatgtctatggcgcgataatgcacgaagtccgcttcaatcatctaggacatatcttcacattcacgccgcagaataatgaatttcaactgcagctgagccctaaaacctttgcatccaagacgtatggcctgtgtggaatttgtgacgaaaatggggccaatgatttcatgttaagagatggcacagtcacgacggattggaaaaccttggtacaggaatggacagtgcagcggccaggccagacctgccaacctatcctggaagagcagtgtttagttccggattcttcacattgccaagttctccttctgccgttatttgccgaatgccataaggtgctggcccctgccacgttctacgctatttgccagcaagattcgtgtcaccaagaacaggtctgcgaggtgattgcctcttatgcacacttatgccggacgaatggagtttgtgtcgattggcgtacccctgacttttgtgcgatgtcatgcccgccttccctagtctataaccattgcgaacatggctgtcccaggcattgcgatgggaatgtgtcaagttgtggcgaccatccgtcggagggttgcttttgtcctccggacaaagtcatgttagagggctcttgcgtgccagaagaggcttgtacacaatgtattggcgaagatggagtgcagcaccaattcctcgaagcctgggtgccagatcatcagccttgccaaatttgtacgtgcttatcaggccgtaaagtgaattgtacgacacaaccgtgtcctaccgcaaaggcgcccacctgcggcttatgcgaagtcgctcgattgcggcagaatgccgaccaatgctgcccggagtatgaatgtgtctgcgatcccgtcagctgtgatcttccgccggttccacattgtgagcgagggcttcaaccgacattaaccaatccgggcgaatgtagaccgaactttacatgtgcctgtagaaaggaagagtgcaaaagggtatccccaccgagctgtcccccacataggctaccgacgttaagaaaaacccagtgttgtgatgagtatgagtgtgcttgcaattgcgtgaatagcactgtcagctgtccgcttggttatcttgcttcaactgctacgaacgattgcggttgcacaacaacgacttgtctccctgacaaggtttgcgtccatcgcagtactatctatcccgttggtcaattttgggaagaagggtgtgatgtctgtacatgtactgacatggaggacgctgtcatggggttgagagtcgctcagtgctcccagaagccttgtgaagattcgtgcagatccggatttacttatgtgctccacgagggcgaatgctgcggacggtgtttacctagtgcatgtgaggtggtgacaggctcaccgaggggtgacagccagagttcttggaaatctgttggttcccaatgggcttcaccggagaacccatgtcttataaacgaatgcgtacgcgtgaaggaggaggtcttcattcaacaacgcaatgtcagctgtccgcagcttgaagtgccggtatgccctagcggttttcaactgtcctgtaagacctccgcttgctgtccaagttgtagatgcgaaagaatggaggcttgcatgctgaatggcacagtaattggccctggcaaaacggttatgatcgatgtctgcacgacgtgcagatgcatggtgcaggtgggcgtaattagtggatttaagctggaatgtagaaaaacaacatgtaacccgtgcccgttaggttacaaggaagaaaataacaccggtgagtgctgtggacgttgccttcctacagcatgcaccatccaactgagaggcggacagatcatgaccttgaaaagagatgagacactgcaagatggatgtgacacacatttctgtaaagtcaacgaacgtggagaatacttttgggaaaaaagagttaccggttgtcccccctttgatgaacataaatgtcttgcggagggaggtaaaatcatgaagatcccaggcacatgttgtgacacatgtgaagagcctgagtgtaacgatatcacagcccggctgcaatacgttaaagtcggatcttgcaaaagcgaggtcgaagtcgacattcattattgtcaagggaaatgcgcatcaaaagctatgtattcgatcgacattaacgacgttcaggatcaatgttcttgttgcagcccgacccgtacagagccgatgcaggtagcattgcattgtaccaacggttcagttgtttaccatgaagtcctaaatgccatggaatgtaaatgtagcccacgtaaatgctcaaaa

SEQ ID NO: 12555 - DNA, 8439 bp, Artificial Sequence
  derived and/or modified sequence
atgatccccgctagatttgccggggtactgctggcccttgccttgatccttcctggcaccctctgtgctgagggcacccgaggacgcagttctaccgctaggtgttccttatttggttctgattttgtaaacacatttgacggcagcatgtatagtttcgctggatattgctcatacctgctcgcgggtggatgccagaaacgatcattctctatcattggggacttccaaaacggaaaaagggtgagtttatcagtctacttgggcgaatttttcgatatccacctgtttgtgaacggaactgtaacccagggagaccagagggtgtctatgccttatgcttctaagggactgtacctagaaacggaggctggctactacaaactatcaggggaagcctatggctttgtcgcacggatcgacggctctgggaacttccaggtgctgctgtccgaccgttacttcaacaagacctgcggcctctgcggaaactttaacatattcgccgaggacgacttcatgactcaggaaggcacactgacaagtgacccttacgatttcgcgaactcgtgggcactctcctccggagaacagtggtgtgaaagggcttccccgccctcctccagctgtaacatctcaagcggtgagatgcagaagggactgtgggaacagtgccagctgctgaagtctacctccgtgtttgccaggtgtcatcccttagtggacccggaaccctttgtggcactatgtgagaagacgttgtgtgagtgtgcaggtggcctggaatgtgcatgtccggccctgcttgaatatgcacgaacatgcgcgcaggaggggatggttctgtacggctggaccgatcatagtgcttgcagcccagtatgccctgcaggcatggaatacagacagtgcgtctcaccctgcgcacgaacttgccaatccctgcacatcaatgaaatgtgccaagagagatgtgtcgatgggtgcagctgcccagagggccagctgctagatgaggggttgtgtgtggaatctacagaatgcccttgtgtgcactcaggaaagagatacccccccggtacatctctgagcagggactgcaatacttgcatctgtagaaactctcagtggatatgctcaaatgaggaatgtccgggagaatgcctggtgacagggcagtcccacttcaaaagcttcgataaccggtacttcacctttagtgggatttgccagtacctccttgcacgtgactgtcaagaccactctttttctatagtcattgagaccgtacagtgtgccgacgatcgtgacgcagtttgcacacgatcggtgactgtgagacttccaggcctgcacaatagcttggtgaagctgaagcacggcgctggagttgccatggatgggcaagatgtgcagctccctttactgaagggggacctccgtatacagcacacagtgaccgctagtgtgagactcagctacggcgaagatctgcagatggattgggacgggcgcgggcggctgctcgtcaagcttagcccagtctacgcaggcaagacatgcggcttatgcggaaactacaatggaaaccagggtgacgactttctgacaccctccggcctggccgaaccacgagtcgaggatttcggcaatgcctggaaactgcacggggactgccaagatctgcagaaacagcattccgacccatgcgccctgaatccaaggatgactcgcttcagcgaggaggcctgcgcagttctaacctctccaacattcgaggcatgtcatcgcgccgtgtccccgctcccatacctgcgtaattgcagatacgacgtgtgttcatgtagcgacggcagagaatgcctgtgcggcgcactggcttcttatgcagccgcttgcgcaggccggggggttcgggtggcttggagggagcccggccgatgcgagctaaactgtcctaaggggcaggtctacctacaatgcggtaccccttgtaacctgacctgtcgatctctgagctaccctgatgaggaatgcaatgaggcttgtctcgaaggatgcttctgcccccccggcctgtatatggatgagcgcggggattgtgtgcccaaggctcaatgtccctgctactacgatggtgagatctttcagccagaagatatcttcagtgatcatcacactatgtgctactgcgaggatggtttcatgcattgcactatgagtggtgtgccagggagtttgctccccgatgcggtgctctcgagcccactctcccatcgaagcaaacgttcactctcgtgcaggccacctatggtgaaactagtgtgccctgctgataatctgagagccgaaggattagaatgtacgaaaacatgccaaaactatgacctggaatgtatgagcatgggatgtgtaagcggctgtctttgtcccccggggatggttcgacacgaaaacagatgtgtagccctcgaacgatgtccttgcttccatcagggcaaggagtatgctcccggtgagaccgtaaaaattggatgcaatacgtgcgtgtgtcaggatagaaagtggaactgtaccgatcacgtttgcgatgcaacctgcagcacaatcgggatggcccactatctaacctttgatggccttaagtatttatttccaggagaatgccagtatgtcctcgttcaggactactgcggctcaaatcctggaacttttcgtatactggttggaaacaaaggctgttcccacccatctgtgaagtgtaagaaacgggttacaattttggtggaagggggcgaaatagagctcttcgacggcgaggtgaacgtgaagagacccatgaaagacgaaactcattttgaagtggtagaatccgggcgatatatcattttgctgctgggcaaggctctttccgtcgtttgggatagacacctgtctatttccgtggtgcttaagcaaacgtatcaggaaaaggtgtgtggcctgtgcggtaacttcgatgggattcagaacaacgacttgacctcaagtaacctgcaggttgaggaggaccctgtggatttcggtaactcctggaaagtgagctctcaatgcgctgatactcgaaaagtgcccttggatagctctccagcaacctgtcacaacaatatcatgaaacaaaccatggtggacagttcctgcaggatcctaacctccgatgttttccaggattgtaacaagttggtcgacccagaaccatatctggatgtttgcatctacgatacgtgttcatgtgaatccattggggattgcgcctgtttctgtgatacaatagccgcatacgctcacgtgtgcgctcagcacggcaaggtcgtaacatggcgcacggctacactgtgtcctcagagttgtgaagagcgtaatctgagggagaacggctacgaatgcgaatggcggtacaactcctgtgcacctgcctgccaggtgacctgtcagcacccagagcccttggcgtgccccgtgcagtgcgtcgaagggtgtcacgcgcactgtccaccggggaaaattctggatgagctgctccagacttgcgtcgaccccgaggactgcccggtgtgtgaggtggcagggaggaggttcgctagcggcaagaaggtgacattgaaccctagcgatccggagcattgccagatctgccattgtgacgtcgtaaacctgacctgtgaggcctgccaagagcccgggggactcgtggtcccacctacagatgcgccggtatcgccaaccacactctacgtggaagacatcagcgaaccccccctgcacgacttctattgctctcgtctgctagacttagtgtttttgctcgacggaagttcacggcttagcgaggctgagttcgaggtgctgaaggcctttgtagtcgacatgatggaaagactgcgtatctcccagaagtgggttcgggtggccgtagttgaatatcacgacgggagtcacgcatacattggcctgaaggacagaaagcgacccagtgagctgaggagaattgcaagccaagttaaatatgcaggctcgcaggttgccagcacttccgaggtgctgaagtacactctgttccagattttctcgaaaattgacagacctgaggcatctagaatcactctgctactcatggcatctcaggagcctcagaggatgagtaggaacttcgtcagatatgtccagggactgaagaagaagaaggtcattgtcatccctgtcggaatcggcccccatgccaacttgaaacagattagactgattgagaagcaagccccagaaaacaaggcttttgtgctaagttcggtggatgagctggagcagcagcgggatgaaatcgtgtcatacctatgtgatctggctccggaagctcccccaccaaccctaccccctgacatggctcaggtgacagtggggccagggttactgggtgtatccaccttgggacctaagaggaactccatggtgctggatgtagcgttcgtcctggaaggaagcgacaagatcggggaggctgacttcaatcgatctaaggagtttatggaagaagtgatacaacgaatggacgttgggcaggattcaatccacgttacagtgctgcagtactcttatatggtgaccgtcgaatacccattcagtgaagcccaaagcaagggagatatcttacagagagtaagagaaataaggtatcagggagggaaccgaaccaacacgggattggcactgcgatatctgtccgatcattctttcctggtgagccaaggagatcgagaacaggcgcccaaccttgtttatatggtgacgggcaatccggctagcgacgaaatcaaacgattgcccggagatattcaggtcgttcccatcggtgtgggccccaacgcaaacgtacaggagctggagaggatcgggtggccaaatgcgcctatcctgatacaagacttcgaaacactgcctcgagaggcacccgatctggtgctgcagcgttgctgcagtggggaaggactgcagataccgaccctgagccccgcccccgactgttctcaaccgctcgacgtgattttactgctggacgggagttccagctttcccgcgtcctatttcgacgaaatgaaatccttcgctaaagcgttcatctccaaggctaacatcggacccaggttaacccaggtcagtgtgctgcagtatggctccatcacaactatcgatgttccatggaacgtggtcccggagaaagctcacttgctttcgttggtggacgtgatgcagagggaaggcggaccatcgcaaattggcgatgccttgggtttcgcagtgcgttacctcactagcgagatgcacggcgctcgacctggtgccagcaaagcagtcgtgatcctggtaaccgacgtctccgttgattctgtggatgccgccgctgacgccgcccgatccaacagagtcaccgtatttcctattgggatcggggatcgttacgatgccgctcagttgcggatcctggccggaccggctggggattctaacgtcgtcaagctccagagaattgaggacctgcccaccatggtgacactgggaaattctttcctgcacaagctgtgctccgggtttgtcaggatatgcatggatgaggacggcaacgagaagagacccggcgacgtctggacccttccggatcagtgccacaccgtcacttgccagccagacgggcagaccttactgaagtcccatagagtgaactgcgatagaggactcagaccttcttgtcctaattcccagtccccggtgaaagtggaagaaacctgtgggtgcaggtggacatgcccctgcgtgtgtacgggctcctccactcgtcatattgtgacattcgatggccaaaactttaaacttacggggtcttgcagttatgtcctctttcagaacaaggaacaggatctggaggtgatcctgcataacggcgcctgctcccccggtgccaggcaaggctgtatgaagagcattgaagttaaacattccgcgttgtccgttgagctgcatagcgacatggaggtcacagtcaatggccgactggtgtcagtcccctatgtcggaggaaacatggaggtgaatgtttatggggctatcatgcacgaagtaagatttaaccacttaggacacatattcacttttaccccacagaacaatgagttccaacttcagctgtcacccaagaccttcgctagcaagacttatggtctgtgcggtatctgtgatgaaaacggtgccaatgactttatgctgcgcgacgggaccgtgaccacggattggaaaaccctggttcaggagtggacagttcagcgacctggtcagacgtgtcagccaatcttagaagaacagtgtctggtgcctgactcaagccattgtcaggtgctcctgttgcctttattcgctgaatgccacaaggtgctcgcccccgcgaccttttacgcaatttgccagcaggatagttgtcaccaagaacaagtgtgcgaggtaatagccagctacgctcacctgtgccgaactaacggggtctgtgtcgactggcgaacacctgatttctgcgctatgagctgtccgccttcactagtttataatcattgtgagcacggctgccccagacattgcgatgggaatgtgagctcttgtggggaccatccctccgagggatgcttttgccccccggataaggtgatgctagagggatcttgcgtaccagaagaggcgtgcacgcagtgtataggcgaggacggagtgcagcatcagtttttggaggcctgggtgccagaccatcagccatgtcagatctgcacttgcctcagcgggaggaaggtgaactgtaccactcagccctgtccgaccgctaaagctcccacctgtgggttatgtgaagtcgcacgacttcgccagaacgcagatcagtgctgcccagaatatgaatgcgtctgtgacccggtgtcctgtgatctgcctcccgtgcctcactgtgagaggggcttgcagccgaccctcactaatccaggtgagtgcaggccgaattttacctgtgcctgcaggaaagaagaatgcaagagagtctccccacctagctgtcccccccaccgtctccctacgctgcggaaaacccaatgctgcgacgaatacgaatgtgcttgtaactgcgtcaattctaccgtgtcctgtccattaggatacctggcttcaaccgccacaaatgattgtggatgtactaccaccacttgtcttccagacaaggtctgtgttcataggtccacaatctaccctgtgggacagttttgggaagaggggtgtgacgtgtgtacctgcaccgatatggaggacgctgtaatgggcctgagggtagcccagtgctctcagaaaccttgcgaggattcatgtagatctggcttcacctatgtgctgcacgaaggcgaatgctgcggccgatgtttgccaagcgcctgtgaagtggttaccggcagtccacgaggggatagtcaaagctcctggaaatcagtgggaagtcaatgggctagtcctgagaatccatgtttgattaacgagtgcgtgcgcgtgaaggaagaggtctttattcagcagagaaatgtatcttgtccacaactggaagttcctgtgtgtccttcaggttttcagctatcctgtaagaccagcgcttgttgccctagctgtcggtgcgaaagaatggaggcttgcatgctgaacggtacagttatcggacccggaaaaactgtgatgatcgatgtgtgtacaacctgccgctgtatggtgcaagtgggcgtgatcagtggattcaaattggaatgcaggaagactacctgtaacccctgtcccctcggttataaagaggagaataatacaggcgaatgctgcggtcgttgtctgcccaccgcctgtacaatccaactccgaggcgggcagatcatgacactgaagagggatgaaaccttacaggatgggtgcgacactcacttttgcaaggtcaacgagcgaggggaatatttttgggagaagagagtcacaggctgccccccttttgatgaacataaatgcttagcggaagggggaaagatcatgaagatccccggcacatgttgtgacacctgcgaagagccagaatgtaatgacatcacagcacgactgcagtatgtgaaggtgggctcctgcaagagcgaagtggaagtggatatccattattgtcaggggaaatgtgcctctaaagccatgtactctattgacattaacgacgttcaggaccagtgcagctgctgtagtccaacacggaccgagcccatgcaagtcgctttgcactgcacaaacggctccgtggtgtaccatgaagtccttaatgcaatggagtgtaaatgttcccctcgcaagtgttcaaag

SEQ ID NO: 12556 - DNA, 8439 bp, Artificial Sequence
  derived and/or modified sequence
atgatcccagcccggtttgctggcgtacttctcgccttggcgctcatcctgccagggaccttgtgtgctgaaggcactcggggccgatcaagcactgcccggtgctccctttttggtagtgatttcgtcaatacctttgatgggagcatgtacagcttcgccggatattgttcttacctgctcgcagggggatgtcagaaacggagttttagtataatcggcgactttcaaaatggtaaaagagtgtctctgtctgtctatctgggagagttctttgacatacatctgttcgtgaatggaacagtgacccagggggaccagagggtctccatgccctacgccagcaaaggtctgtatcttgagaccgaagcaggttattacaaactctcaggggaggcatatggatttgtggcacgtattgacggaagtggaaacttccaggtgcttctgagcgaccgctactttaataaaacctgcgggctgtgcggtaacttcaacatcttcgctgaagacgatttcatgacacaagaaggtactcttacaagcgatccgtacgactttgcgaacagctgggccctcagtagcggtgagcaatggtgcgagagggcctccccaccctcgtcctcctgtaatatctcctcaggagagatgcagaaaggactgtgggaacagtgccaattactaaagagcacatccgtcttcgcgaggtgtcaccccctggtggacccggagcctttcgtggcactgtgcgaaaaaacgctgtgtgaatgcgcaggaggattagagtgcgcctgtccagcactcctcgagtatgcacgcacctgtgcccaggagggcatggtcttgtacggctggaccgatcactctgcctgcagccctgtttgtcccgcaggaatggagtataggcagtgtgtgtctccatgcgcccgcacttgccaatctctgcatatcaatgagatgtgccaggagagatgcgtggacggatgcagctgtcccgagggacagctgctagacgaggggctgtgcgtcgagagtacagagtgcccctgcgtgcattcaggcaaacgctaccctccagggacctcactctctcgcgattgcaatacttgcatctgccggaactcccagtggatttgtagtaacgaggaatgtcctggcgagtgtttggtgaccggtcagtctcactttaagtcttttgataacagatactttaccttctccggtatatgtcagtaccttctggcaagagattgtcaggatcattctttctctatcgtgatagagactgtgcagtgcgccgacgaccgggacgccgtgtgcaccagatccgtgaccgtccgcctcccagggttgcacaattcactggttaagttgaagcatggagccggggtagcgatggacggccaagatgttcagctgccacttctgaagggcgatctgcgaatccagcacacagtcacggctagcgttcgactctcgtacggcgaagacctacagatggattgggatggccgtggcagactcctggtgaagctttctcctgtctacgctggcaagacatgcgggctctgtgggaattataacggaaatcagggcgatgactttcttaccccatcagggctcgccgagcctagggtggaggattttgggaatgcctggaaactgcacggagactgccaggacctacagaagcaacattctgacccctgcgctctgaacccccgcatgactaggttttcggaagaggcatgcgccgtgcttacatctcctacttttgaagcctgtcacagggctgtgtcccctctgccatacctcagaaattgtagatacgacgtgtgctcctgtagcgacggcagagaatgcctctgcggcgccttggcttcctatgcagccgcttgcgccgggagaggagtgcgggtggcgtggcgcgagcccggtcggtgtgaattaaattgtccaaagggccaagtgtatctgcagtgtgggacaccgtgcaatctgacatgtcggagtctctcatatccagacgaggagtgtaatgaagcgtgcctggagggatgcttttgccctcctggtctctacatggatgaaaggggggattgcgtaccaaaggctcaatgcccttgttattacgacggcgaaatctttcagcctgaggatatcttctccgaccaccataccatgtgctactgtgaagacggattcatgcattgcactatgagcggagttcctggcagtctgctgccggatgcagttctgagctcccctctttctcataggtcaaagagatctcttagttgtcggccgccaatggtcaagctcgtctgccccgccgacaacctgcgggccgagggactggagtgcactaaaacatgtcagaattatgacttggaatgcatgagcatgggatgcgtgagcggatgcctctgtccacccggcatggtgcggcacgagaataggtgcgtcgcactggagaggtgtccctgctttcaccagggcaaggaatatgctcccggggagactgttaaaattggttgtaatacatgtgtctgccaggacaggaaatggaattgtaccgaccacgtctgcgacgctacttgcagtacgattgggatggctcactatctcacgttcgacgggctgaagtatctcttccccggcgagtgccagtatgtgctggtgcaagactactgtggctcgaatccggggactttcaggattctagtgggaaacaagggctgttcacatccatctgttaagtgtaaaaaacgagttacaattttggtggaaggcggagagatcgaactgtttgatggcgaagtgaatgtaaaacgaccaatgaaagacgagacacacttcgaagttgtggaatctgggaggtatatcattttgctgctcggcaaggccctgtccgtggtctgggacaggcacctgtctatcagtgtcgtcctgaagcagacatatcaggaaaaagtgtgcggcctttgtggaaatttcgatggcattcagaacaatgacctgacatcttctaacctgcaggtggaagaggacccagtggatttcggaaacagctggaaggtgagcagtcaatgcgccgacacccgcaaagttcccctggactccagtccggccacctgccataacaatatcatgaagcagacaatggtggactctagctgccggattctaacatccgatgtgttccaggactgcaacaagctggtagatcctgagccatatttggacgtgtgcatttacgatacatgcagctgcgagtctattggagattgtgcctgtttttgtgacacaatcgcggcatatgcccacgtctgtgcccaacacggcaaagtagtgacgtggcgaacagccaccctttgcccccagagctgtgaggaacgcaacctgcgggaaaacggatacgagtgcgagtggcgctataattcatgcgcacctgcttgccaagtcacgtgtcagcacccagagcctctggcatgtccagtccagtgcgttgaggggtgtcacgcacactgcccgcctggtaagattctggatgaattgctgcaaacttgcgttgacccggaagactgtcctgtgtgtgaggtggcagggcggaggtttgcctcaggcaagaaggtcacactcaacccaagtgaccctgaacactgccagatttgtcattgtgatgtggtgaacctgacctgcgaggcctgtcaggagcctggcggtttggtggtcccacctacggacgcaccagtgagcccgacaaccttgtatgtggaggatatctctgagcctcctcttcatgatttctactgctcccggctactggacctggtcttcctgttagatggatcttcccgcctttcagaggcagagttcgaggtgttaaaggccttcgttgtggacatgatggaaagactgaggatctcccagaagtgggtacgcgtggccgtggttgaataccatgacggctcccatgcctacattggactcaaagatagaaagcgaccctccgagctcaggcgcatcgcctcacaggttaaatatgcaggttcccaagttgccagcactagcgaggtactcaagtacaccctgtttcagatcttctctaagatcgatcgtccagaggccagccgcatcactttattactgatggccagtcaggagccacagcgaatgagccggaatttcgtgcgctacgtgcagggcttaaagaagaaaaaagtcatcgttatccccgtggggataggaccacatgctaacttaaagcagataagattgatcgagaagcaggcacctgagaataaagcatttgtcctcagttctgtcgatgagttggaacaacagcgggacgaaatagtgtcttatctctgtgacctggcaccagaagcccccccccctactctgccacccgacatggctcaggtgaccgtggggccaggcctcctaggcgtgtccactctaggcccaaagaggaacagtatggtgctggacgtagcctttgtgttggagggcagcgacaaaatcggggaagctgacttcaatagaagcaaggaatttatggaggaagttatacaaaggatggacgtcgggcaagacagcattcacgtgacggtgcttcagtactcatatatggtgacagtggaataccctttcagtgaggctcagagtaagggcgatatcctgcagagggtgcgagagattcgctaccagggcgggaaccgaactaatacgggactggcactgagatacttatccgaccattcttttttggtaagccaaggtgacagagaacaggcaccaaatctggtctacatggtgaccggtaaccccgcctctgacgagatcaaaagactcccaggcgatatacaggtagtacctatcggagtcggacctaacgccaatgtccaggagttggagagaatcggctggcctaacgcacccattctgattcaggactttgagacccttccgagagaggcgcctgatttggtgctgcaaagatgctgctctggggagggcttgcagattccaaccctctcaccagctcctgattgtagccagccccttgatgtgattcttttgctagacgggtcaagctcatttccagcctcgtatttcgatgagatgaaatcttttgccaaagccttcattagtaaagccaacatcggcccccggcttactcaggtaagtgtgctgcaatatggatcaattacaacgatcgatgtaccatggaatgttgtcccggaaaaagcccacctgctgtctctagtggacgtaatgcaaagagagggcggtccatcacagataggcgatgcgttgggttttgccgtgcggtacctaacctctgaaatgcacggggcgaggccgggagcctctaaggctgtggtaatattggtgaccgacgtctcggtcgacagcgtggacgctgccgcagacgcagcaaggtctaaccgggtaaccgtgtttccgatagggattggcgaccgctatgacgcagcgcaactaaggattctcgccggacccgctggcgattcaaacgtcgtgaaactgcagcgaattgaggatctcccaacaatggtgaccctagggaactcattcctgcacaagctttgctccggcttcgtcagaatctgtatggatgaagatggcaacgaaaagcgacctggggacgtgtggaccctgccagaccagtgccacaccgttacctgccagccagacggacagaccctgctgaaatctcatcgagtgaactgcgatcgcggcctgcgaccctcatgccctaacagccaaagtcctgtgaaagtcgaggaaacctgtggatgtagatggacctgtccctgtgtgtgtactggctcatccactcgccatatagtgacatttgacggccaaaatttcaagctcaccgggagctgtagctatgttctgttccaaaacaaagaacaagacttggaggttattctgcataacggtgcctgcagtcccggcgccaggcagggctgcatgaaaagcatagaggtgaagcactcagctctgtctgtggagctgcactccgacatggaggtcaccgttaacggccgattggtgagcgtgccatacgtcggaggcaacatggaagtgaatgtgtacggagctataatgcacgaagtgagattcaatcacttggggcatatcttcacctttaccccccaaaacaacgaattccagttacagctgtcacccaaaacatttgcttccaaaacttatggtttatgcggcatctgtgacgaaaatggagccaatgactttatgctgcgcgacggaaccgttacaacagattggaaaacgctggttcaggaatggaccgtccaacgccccggacaaacttgccagcctatattggaggagcagtgtttagtcccagattcttcgcactgtcaggtgctcctgcttcccttgtttgccgaatgtcataaggttctcgcaccagcaacgttttacgcaatctgtcaacaggattcttgccaccaggaacaagtgtgtgaggtcattgcatcctacgcccacctatgccggacaaatggtgtctgtgtggattggagaaccccggatttttgtgccatgtcttgccctccatctctcgtgtacaatcattgcgaacacggttgtcccaggcactgcgacggcaatgttagttcctgcggggaccatcccagtgagggctgtttctgtccacctgacaaagtgatgctcgaaggttcatgtgtccctgaggaggcctgtactcaatgtattggggaggacggagtgcagcatcagtttctggaagcatgggtccccgatcatcagccctgccagatctgtacctgtctttccggaaggaaggtcaattgcaccacacagccctgtccaacggcgaaagcccccacttgtggactgtgtgaggtggccagactgcgccaaaacgctgatcagtgttgtcctgaatacgaatgtgtttgtgaccccgtgtcctgtgatctcccccccgtaccgcactgtgaacgaggcctgcagcctactctcactaacccgggggaatgccggccaaattttacatgtgcttgcaggaaagaggaatgcaaacgcgtctctcccccatcctgcccgccacaccggctacccactctgaggaaaactcagtgttgcgatgaatacgaatgcgcgtgtaattgcgtcaatagtaccgtaagctgtcctctcggctatcttgcctccacagcgacaaacgactgcgggtgcactacgacaacatgcctgccagataaggtgtgtgtgcacaggagtactatctatcctgtgggacaattctgggaagaaggctgtgatgtgtgcacctgtactgatatggaagacgccgtgatgggactgcgagttgcacagtgctcccaaaagccgtgcgaggatagctgccgtagcggattcacatatgttctccatgagggcgaatgttgtggcagatgcctgccctccgcatgtgaggtggtgacaggaagtcctcgcggggattcccagtcgagttggaaatcagtgggctcgcagtgggccagcccggagaacccctgcctcataaacgagtgtgtccgcgtgaaggaagaggtcttcatccagcagagaaacgtgagctgcccgcagttggaggtgcctgtgtgtccctccggcttccagctctcttgcaaaacgtctgcatgttgcccttcgtgtagatgcgaacgcatggaggcgtgtatgctgaatggcaccgttatcggcccaggaaagaccgttatgatcgacgtatgcacaacttgccgttgtatggtacaggtgggcgtaatctcaggattcaaactagaatgcaggaagacgacatgtaatccttgtcccctgggatacaaggaggagaataatacaggagaatgctgcggtcgatgcctgccgacagcctgtaccatccaattgcggggcggacaaatcatgaccctgaaacgcgatgaaacactgcaggacggatgtgatacacacttttgcaaagtcaacgaacgcggggagtacttttgggaaaagagagttaccggctgtcctccctttgacgaacataaatgtttggccgaaggtggcaaaatcatgaagatacccgggacgtgctgtgacacatgtgaagaacccgaatgtaacgacatcactgcaaggctccaatacgtcaaagtgggcagctgcaagtctgaggtggaggtcgatatacattattgccaaggcaagtgcgcttccaaagcaatgtatagcatagacatcaatgacgtccaggaccaatgtagctgctgttctcccacacggaccgagccaatgcaggttgccctgcattgcaccaacgggagcgtggtttaccacgaggtcctcaatgccatggagtgtaaatgctcgccgcggaagtgttccaag

SEQ ID NO: 12557 - DNA, 8439 bp, Artificial Sequence
  derived and/or modified sequence
atgatcccagccaggtttgccggggttctacttgccttagccttgatccttcccgggacactttgtgctgaggggacacgcggccggagttctaccgctcgatgtagcctgttcggttctgattttgtgaatacgttcgacgggtctatgtactcatttgccggctattgctcctacctactggctggcgggtgtcaaaagcgcagcttctcaatcataggcgattttcagaacgggaaaagggtgagtctgagtgtttacctcggagagttttttgatatccacttatttgtgaacggcactgtcacacagggcgatcagagggtctcgatgccatacgccagcaaaggtctctatctggagacagaggccggttactataagctgtccggcgaagcctatggcttcgtagctaggattgacggttctggcaacttccaggttctcctgagtgataggtatttcaataagacttgcgggctgtgcggtaactttaacatattcgcagaggacgacttcatgacccaggaagggacactgacctctgacccctatgacttcgcgaacagctgggccctcagttccggcgaacaatggtgcgaaagggccagccctccaagctcaagctgtaatatcagttctggggaaatgcaaaaggggctgtgggaacagtgccagctgctaaaaagtacatctgtctttgccagatgccacccattagtggaccctgagccgttcgtggcgttgtgtgagaaaactctgtgtgagtgtgctggaggactggagtgcgcgtgccccgcccttctggagtacgcgaggacctgcgcccaggaagggatggtgctatatggctggacagaccactccgcctgttcccccgtttgccccgcgggcatggagtatcggcagtgcgtgtcaccctgcgctcgtacatgccagagtttgcatatcaacgagatgtgtcaggagagatgcgtggacgggtgcagctgccccgagggccagctgcttgacgaggggttgtgtgtcgaatccacagaatgcccatgcgtgcattctggcaagcgctaccctccgggaacgtccttgtccagagactgtaatacttgcatttgcaggaacagtcagtggatctgtagtaatgaagagtgccctggagaatgtcttgtgacagggcaatcccactttaaaagctttgacaaccgctattttaccttcagcggcatctgccaatatctgttggcccgggactgtcaggaccactctttttctatcgtcatagaaacggtgcaatgcgctgacgatcgggatgcagtatgcacccggtctgtcacagtgcggctccccggactccacaactcactagtgaaactgaagcacggcgccggtgtcgcgatggatgggcaggacgtccaattacctttactcaagggggatctgagaattcagcacacagtgactgcttcagtgcggttgtcgtatggcgaggatctgcagatggactgggatggccgggggagattgctcgttaaactctctccagtttacgccgggaagacatgtgggctgtgtggcaactacaacggcaatcagggagacgattttctcaccccctctggactggccgagcccagggttgaggactttggaaatgcatggaagcttcatggggactgtcaggacctacagaaacagcattcggacccttgtgccctcaaccctaggatgactcgtttttctgaagaagcttgcgccgtgttgacctcaccgacttttgaagcctgccacagggccgtgagtcctctgccctacctgaggaactgccgatatgacgtgtgttcatgttcagatgggcgcgaatgcctttgcggggccctggcctcatatgccgccgcttgtgcaggacggggagttagagttgcctggagagagccgggccggtgtgagctgaactgcccaaaaggccaagtttatttgcagtgtggtaccccatgtaatcttacttgtcggtcactgtcctaccctgacgaagaatgcaacgaggcatgcctggagggctgcttctgcccccccggactgtacatggacgaacgaggcgactgcgttcctaaagcccagtgcccgtgttattacgacggcgaaatctttcagccagaggacatattcagcgaccatcatacaatgtgttactgcgaggatggattcatgcactgtacgatgtccggcgtgcctgggagtcttctgccggatgctgtactgtcctcccccctctcccatagatcgaagaggagcctgagctgtcgacccccaatggtgaagctcgtgtgccccgccgataatcttcgagccgaggggctcgaatgtacaaagacatgccagaactacgaccttgagtgcatgtctatgggctgcgtgagtggctgcctttgtccacccgggatggtgagacatgagaatcgatgcgtcgctttggagcgctgtccgtgctttcaccagggtaaagaatatgctcctggtgagaccgtcaagatcggctgcaatacctgcgtgtgccaggacagaaagtggaactgcaccgatcatgtgtgtgatgccacctgctcgaccattggaatggcccattatctgacgtttgatggactgaaatacctgttcccgggggaatgtcagtatgtgctcgtgcaggactattgtggttccaatcctgggactttcaggattcttgttggaaataagggctgcagccacccaagtgtgaagtgtaaaaagcgcgtgactatccttgtggagggaggcgagatcgaactctttgatggcgaagtgaacgtcaagaggcccatgaaggatgagacgcacttcgaggttgtcgagagcggacgctacataatcctgctgctggggaaagcccttagtgtggtgtgggatcgccacctcagtatttctgttgtactcaaacaaacgtaccaggaaaaggtctgcgggttgtgtggtaacttcgacgggattcagaataatgatttgacaagttctaaccttcaggtagaggaggacccagtagactttggaaatagttggaaagtaagctctcagtgcgctgacacaagaaaggtgcctttggattccagcccagctacatgccataacaatatcatgaagcaaaccatggtggattcttcctgtcgaatcctaacgagtgatgtcttccaggattgcaataagctggttgatccagagccttacctggacgtgtgcatctacgacacatgttcttgcgagagtataggcgattgtgcctgtttctgcgatacaattgccgcttatgcccacgtgtgcgcccagcacggtaaggtggtgacttggcgaacagccaccttgtgtccacagtcttgtgaggagaggaatctccgcgaaaatggctatgagtgcgagtggcgatacaattcttgtgcgccggcctgccaggtgacttgccagcacccagagcccttggcatgtcccgtgcagtgcgtagagggttgccatgcccactgtccccccggcaaaatactggatgagttgcttcagacatgtgtagatccagaggattgtccagtgtgcgaagtggctggcaggcgatttgcctcaggaaaaaaggtgacattgaatccctccgatcctgagcattgccagatctgccactgcgatgttgtcaacttgacctgcgaggcatgtcaagagcccggcggcctagtggtccctcccactgatgccccagtctctccaacgaccctgtatgtggaggatatatcagagccccctcttcacgacttttattgctctaggctgctcgacctcgtgtttctgcttgacggatcaagccggctgagcgaagccgagtttgaggttttgaaagccttcgtcgtagacatgatggagcgtctgcgaatcagccagaaatgggttcgtgtagcagtcgtggagtaccacgacggcagccacgcatacattggcctgaaggatcggaaacggccatcagaactgcggaggatagcatctcaagtgaaatacgctgggtcacaagtggcaagtacatccgaggtgcttaaatataccctgttccaaatcttttcaaaaattgatcggcccgaagcctctcgcattaccctcctcctgatggcttcacaggagccccaaagaatgtctaggaattttgttagatacgtgcaaggcctgaaaaagaagaaggtcatagtcatacccgtcggcatcggtccccacgcgaacttaaagcagatccggctgattgaaaagcaggcccctgaaaataaggcgttcgttctgtccagtgtcgacgagttggaacaacagcgagacgaaatagtgagctacctatgcgatctggccccagaagccccgccaccaactctcccaccagacatggcgcaagttactgttggccccggcttgctgggcgtgtctaccctggggcctaagaggaattctatggtccttgatgttgcctttgttcttgaagggtctgacaagatcggggaggccgattttaaccgatctaaggaattcatggaagaggtgatccagcgaatggacgtggggcaggactcaatccacgtcaccgtgctgcaatacagctacatggttaccgtggaatatcccttttctgaggcccagtctaagggtgatattctccagcgggttcgagagattcgctaccaagggggtaaccgcacaaacacaggcttggccttgagatatctgtcagatcattcgttcctggtatcccagggagacagagaacaggccccaaatctggtgtacatggttacgggcaacccggccagcgatgaaataaagcgattacctggtgacatccaggtcgtcccaattggcgtgggtccaaatgcaaacgtgcaggaacttgagcggataggatggccgaacgcgcccatacttatccaggatttcgaaaccctgcctcgggaagcacccgatctggtcttacagcggtgctgctctggagagggcctgcagattccaacactttcccctgcaccagattgtagtcagccgctcgatgtaattcttctgctcgatggatcatcaagtttcccagcatcgtactttgacgaaatgaaaagcttcgccaaggcatttatttccaaggcaaacatcggccctaggctcacgcaggtgtccgtgctccagtatgggtctatcaccactatcgacgttccttggaacgtagtgccagaaaaagcccatctgctgagcctggttgacgtcatgcagcgggagggaggcccctctcagatcggggatgccctggggttcgcagtgagatacttgacgtccgagatgcatggcgccaggccaggggctagtaaagctgtggtcatcttagtgactgacgtgtctgtagattccgtggatgccgctgccgacgcagcgagatccaatagggtgaccgtttttcccatcggtataggtgatcgctatgacgcggcccagctccgcatcttggccgggcccgccggggactccaatgtggttaaactgcagcgaattgaggacctgccaacgatggtgaccttaggtaactcttttctgcataaactatgctctgggtttgttaggatatgtatggatgaagatggaaatgagaagagaccaggcgacgtttggaccctgccagaccagtgtcacacagtcacatgccagccagatgggcagacactactgaagtcccacagagtgaattgcgacagaggtctgcggccgagctgcccaaactcccaatcccccgtcaaagtggaagagacatgtggttgtagatggacctgtccatgcgtttgtactggatcttctacacgccatatcgtgacgtttgatgggcagaatttcaagcttaccggtagctgctcttatgttctgttccagaacaaggaacaggacctggaagtaatactccacaatggagcctgtagtcccggcgcacggcagggatgtatgaaatccatcgaggttaaacattctgctctttcagtggaattacactctgatatggaggtcaccgtgaacgggaggctggtttccgtcccttatgtcggcggaaatatggaggtgaacgtctacggtgctatcatgcacgaggtacggtttaatcacctgggccacatatttaccttcaccccacagaataacgagttccagctgcagctctccccaaaaacgttcgcaagcaagacttacggactctgcggcatctgcgacgagaacggcgcaaatgacttcatgttgcgtgacggcactgtgactaccgattggaaaactctcgtccaggaatggaccgttcagcgacctgggcagacttgccagccgatcctggaggagcagtgcttggtcccggattcttctcactgccaggtgctgctgctgcctctgtttgcagagtgccacaaggttcttgcccctgccactttctatgcgatatgccagcaggactcatgccaccaggaacaggtgtgcgaggtcattgcaagctacgctcatctgtgcagaacgaatggcgtatgcgtcgattggcggactcctgatttctgtgcgatgagctgtcccccttctctggtgtataaccactgtgagcacggatgtccaagacactgcgatggcaacgtttctagttgcggcgatcacccctctgaagggtgcttctgtcctccagataaggtcatgttggagggatcctgtgtacccgaagaggcctgcactcagtgtattggggaagacggggtccagcatcagtttctcgaagcttgggtccccgatcaccagccttgccagatatgtacttgtctgtctggtcggaaggtgaattgtacaactcagccatgccctacggccaaagcaccaacctgtgggctttgcgaggtagcaaggttgcgtcaaaacgctgatcagtgttgtccagaatacgaatgcgtttgcgacccggtttcctgcgacctgccgccggtgccacactgcgagcggggcctgcagcctactcttactaaccctggtgaatgccggcctaactttacctgtgcatgtaggaaagaagaatgcaagcgcgtgtcgcctccatcatgcccaccacatcggttgccaaccctacgcaaaacccagtgctgcgatgagtacgaatgcgcatgtaattgtgtcaacagcaccgttagttgtccactaggatacctcgccagcaccgctaccaatgattgtggatgtacgacgaccacctgtctgccagataaagtctgcgttcaccggtcaaccatttatcccgttggacaattttgggaggagggatgtgatgtatgcacatgcacggatatggaagatgccgtaatgggcctacgggtggcacagtgctctcagaagccatgtgaggatagctgccgctcgggattcacctacgttctgcacgaaggtgaatgctgtggtcgctgcttgccatcggcatgtgaggtggtgaccggatccccccgtggtgatagccagagtagctggaaaagtgtgggcagccagtgggcgagtccagaaaacccatgtctcatcaacgaatgtgttcgcgtaaaagaggaggtcttcattcagcaacgaaacgtgtcctgccctcagctggaagtgcctgtctgtccgtctggctttcagcttagctgtaaaacatccgcctgctgtcctagctgtcgctgtgagagaatggaggcttgcatgctgaacggcaccgtcattggacccggcaagactgtgatgatcgacgtatgtactacctgtcgctgcatggtgcaagtaggggtaatctctgggttcaaactggaatgcagaaagacgacttgtaacccctgtcctctgggctacaaggaggagaataatacaggtgagtgttgcggcaggtgtttacccaccgcttgtacaatccagctacgtgggggccaaatcatgaccctcaagcgggatgagacccttcaggatgggtgcgatacccacttttgtaaggtcaacgaacggggcgagtatttctgggagaagagagttactggatgtccacccttcgacgaacataagtgcctggccgaaggcggcaagattatgaagattcctgggacatgctgcgatacatgtgaggaacccgaatgtaacgacatcacagcaagactgcagtatgtgaaagtggggagctgtaagagtgaggtggaggtggatattcattactgccagggcaaatgcgccagcaaagccatgtacagtatcgatataaacgatgtgcaggatcagtgcagctgctgttctcctacaagaaccgagccaatgcaggttgcgctacattgcactaacggcagtgttgtctatcacgaagtgctgaacgcaatggagtgtaaatgttctcctaggaaatgtagtaag

SEQ ID NO: 12558 - DNA, 8439 bp, Artificial Sequence
  derived and/or modified sequence
atgatcccggctcggttcgcaggggtgcttctcgctctggcactgatcctccccggcactctgtgcgctgagggaacgcggggcagaagttcgacggctcgctgctcgttgtttggctcggactttgtgaacacttttgatggaagcatgtattccttcgccggatactgctcgtacctcctcgcgggaggatgccaaaagcgctccttttcaatcatcggcgacttccagaatggaaaacgcgtctcgctcagcgtctacctcggagagttcttcgatatccacctcttcgtgaacggcacggtcacccaaggtgaccaacgcgtgagcatgccgtacgcctcaaagggcctttacttggagactgaggctggatactacaaactgtccggcgaggcttacggattcgtggcccgaattgacggctctggtaatttccaggtgctgctctctgaccggtacttcaataagacctgcggtctttgcggaaacttcaacatctttgccgaagatgacttcatgactcaggaaggcaccctcaccagcgacccttacgatttcgccaacagctgggccctttcctccggcgaacaatggtgcgagagggcctcacctccatcctcatcatgcaatatctcctccggtgagatgcaaaaaggcctgtgggagcagtgtcagctgcttaagtcgacctcggtctttgcgcgatgccacccgctggtggacccagagccgttcgtggcactgtgcgaaaagactctctgtgaatgtgcgggcggattggaatgtgcctgcccggccctgctggaatacgcgcgcacttgcgctcaggagggaatggtgctctacggatggaccgaccattcagcgtgctcaccagtgtgcccggcgggaatggagtacagacagtgcgttagcccatgcgcccgcacctgccaaagccttcacatcaatgagatgtgccaggagagatgcgtcgacgggtgcagctgtccggaaggacagctcctggacgaaggactctgcgtggagagcaccgaatgcccttgcgtgcattccggaaagcggtaccctcctgggactagcttgtctcgcgattgcaacacttgcatctgccgcaactcgcagtggatctgctccaacgaagagtgcccaggagagtgcctggtgactggacagtcacatttcaaatcgttcgacaatagatactttaccttttccggcatctgccagtacctcctcgcccgggactgtcaggaccactccttctctatcgtgattgaaactgtgcaatgtgccgacgaccgagacgcggtctgtacccgcagcgtgactgttcgcctgccaggcctgcacaacagcctggtgaaactgaagcacggtgcaggtgtggctatggatgggcaggatgtgcaactccccctcctcaagggagatttgagaatccagcatactgtgacggcatcggtgagactgagctacggcgaggacttgcagatggactgggacgggcgcggccgactgctggtgaagctctcgccagtgtacgcaggaaaaacttgtggcctgtgcggaaactacaacggcaaccagggggacgacttcctcaccccgtcaggactggcagagccccgcgttgaggacttcgggaatgcgtggaagctgcacggcgattgccaggatttgcagaaacagcactcagacccctgcgctctcaaccccaggatgactcggttttcagaagaagcgtgcgccgtcctcacttcgcccaccttcgaagcatgccatagggccgtgtcgccactcccatacctgcgcaattgccgctacgatgtgtgtagctgctcagacggaagagagtgtctgtgcggcgcccttgcgtcatacgctgcagcctgcgcaggacggggagtgagagtcgcctggagagaacctggcagatgtgaactgaattgtccaaagggccaagtctacctccagtgcggaaccccgtgcaatctgacttgcaggagcttgtcctacccggacgaggagtgcaacgaagcatgcctggagggatgcttttgtcccccggggctgtacatggatgaacgcggagactgcgtgccgaaggcccagtgcccgtgttactacgacggagagatattccaaccagaggacattttctcggaccaccataccatgtgctactgcgaggacggcttcatgcattgtaccatgagcggagtcccgggctcgctcttgccagacgccgtgctgtcctccccactgtcccacaggtcgaagcggtcgctgtcgtgtcgcccgccgatggtcaaactggtgtgcccggctgataacctgcgggcggaaggcctggagtgcactaaaacgtgtcaaaattacgatctggaatgtatgtcgatgggatgcgtctcgggatgcctgtgcccgccgggaatggtgcgacacgagaaccgctgcgtggcgttggaacgctgcccttgtttccaccaaggcaaggaatacgcaccaggagaaaccgtcaaaatcggatgtaacacttgtgtctgccaggatcgcaagtggaactgcaccgaccacgtctgcgacgccacgtgctcgactatcggaatggcccactacctcaccttcgacggactcaagtatctgttcccgggggagtgtcagtacgtgctggtgcaagactattgtggatccaaccctggaactttccggatcctggtcggcaacaaaggatgttcacacccatcggttaaatgcaagaaacgggtgacgatcctggtggagggcggagaaatcgaactgttcgatggtgaggtcaatgtgaagcggccgatgaaagatgaaacccattttgaagtcgtggagtcgggacggtacatcatcctgctgcttggcaaggcattgagcgtggtatgggacagacacctctcaatcagcgtggtgctgaagcagacctaccaggagaaggtgtgtggcctgtgcggcaactttgatggtatccagaacaacgatctgactagttcgaatcttcaggtggaggaagatcctgtcgattttggtaactcgtggaaagtgtcatcacaatgcgccgacactcgcaaggtgcctctggattcgtccccggccacttgccataataacattatgaagcaaactatggtggacagtagctgcaggatactcacctccgatgtctttcaggattgcaacaagctggtcgatcccgaaccgtacctcgatgtgtgtatctacgacacctgctcctgcgagtccattggggactgtgcatgtttctgcgataccattgctgcttacgcacatgtctgcgctcagcacgggaaggtggtcacttggcgcaccgccactctgtgcccacagagctgcgaggaacgcaacctgcgggaaaacggatacgaatgcgaatggcgctataacagctgcgctccggcctgccaggtgacttgccaacaccctgaaccactggcgtgcccggtgcaatgcgtggagggatgtcatgcccattgccccccgggtaagatccttgacgaactgctccagacctgcgttgacccggaagattgccccgtttgcgaagtggcagggcggagattcgcctccggtaagaaggtgactctgaacccgtcagacccagaacactgccagatttgtcattgcgatgtggtcaatctgacctgcgaagcgtgccaggaaccaggcgggctcgtggtcccacctaccgatgccccggtgtccccgaccaccctgtatgtggaggacatctctgagcctccgctccacgatttctactgctcaagactgctggatcttgtgttcctgttggacggatcatcccgcctgtcggaggcggagttcgaggtgttgaaggcttttgtcgtcgatatgatggaaaggctgagaatttcccaaaagtgggtgcgcgtggcagtggtcgaataccacgacggatcgcacgcgtatatcggactcaaggatagaaagaggccgtccgagctgcggcgtattgcctcccaggtgaagtacgccggatctcaggtggcctccacctcggaagtcctgaagtacaccttgtttcaaatcttcagcaagattgacagacctgaggcatcccggatcaccctgctgctcatggcttcacaggaaccgcaacggatgtcgcggaacttcgtgcggtacgtgcaaggactgaagaagaagaaggtgattgtaattccagtgggaattgggcctcatgcaaatctcaagcaaattcgcttgatcgagaagcaggcaccagagaacaaagcgttcgtgctctcgtcggttgacgagctggaacagcagcgcgatgaaatcgtgtcctacctctgtgacttggccccggaggccccgcccccgactctcccgccggatatggctcaggtcaccgtgggccctggccttctgggagtttcaactctgggacctaagcggaacagcatggtgctcgacgtggcctttgtgctggaggggtcagataagatcggagaagcggatttcaaccggtctaaggaattcatggaagaagtgatccagcggatggacgtcgggcaagactcgatccacgtgactgtgctccagtactcctacatggtcaccgtggagtaccccttctcagaagcacagtcgaagggagacatcctccagcgcgtgcgcgaaatcagataccagggaggcaatcggaccaacactggactggcactccggtacctgtccgaccactcattcctggtgtcccagggcgaccgcgaacaggcgcccaacctggtctacatggtgacgggaaaccctgcctccgatgaaatcaagcgactgccgggagatatccaagtggtcccgatcggcgttgggcctaacgccaacgtgcaggagctggagcgcatcggttggcctaatgccccgatcttgatccaggacttcgaaacgctcccgcgcgaagctcctgatctggtgctgcaacggtgttgctcaggggagggcctgcagatcccaacgctgtccccggcaccagactgctcccagcctctggatgttatcttgctgctggacggttcctccagcttcccagcgagctacttcgacgaaatgaagagcttcgccaaagcattcatctccaaggcgaacatcggacctcggcttacgcaagtgtcagtgctccagtacggttccatcaccaccatcgatgtcccgtggaacgtggtcccggagaaagctcatctgttgtcacttgtggatgtcatgcagcgggagggaggtcccagccagattggtgacgcccttggatttgccgtcagatacctgaccagcgagatgcatggagccaggccgggggccagcaaggctgttgtcatcctggtgactgacgtatccgtcgactccgtggacgccgccgccgacgccgctcggagcaatagggtgaccgtgttccccatcggtatcggtgacagatacgatgcagcccagctgagaattctcgctgggccggccggagactctaacgtagtgaagctccaacgaatcgaggatctgcccacgatggtcaccctcggaaattcatttctccataagctctgctcaggattcgtcagaatctgcatggacgaagatggaaacgagaaaagacccggagatgtctggactctcccagaccaatgtcacactgttacttgtcaaccggatggacagaccctgcttaaatcacatcgggtgaactgtgatcgggggctgaggccaagctgcccgaatagccagtcgccggtcaaggtggaagagacttgcggatgccgttggacctgcccttgcgtgtgcacgggcagctcaacccgccatatcgtcacgttcgacggccaaaacttcaaactcactggctcgtgctcctatgtgcttttccaaaataaagaacaagacctggaggtgattctgcataatggagcctgctcaccaggagcaaggcaaggatgtatgaagtccatcgaggtcaagcattcggccctgagcgtcgagttgcattcggatatggaggtgactgtgaacggacgcctcgtgtccgtgccatacgtcggcggaaacatggaggtgaacgtgtacggcgcgatcatgcacgaagtcaggtttaatcacctgggtcatatcttcaccttcacccctcaaaacaatgagttccaactccagttgagccctaagacttttgcctccaaaacctacgggctctgcgggatctgcgacgaaaatggagcgaatgactttatgttgcgcgacggaaccgtgaccaccgactggaaaaccctggtccaagaatggactgtgcaacgcccgggacagacctgccaaccaatccttgaagaacaatgcctggtgcccgacagctcgcactgccaggtgttgctgcttcccctgtttgcggaatgtcacaaggtcctggcgcccgccacgttctacgcaatctgccagcaggactcgtgtcaccaagaacaggtgtgtgaggtgatcgcgtcgtacgcccacttgtgccgcaccaacggggtgtgtgtggactggcgtactccagacttttgcgctatgtcgtgcccgccgagcctggtctacaaccactgcgaacacggctgcccgcggcactgcgacggaaatgtgagctcgtgcggggatcacccgtcagaagggtgcttctgcccgccggacaaggtcatgctggaaggatcctgcgttccagaggaggcttgtacgcaatgcatcggagaagatggagtgcagcaccagttcctcgaagcatgggtgccggatcatcagccatgtcagatctgcacgtgtcttagcggacgcaaggtgaactgcaccactcaaccttgcccgactgcgaaggccccaacttgcggactgtgcgaagttgcgcggttgagacagaacgcggaccaatgttgccccgaatacgagtgcgtgtgcgacccagtctcgtgtgacctgccgccagtgccacactgtgaacgcggacttcagccgactcttactaaccccggtgaatgcagaccaaatttcacctgcgcgtgccggaaggaggaatgcaaacgcgtgagtccgccgagctgcccaccacatcgcctccctaccctccgcaagacccagtgctgtgatgagtacgaatgcgcatgtaattgcgtgaacagcaccgtctcctgcccgctggggtacctggcgtcgaccgcgactaacgattgcggatgcactactactacgtgcctcccggataaggtctgcgtgcacagatcgactatctaccctgtgggacaattctgggaggaaggatgcgacgtgtgtacctgcaccgacatggaggacgcggtcatgggcctgagggtggcgcaatgctcccaaaaaccgtgcgaggacagctgccgctcaggatttacttacgtgctgcacgaaggagagtgttgcggacgttgccttccttccgcctgtgaagtggtcaccggttcaccgaggggcgacagccaatcgtcttggaaatcggtggggtcccagtgggcgtccccggaaaacccttgcctgatcaatgaatgcgtcagggtcaaggaagaagtgttcatccaacagcggaatgtctcgtgcccacagctggaagtcccagtctgcccgtcaggattccagctgtcctgtaagactagcgcctgctgtccatcgtgcagatgcgaacggatggaagcctgcatgctcaatggtaccgtcatcggacctggaaagaccgtgatgatcgatgtctgcaccacctgtcggtgcatggtgcaggtgggcgttattagcgggttcaagctcgagtgccggaaaaccacttgcaacccatgccctctgggttacaaggaagagaacaatactggggaatgttgtggaagatgtctgccgactgcctgtaccattcagctccggggtggacagatcatgactctcaagagggacgaaaccctccaggatggctgcgatacccacttctgcaaggttaacgaacgcggcgagtatttctgggagaaacgggtgaccggctgcccgccgttcgatgaacacaaatgcctggcagaagggggaaagatcatgaagatcccgggcacctgttgcgatacttgcgaagagcctgaatgtaatgacatcactgcacgcctgcagtacgtgaaggtgggtagctgtaaatccgaagtggaggtggacatccattattgccagggtaaatgtgcctcgaaggccatgtactcgatcgacatcaatgatgtgcaggaccaatgctcgtgttgttcgccaacccgcactgagcccatgcaggtcgctctgcactgtaccaatggatcggtggtgtaccatgaagtgctgaacgcgatggaatgcaaatgctcgccgagaaaatgctcaaag

SEQ ID NO: 12559 - DNA, 8439 bp, Artificial Sequence
  derived and/or modified sequence
atgatcccggccaggttcgccggggtgctgcttgcacttgccctgatattaccggggacgctttgcgcagaagggacccgcggacgatcatctactgccagatgctctctgttcggcagtgacttcgttaacacattcgacgggagcatgtactcctttgccgggtattgttcctatcttctggctgggggatgccaaaagcgcagctttagcattattggtgattttcaaaatggaaagcgcgtcagcctgagtgtctacctgggcgaattcttcgacatacatctgtttgtcaacgggacagtcacccaaggtgatcagcgcgtcagcatgccatacgccagcaaggggctgtaccttgaaactgaagcgggatactacaaactgagtggtgaggcttatggatttgtggcccggattgacggctccggaaattttcaggtactgttatcggaccggtactttaataagacttgcggcttgtgtggcaatttcaacattttcgctgaggacgacttcatgacacaagaggggactctgacttcagacccctacgacttcgccaattcttgggccctttcctccggtgagcagtggtgcgagagggccagtccaccctccagctcctgcaatatcagctccggcgagatgcaaaaagggctttgggagcagtgtcaactactaaagagtacctccgtgttcgctaggtgccatcccctggtggatccagaaccatttgttgcactgtgtgaaaaaaccctgtgtgagtgcgctggaggattggagtgtgcctgtccagccctgctggagtatgcccgtacctgcgctcaggaagggatggtgttgtacggctggacagatcacagtgcctgcagtcccgtgtgcccagccggtatggagtaccgacagtgtgtgagcccctgcgcacgaacctgccagtcactacatattaatgagatgtgccaggagaggtgcgtggacggctgtagctgcccagagggccaactgctggatgaaggactttgcgtagagagcaccgagtgtccttgcgtgcactcaggtaaaagataccctccaggcactagtttgtcacgagactgtaatacatgcatatgtcgtaattctcagtggatttgttccaatgaggagtgccccggcgagtgcctggtcaccggccagtctcactttaagtccttcgataatcgttacttcacttttagcggaatctgccagtaccttctggctcgcgattgtcaggatcacagcttttcaattgtgattgagactgttcagtgcgctgacgatagggacgctgtgtgcacacggagtgttacagtacgattgcctggactccacaatagtctggtcaaacttaagcacggggcaggagttgctatggacggacaggacgtgcagttgcccttactcaaaggggatctaaggatccaacacacggtgactgcctctgtgcggctttcctatggtgaagacctccagatggattgggacggacgggggcgtctcctggtaaaactgagccccgtttatgccggcaaaacttgcggcttgtgcggaaattacaatggtaaccagggcgacgacttcttgacaccttctggtcttgccgagccccgcgtggaggactttggcaatgcatggaagttgcacggcgattgccaggatttacaaaagcagcactcagatccatgcgcactgaaccccaggatgacaaggttcagcgaggaagcctgcgccgtgcttacctctcctacttttgaggcctgtcaccgcgcagtctccccacttccttacctcagaaactgccggtacgatgtttgctcctgctcagatggtcgggagtgtctgtgcggtgctctggccagctacgcagcagcatgtgccggccgcggagtgagggtagcatggcgggaacccggcaggtgcgaacttaattgtccaaaggggcaggtgtacttgcaatgtggcacaccttgcaacttaacctgtcggtcactgtcatatccagacgaggagtgcaacgaggcatgtcttgaagggtgcttttgcccccctgggctctatatggatgagcggggggactgtgtccccaaggctcagtgcccatgttattacgatggagagatatttcagccagaggatattttttccgatcatcacacaatgtgttactgtgaggatggctttatgcactgcacaatgtccggcgtgccgggctccctgctccccgatgccgtgctgtcctcgcctcttagccaccgtagcaagcggtcactgtcgtgtcggcctcccatggttaaactggtttgtcctgcagacaatttgcgggccgagggtttggagtgcactaaaacttgccagaattacgatttggaatgtatgtccatgggctgcgtaagcggctgtctttgcccgcctggaatggtcagacatgagaaccgatgcgttgcactggaacgatgtccgtgcttccaccagggcaaggagtatgctcccggcgagaccgtcaagataggctgcaatacatgtgtgtgccaggaccgaaaatggaattgcactgaccatgtgtgcgacgccacatgttctaccataggaatggctcactacctgacattcgacggcttaaaatacctttttcctggcgaatgtcagtacgtcctggtgcaggactattgcggctccaaccccgggacgttcagaatcctagtgggcaacaagggatgtagccatccaagtgtgaagtgcaaaaaacgagtgacaatactcgtggagggtggtgagatagagctgtttgacggcgaggtgaatgtgaagcgcccaatgaaagacgagacacatttcgaggtggtcgaaagtggtcggtatataattttgcttttaggcaaggctttatcagttgtttgggacaggcacctctctatctccgtggtgcttaagcagacataccaggagaaagtttgtgggctatgcggtaattttgacgggattcaaaacaacgacttgacctcctccaaccttcaggtggaagaggatcccgtcgatttcggcaatagttggaaagtgtcatcacagtgcgcggacacccgtaaggtgccattggacagtagtcctgctacatgtcacaataatattatgaagcagaccatggtggattctagctgcaggatcctgacctcggacgtatttcaagactgtaacaaactggtagatcctgagccttatctcgacgtgtgtatatacgacacctgcagctgtgagtctatcggtgactgtgcatgcttctgtgatacaatcgccgcctacgcccatgtatgcgcccagcatggcaaagtcgtcacttggcggaccgcgactctgtgtcctcagtcctgcgaggagcggaacctgagggagaacgggtatgaatgtgagtggaggtacaattcatgcgctcctgcatgccaagtcacctgccaacatccagagcccctcgcctgtcccgtccaatgtgtggagggttgccatgctcattgccctcccggcaaaatcctcgatgagctgcttcagacctgcgtagacccggaagactgtcccgtgtgtgaagtggctggtagaagatttgcatctggaaaaaaggtgaccttaaaccctagcgacccggaacactgccaaatttgccactgcgatgttgtaaacttgacgtgtgaagcctgccaggaaccgggaggcttggttgtcccccccacagatgctcctgtgtctccaactaccttgtatgtagaagacatctccgagcctccactgcacgacttttactgttcgcgccttctggatctggtctttctgctcgatggcagctcccggctctccgaggctgagtttgaggtgctgaaggcatttgtggtcgacatgatggaaaggctgcggatcagccaaaagtgggtgagggtagcggtcgtagagtatcacgacggatcacacgcctatattggtctgaaggatcgtaaaaggccctctgagctgcgtcgcattgcctctcaggtgaagtacgccggatcgcaggtcgccagcacctctgaggtcctgaagtatacgctctttcagatcttctccaagattgacagacccgaggccagtcgtataactctattgctcatggcatcccaagagccacagagaatgagccggaactttgttagatacgtgcaggggctcaaaaagaagaaggtgatagtaattccagtgggaatcggcccccacgccaatctgaagcagatcagactgatcgagaagcaggcgccagaaaacaaagctttcgtcctgagctctgtggacgaactggagcagcagcgcgatgagatcgtgagttacctgtgtgatttggccccagaggcccctccccctacactgcctcctgatatggcccaggtaactgtgggccccggactgttgggtgtgtccaccctgggccccaagcggaatagtatggtgctagacgtggcttttgtgctggaaggatccgacaaaatcggagaagccgatttcaaccgctctaaagaatttatggaagaggtgattcagcgaatggatgttggccaagacagtattcatgtcaccgtcctgcagtacagttacatggtgaccgtggaatacccattttctgaggcacagtcgaaaggcgatattctgcagcgggttcgcgagatccgatatcagggcggaaatcgcactaataccggactagccctcaggtacctgagtgaccacagcttcctagttagccaaggcgacagagaacaggctcctaatctagtctacatggtgacaggcaacccagcatctgatgagatcaaacgcctgcccggggatatccaggtggtgcctatcggagtgggacccaatgctaatgttcaagagctggagcgtatcggatggccgaacgcgccaatcctgattcaggattttgaaactttgcccagggaagccccagatttagttctccaacgctgttgctctggggagggcttgcagatccccactctgtctccggcccctgattgctcacagccactggacgtaatactcttgctcgacggaagctccagcttccctgcttcctattttgacgagatgaagtcgttcgctaaagcctttatttcaaaggccaacattggcccaagactgactcaggtctctgtgctgcagtatggctccattactactattgacgtgccctggaatgtcgtccccgagaaggctcatcttttgtcgctggtggacgttatgcaaagggaggggggacccagccagataggggacgccctgggctttgccgtcagatacttgacaagcgaaatgcacggggcacggcccggagcatctaaagccgtagtgatcttggtcacagacgtatcagtggactctgttgacgctgcagcagatgcagcacggtcaaatagagtgacagtcttcccaattggcataggcgaccgatacgatgccgcgcagcttcggatcctggccggaccagccggcgatagcaatgttgttaagctgcaaaggatcgaagaccttcccactatggtcaccttaggcaattcgttcctgcacaaactgtgcagcggctttgtgcggatttgcatggacgaagatggcaatgaaaaacggcctggcgatgtctggactttgccagatcagtgtcacacagtgacatgccagccggacggacaaacactgctgaaaagccaccgcgtaaattgtgacagaggactgcggcccagttgccctaactcccagtccccggtcaaggtggaagaaacatgcggatgtcgctggacatgcccctgtgtgtgcactggcagttccacaagacacattgtgacattcgacgggcagaattttaagcttacgggtagctgctcatacgtcctctttcagaacaaggagcaggacctcgaggtgatacttcataacggggcatgttctcccggtgccagacagggatgtatgaagtccatcgaggtgaaacactctgctttgtccgttgagctgcacagcgatatggaagtgacagtgaatggcagactggttagcgtcccgtatgtcggggggaacatggaggtaaatgtgtatggcgccattatgcacgaggttaggtttaatcacctgggccatatattcacattcaccccgcagaacaatgagttccagctccagctcagccccaagaccttcgcttctaagacatacggtctatgtggtatttgtgacgagaatggagcaaacgacttcatgttgcgggatggaaccgtcaccactgattggaagacattggtacaagaatggaccgttcagcggccaggccagacatgtcagcccatcctagaggaacaatgcctagttcccgattctagtcactgtcaggtccttttgctaccacttttcgccgaatgtcacaaagtgttagcccctgctaccttttatgccatatgtcagcaggattcctgccaccaagagcaggtgtgtgaagtgattgcttcctatgcccatctatgtcgcacaaatggagtgtgcgtcgactggcgaacccccgatttttgcgctatgtcttgtccaccatcgctcgtatataatcattgtgagcatggatgccctcgacactgcgacgggaacgtcagctcatgcggcgatcaccctagtgaggggtgcttctgccccccagacaaggtaatgctggaggggtcttgtgtgcccgaggaagcttgtacgcaatgtataggggaggatggcgtccagcaccagtttctcgaagcatgggttcccgatcatcagccttgccagatatgcacgtgcttgtctggccgaaaggttaactgtactacacaaccctgccctacagcaaaggctcccacatgtgggctctgcgaagttgctcgattacggcagaatgctgaccagtgctgcccagagtatgagtgcgtgtgtgacccggtgtcatgtgatttaccccccgtgcctcattgtgaacgaggtcttcagcctaccctgaccaaccccggtgagtgtagacccaacttcacctgcgcatgtagaaaagaagagtgtaagcgggtgtccccccctagttgccctcctcaccgcctgccaacactgcgcaagacacaatgttgcgacgaatacgaatgcgcctgcaactgtgtaaattctacagtcagctgcccgctgggctacctggcgtccactgcaacaaacgactgcggctgcaccactacaacgtgtttgcctgacaaagtgtgcgttcacagatccaccatctatcctgttggtcagttttgggaggagggttgtgacgtgtgtacctgtacagacatggaggacgctgtgatgggcttgcgagtggctcaatgcagtcaaaaaccttgtgaggacagctgtcgctccggattcacctacgtgctgcacgagggcgagtgttgcggccgctgcctcccctcagcatgtgaagtagtcactggctcaccaaggggcgacagccagtcttcttggaagagtgttggctcacagtgggcatcgcctgagaacccctgtctcattaacgaatgcgttagagtcaaggaggaagtcttcattcagcagaggaatgtgtcttgtccccaactggaagtccctgtgtgcccaagtggttttcagttgagctgtaagacctcagcctgctgtccttcttgtcgctgcgaacgcatggaagcctgtatgctcaatggcaccgtgataggcccaggcaagaccgtcatgattgatgtgtgtaccacctgtagatgtatggtccaggtgggagtcatctcaggcttcaagttagaatgcaggaaaactacctgtaacccctgtcccctaggttataaggaagaaaacaacacgggagaatgctgcggccgttgtctccctacagcatgtacgatacagctgagggggggccagatcatgacactaaagcgcgacgagacgctacaggacggctgtgacacgcatttttgtaaggtgaacgagcgcggggaatatttttgggaaaaacgagtgacaggttgtcctcctttcgacgaacataagtgcctggcggagggcggaaaaataatgaaaattccggggacctgctgtgatacctgcgaagaaccagagtgcaacgatataactgcccgcctccagtatgtaaaggtgggctcttgcaagtccgaggttgaagtcgacatccactactgccaaggaaagtgcgcatccaaagccatgtacagtatcgatattaacgacgtccaggaccagtgcagctgttgctctccgacccgcaccgagcccatgcaagtcgctctccactgtacaaatggcagcgtggtgtaccacgaagtgctcaatgccatggagtgtaaatgctcccccagaaaatgttccaaa

SEQ ID NO: 12560 - DNA, 8439 bp, Artificial Sequence
  derived and/or modified sequence
atgatccccgcaagattcgccggggtccttctcgcactcgcgctcattctgcccggcactctatgcgccgaggggacccgaggtcggtcgtcaaccgcccgttgttcgctctttggctccgattttgtaaatacgttcgacggcagcatgtattcctttgcaggctactgttcttaccttctcgctggcggctgccagaagcgtagtttcagtatcataggagatttccagaatgggaagcgcgtctccctttccgtgtatctcggcgaattcttcgacatccacctgtttgtaaacggtacagtgacccagggcgaccagcgagtttctatgccttatgcaagtaaagggttgtacttagagaccgaagccgggtactacaagctttccggggaggcttacggatttgtagccaggatcgatggctccggcaatttccaggttctactgagcgacaggtacttcaacaagacttgtgggttgtgtgggaattttaacatattcgccgaggatgacttcatgactcaggaggggaccctgacaagtgacccttatgacttcgcaaattcctgggcactgtcatccggagagcaatggtgtgagagagcatctccccctagctcatcttgtaatatatcgagtggggagatgcagaaaggattgtgggagcaatgccaactgctgaaatctaccagcgtgtttgccagatgccacccgctcgtagaccctgagccattcgtggccctgtgtgagaagactctctgcgaatgtgcaggcgggctcgagtgcgcctgccccgctttgctcgaatatgcacggacctgcgcccaggaaggcatggtgctgtacggctggacagaccactcggcctgttccccagtgtgcccagccggcatggagtacaggcagtgtgtaagtccttgcgcaaggacttgccaaagcctgcacattaacgagatgtgccaggagagatgtgtcgatggatgctcatgccccgagggtcaactgttggacgagggactctgtgttgaatctacggagtgtccatgcgtacacagcggaaaaaggtatccccccggcacttctctgagtagggattgtaatacttgcatctgccgaaattcccaatggatatgctctaacgaggaatgccctggtgagtgcctggttacgggccagagtcactttaaatctttcgataaccgttattttaccttctcggggatctgtcagtatctattagcacgagattgtcaggatcactccttcagtatagtaattgagacagtgcagtgcgctgacgatcgtgacgctgtatgtacccggtctgtcactgtcagactccctggccttcataatagcttagtgaagctcaagcacggcgccggggtagccatggacggccaagatgtgcagttgccccttctgaagggcgaccttcggatccagcacaccgtgactgccagcgtgcgtctgtcatatggagaagacttacagatggactgggacggacgtgggagactgctcgttaaattgtctcccgtctacgcaggaaagacatgcggcctctgtgggaactataatggaaatcagggcgacgactttttgacacctagcggcctggccgagccacgagttgaggactttgggaatgcctggaagctgcacggtgactgccaggatttgcaaaaacagcactctgatccctgcgctctgaatcctcggatgaccaggttctccgaagaggcatgtgctgtcctcacttcaccgacctttgaggcttgtcatagagctgtgtctccactcccttatctgaggaattgcagatatgacgtttgcagttgcagcgatggacgggagtgcctctgcggggccctggcttcctacgctgctgcctgcgccgggagaggcgtccgcgtggcgtggagagagccaggccgttgcgaactgaactgccctaaaggccaggtctaccttcaatgcgggacgccgtgcaacctgacttgtagatccctgtcttatcccgatgaggaatgcaatgaagcttgcttggaaggatgtttctgtcctcctggactgtatatggatgaaaggggcgattgtgtaccaaaggcccaatgcccttgttactacgacggagaaatttttcagccagaggatatcttctctgatcatcatactatgtgctattgtgaggacggattcatgcactgtacaatgtcaggagtgcctgggtccctgctgccagatgccgtcttatccagtcctctgtctcaccgtagcaaacgctccctatcctgcaggcctcccatggtaaagttggtctgtcccgcagataaccttcgagcagaaggtctcgagtgcacaaagacatgtcaaaactatgatttggaatgtatgagtatgggctgtgtaagtggctgtctctgcccacctggcatggtgagacacgagaaccgatgtgttgcattagagcggtgcccctgctttcaccagggcaaagagtatgcgccgggcgaaactgtgaagattggctgcaatacatgcgtatgccaggacaggaaatggaattgcacggatcatgtttgcgatgctacatgctcaactattggtatggcccattatttaaccttcgacggcttgaagtacttattcccgggggaatgtcagtacgttctggtgcaagattactgtggcagcaatccaggcacctttagaatccttgtggggaacaaaggatgcagtcatccatctgtgaaatgtaagaagcgcgtcacaatcctcgtcgagggtggcgaaatcgaacttttcgatggggaggtgaatgtcaagcgtccgatgaaagacgagacccacttcgaagtcgttgaatctggcagatacatcatccttctgctggggaaggctctatcagttgtgtgggatcgtcacctgtcaatctcagtggttctgaaacagacttaccaggagaaggtctgcggactgtgcggtaatttcgatggcatccagaacaacgatctcaccagcagtaatctccaagtggaggaggatcctgttgacttcggaaacagttggaaggtgagttctcagtgtgcagacactagaaaggtgcccctggattcttcccccgctacctgccacaacaatatcatgaagcaaaccatggtggacagctcttgtcggatcttaacttccgacgtgtttcaggattgtaataagctcgttgaccctgaaccttatctggacgtctgcatctatgatacctgcagctgcgaatctatcggggactgtgcttgtttttgtgacaccattgcggcctacgctcacgtatgcgctcagcacggcaaggtggtgacttggcgaactgctaccctatgtccacagagttgcgaggagcggaatctgagggaaaatgggtacgagtgtgaatggcggtacaattcttgtgcccctgcttgccaagtcacatgccagcatcccgagcctctggcctgccccgtgcagtgtgtcgagggctgccacgctcactgcccacccggtaagattcttgatgagctgctgcagacttgcgtcgaccctgaagactgtcctgtctgtgaagtcgcagggcgacggttcgcttccggaaaaaaagtgacacttaacccaagcgatcccgagcactgccaaatatgtcactgtgatgttgttaatctcacctgcgaggcctgtcaggaacctggtggactcgtggttccacccactgatgctcccgtatctcccacgactctgtacgtggaagacatcagcgagccgcccctccacgacttctattgctctagactgttagacctagtgtttctcctggacgggtcatcgcgactgtcagaggctgaatttgaggtgctgaaagcctttgtcgttgacatgatggagcggctgcgaatcagccagaaatgggtgcgggttgctgtggtggagtatcacgacggatctcatgcctatatcggcctcaaagatagaaaacggccgtcagagctgagaagaatcgctagtcaggtcaaatatgctgggagccaggtggcctctacctccgaggtgttgaaatacactctatttcagatcttcagcaaaatcgataggccagaggcgtcccgcattacactgttattgatggcttctcaggagccccagagaatgtccagaaatttcgttcgatatgtgcagggtctcaagaagaaaaaagtgatcgtgatccccgtgggcataggtccacacgcaaatcttaagcagattcgcctcattgagaaacaggctccggaaaataaagccttcgtcttgtccagcgtggacgagctggaacagcagagggatgagattgtgagctacttgtgcgacttggccccggaagcgcccccaccaaccctgccgccggacatggcacaggtgacggtgggtccgggattactgggcgtgtctaccttaggtcctaaaagaaactctatggtcctggacgttgccttcgtcttggagggatcggataaaattggggaggctgactttaatcgcagcaaggagttcatggaggaagtgatccagcgaatggatgtgggccaagactccatacacgtcaccgtgttgcaatacagctacatggtaaccgtggagtaccccttctcagaggctcaatccaaaggcgatattctgcaacgcgtgcgggagatcaggtaccagggtgggaaccgaacaaataccggacttgctctgagatacctgtctgaccatagctttctcgtttcccaaggcgatcgggaacaggctcctaacctggtgtacatggttacaggcaacccagccagcgatgagattaaacgcctccccggggatatccaggtggtgcccattggggttggccccaacgctaacgtccaggagttggagaggatagggtggcccaatgccccaattctgatccaggatttcgagaccttgccccgggaggctccggacctggtcctacagaggtgttgctccggcgagggactgcagatccccacactgtcccctgcaccagattgcagccagccattggacgtgatcctcctgctggacggtagttccagctttccggcctcttacttcgacgagatgaagtcttttgccaaggcctttatctcgaaagcaaacatcggtcctcggcttacgcaggtgtctgtgctgcaatatggctcaattaccactatcgatgtgccctggaacgtcgtgcccgagaaggcacatctgctatccctggtcgatgtcatgcagcgagaaggcggaccttcccagattggcgacgcgttaggcttcgcagtgcggtacttgacctctgaaatgcacggagctaggcccggggcgtcaaaggccgtcgtaatactggttactgacgtgagtgtcgacagcgtggatgccgctgcggatgctgcaaggtccaacagggtcactgtgtttcctatcgggatcggcgatcgctacgacgctgcgcagctgcggatcctggccgggccggccggcgatagcaatgttgttaaacttcaaagaatagaggacctcccgaccatggttaccctgggtaactcttttctgcataagctttgtagtggatttgtccgcatctgtatggacgaggacggcaacgaaaagcgtccaggtgacgtatggaccctaccagaccaatgccacactgtgacctgtcagcctgatgggcaaactctgttgaaatcccaccgggtcaactgcgaccggggccttagaccctcctgccctaattcgcaatcacccgtcaaggtggaagagacctgtggttgtagatggacatgcccctgtgtttgcaccggctcctcaactaggcatatcgtcacgtttgatggacagaattttaagctgaccggctcatgttcctacgtcttgttccagaacaaagagcaggacctggaagtaattctgcacaacggagcctgctctccaggggcgagacaaggatgtatgaaatccatcgaggtgaagcactccgccctgtccgtggagctgcactccgacatggaggttactgtcaatgggaggctcgtgagcgtgccctatgttggaggcaacatggaagtgaacgtttatggcgcaatcatgcacgaggtacgattcaaccatctgggccacattttcacttttacgcctcagaataacgagttccaactgcagctcagtcccaaaacatttgcgagcaagacttacggactgtgcggcatttgtgatgagaatggagcgaatgactttatgttgcgggatggcactgtgaccactgactggaaaacactggttcaggagtggaccgtccagcgccccggccaaacctgtcagcccatcctagaagagcagtgcttagtccccgattcatctcactgtcaggttctgctcctgccactgttcgcagagtgccacaaggtgctggcaccagcaacattttacgctatctgccagcaggatagctgtcaccaggaacaggtttgtgaagtgatcgcatcgtatgctcacctctgcaggacaaacggagtctgcgtagattggagaacaccagacttttgcgctatgtcctgcccacctagcctggtttacaaccactgtgagcatggctgcccaaggcactgcgatggcaacgtgagctcatgcggagatcaccctagcgaagggtgtttctgcccaccagataaggtgatgcttgagggtagctgcgtgcccgaggaggcatgtacacagtgtattggcgaggacggagttcagcatcagtttttggaagcgtgggtaccagaccaccagccctgccagatatgtacatgtttgtcaggaagaaaagtgaactgtactacacagccctgtcctacagccaaggcgccaacttgtgggttgtgcgaagtggcgcgcctgcgccagaatgcagaccaatgttgcccggagtatgagtgcgtttgcgatcctgtttcttgcgacttacctccagtaccacactgtgagaggggactccagcccaccctgactaacccaggcgaatgtagacctaattttacatgtgcgtgtcgtaaagaggaatgcaaaagagtgtctcctccctcatgccccccacaccgcctgccgactctgagaaagacacagtgttgtgatgagtacgagtgcgcttgcaattgtgtcaactctacagtctcttgccccctaggctacctcgctagtactgctacaaacgattgcggctgtacgactaccacatgcctgcccgataaggtgtgtgttcacagatcaacgatttatccagtggggcagttttgggaagaagggtgcgacgtctgcacgtgcaccgacatggaagacgccgtcatgggactgcgtgtggctcaatgtagccaaaagccctgcgaggattcttgtcggagcgggtttacatatgtgctgcacgaaggtgaatgttgcgggaggtgtttgccgtccgcttgcgaagttgtaacaggatcacctagaggggattcgcagtcctcttggaaatccgttggctcccagtgggcctcacccgagaatccgtgccttattaacgaatgcgtgcgcgtcaaggaggaggtgtttatccagcagcggaacgtgagttgcccacagctcgaggtccctgtgtgccctagcggttttcagttgtcttgtaaaaccagtgcatgttgcccatcgtgtaggtgcgaacggatggaggcatgtatgttgaatggtaccgttataggacccggaaagactgtgatgatagacgtgtgcacaacctgcagatgtatggtgcaagtgggagtaatcagtggatttaagctcgaatgcagaaaaactacctgtaacccctgtccgctgggctacaaggaagagaataacactggcgagtgttgtggaaggtgcctgccaaccgcttgcaccatacagctgaggggtggccaaatcatgacactcaaaagggacgaaactttacaggatggatgcgacacccatttctgtaaagtcaatgaacgcggagagtacttttgggagaagcgcgtaaccgggtgtcccccgttcgatgaacacaaatgcctggcagaaggcggtaagatcatgaaaatccctggtacatgttgtgatacatgtgaagaacctgaatgtaacgacattactgctcgactgcagtatgtaaaagtcggatcatgcaaaagcgaagtagaggtggatattcattactgtcaagggaagtgcgcatccaaggccatgtacagtatcgatattaacgatgtgcaggaccagtgctcttgctgctcacccacccgcacagaacccatgcaggtggctttgcactgcactaacggaagtgttgtataccacgaagttcttaacgccatggaatgtaagtgctcaccacgaaaatgttccaaa

SEQ ID NO: 12561 - DNA, 8439 bp, Artificial Sequence
  derived and/or modified sequence
atgattcctgccaggttcgccggggtgctacttgctctcgcgctgatcctacccggtacactatgtgccgaaggcactcgcggtcgttcgagtaccgctaggtgtagtctgtttgggtcagattttgtaaatacctttgacggaagcatgtacagcttcgcagggtactgttcctatttattggccggaggatgccagaagcggagcttctccatcataggagatttccagaacgggaagcgcgtgagcttaagcgtgtatctaggcgagttttttgatatccacctcttcgtgaatggaacggtgacgcagggggatcagcgtgtatcaatgccatatgcctcgaagggtctgtaccttgagacagaagccggttattacaaactgtccggcgaggcctacggcttcgttgcgcggatcgacggatcgggcaactttcaggtgttgctcagcgataggtatttcaacaaaacctgtggcctgtgtggcaacttcaatatcttcgcagaagacgacttcatgacccaggaaggaacattgaccagcgatccctacgattttgccaactcctgggctttgtcatccggagaacagtggtgcgagcgcgcctcaccaccaagttcatcctgtaacatctcatctggcgaaatgcaaaaaggtctgtgggaacagtgccaactgttaaaaagcaccagcgtgtttgctcgctgccaccctttggtggacccagaaccctttgtggccctgtgtgagaagacgctttgtgagtgtgcaggcgggctggagtgtgcctgccctgcgttgctggaatatgcccgcacgtgcgctcaagagggaatggtcctgtacggttggacagaccacagtgcctgttctccagtgtgtcctgcaggaatggagtatcggcagtgcgtgagcccttgcgcccggacttgccaaagcttgcatattaatgagatgtgtcaagaacggtgtgtcgatggatgttcctgccccgaggggcagttgttggatgagggcttatgcgtggagagtactgagtgtccgtgtgtgcactccggtaagaggtatcctcccgggacatcattgtcacgagactgtaacacctgtatttgtagaaactcccagtggatttgcagcaacgaggagtgcccaggcgagtgcctggtaaccggccagtctcactttaaaagcttcgacaatcgctactttacattttctggaatatgccagtacctgttggccagagactgccaggaccatagttttagcatcgtgatagagacggtgcagtgtgcagatgatcgggatgccgtgtgcacccgctctgtgacggtcaggttgcctgggctgcataactctcttgtgaaattgaagcacggagctggagttgcaatggatggtcaggacgttcagctgcctcttctcaagggtgatctgaggattcagcacacagtgaccgcctctgtcagactgtcatacggcgaagatctccagatggattgggacgggcgcgggaggctgttagtcaaactcagtcctgtgtacgctggcaaaacttgcggcttatgcggaaattacaatggcaaccagggagatgatttcctgacaccctcaggcctagccgaaccccgcgtggaggattttggcaatgcttggaagctccacggggactgccaggatctgcaaaaacaacattcggacccgtgcgccctcaatcctcgcatgacgagattctccgaggaggcctgcgccgtgctaacctccccaacttttgaagcttgccatagggccgtttccccactgccatacctgcgcaactgccggtacgacgtgtgctcttgtagcgatggcagggagtgtctgtgtggagccctggcaagctacgctgccgcttgtgcaggtcgcggggtgcgggtggcttggagagagccagggcggtgtgagctgaactgccctaaagggcaggtctatcttcaatgcggtaccccatgtaacttaacctgtaggtcgctgagttatccggatgaggagtgtaacgaagcttgtctggagggttgcttctgtccgccagggctgtacatggacgagcggggggattgtgttcctaaagctcaatgtccctgctattacgacggagagattttccagcctgaggatatcttctctgatcaccacaccatgtgttattgcgaagacggctttatgcactgtacgatgtctggggtgcctggatccttactgcccgatgccgtcctttccagccctctatcacatagaagcaaacggtccctgagctgccggccaccaatggtgaaattggtctgcccagctgataatctgcgggcggaaggactggagtgcacgaagacatgccagaattacgacctggagtgtatgagtatgggctgtgtgagcgggtgtctctgtcctcccggcatggtgcgacacgaaaatcgatgtgttgcactggagagatgtccctgctttcatcagggcaaggaatatgcccctggggaaactgttaagatagggtgtaatacatgcgtgtgtcaagaccgcaaatggaactgtacagatcacgtatgcgacgcaacctgttccactatcgggatggcgcactatctgacgttcgacggtctgaaatatcttttcccgggggaatgccagtacgtgctggttcaggactactgtggaagtaacccagggacattcagaattctggtgggcaacaaaggttgctcccacccatccgtgaagtgcaagaaacgggtgacgattctggtggaggggggggagattgagcttttcgatggagaggtgaatgtgaagcggcctatgaaagacgagacccactttgaagtggttgaatctgggaggtatattatcctgcttctgggaaaagccctctcagtcgtatgggaccgccatctgagtattagtgttgtcctcaagcagacttaccaggagaaggtctgcgggttatgcgggaacttcgacggaatacagaataacgacttgacaagcagtaatcttcaagtcgaggaggatcccgtggacttcggtaattcttggaaggtcagtagccagtgcgccgatacacgcaaagtgcctctggatagctctcccgccacatgtcacaataacatcatgaagcaaaccatggtggatagcagctgtcgtatcttaacctccgatgtgttccaggactgtaataaactggtggatccagagccatacctcgacgtgtgcatctacgatacctgctcatgcgagtctatcggcgactgtgcatgtttttgtgacaccattgcagcctatgcccacgtttgtgcacagcacggtaaggtcgtaacttggcgcactgcgacactgtgtcctcagtcctgcgaagaacgtaacctgagagagaacgggtacgagtgcgagtggcgctacaactcatgcgcaccggcttgtcaggtcacctgtcagcacccggagccgctggcttgcccggttcaatgtgtggagggctgccatgcacattgcccccccggtaaaatactggacgaattgctacagacttgcgtcgaccctgaagactgtccagtgtgtgaggttgccggtaggcggttcgcgagtggaaagaaggtcactctgaaccctagcgacccggagcactgccagatctgtcattgtgatgtagtgaatctaacatgcgaggcctgtcaggaacctggcggcctcgtcgtcccacccactgacgcaccagtcagtccaacaactttgtacgtcgaggatattagcgagccgccattgcacgatttttactgttcccggctcctggatttggtgtttctgctggacggttcctctcgcttgtccgaagctgagtttgaggtcctgaaggcctttgtcgtcgacatgatggaacgcttgcgcatctcacagaagtgggtgagggtggccgtggttgagtatcacgatgggtcacatgcctatatcggtctgaaggataggaagcgtccatcagagctgaggaggattgcttcacaggtgaaatacgcaggcagtcaggtggcgtctactagtgaagttctgaaatacacattattccaaatcttttctaagatcgatcggcctgaagcctcccggataacactgctcctaatggcatcacaggagcctcagaggatgtctcggaactttgttcgatatgttcaaggcctaaagaagaaaaaggttatcgtgattcctgtcggtataggcccacatgcaaacctcaagcaaatccgcctaattgagaaacaagctccagagaacaaagccttcgtcctctctagtgtggatgagctggaacaacaacgagacgagatagtaagctacctatgcgatctagccccagaagctccccctccaaccctaccaccagatatggcacaggtgaccgttggaccaggtctgctgggagtgtccacgcttggtcccaagcggaactccatggtcttggacgtggcgtttgtgcttgaaggttctgataaaattggggaagccgatttcaatcgatcaaaggagtttatggaggaggttattcagagaatggatgttgggcaggattccatccacgtaacagttcttcagtactcctatatggtgacagtcgagtacccattcagcgaggcacaaagcaagggtgatatcttacaacgggtcagggaaattcgataccagggagggaatcgaaccaacaccggactggccctgagatatttatctgatcattccttcctggtgtctcagggcgaccgggagcaggcgccaaacctggtgtacatggtgacgggtaaccccgcatctgatgagataaaaagactgcccggcgacatccaagtggtgcccataggggtggggccaaacgccaacgtccaggagctggagcgtatcggctggccaaacgcacctatcctgatccaggattttgaaaccctgccacgtgaagctccggacctggtgttacagcggtgttgcagtggtgaaggcctgcagattcctacgctctcacctgccccagactgctcacagcccctcgatgtcattctgctgcttgatggctctagttccttccctgccagctattttgatgaaatgaagtcatttgccaaagcgtttattagtaaggctaatatcgggcctaggttgacccaggtgtccgtgcttcagtatggttcaatcaccactatcgacgtgccctggaatgtggtgcccgaaaaggcccatcttttatcactggtcgacgtgatgcaacgagaagggggtccttctcagatcggcgacgcgctgggtttcgctgttcgatacctgacctccgaaatgcatggagcacgtccaggcgcaagcaaagcagtggtcatcctggtgaccgacgtgtctgtggacagtgtcgacgcagccgctgatgccgcccggtccaatcgggttactgttttcccaatcggcattggggaccgctacgatgctgcgcagttgcggatcctggccggaccagcaggggattctaacgttgtaaagctgcaaagaatcgaagacctgcccaccatggtgacgcttggcaacagctttctccataaactatgttcaggtttcgtgcgaatctgtatggacgaagacggtaatgagaagcgaccaggcgacgtgtggaccctgcccgaccagtgccacactgtgacgtgccagcctgacggacagacacttctcaaaagtcacagggtgaactgcgacagagggctacgtccttcatgccccaactctcagtctcccgtgaaggtggaggagacgtgcggatgcaggtggacatgcccatgtgtctgtacaggctcctcaacacggcacatcgtgacttttgatgggcagaactttaaattgactgggtcctgctcatatgttctgttccagaacaaggagcaggatctggaagtcattctccacaacggggcatgttctcccggcgcccgccagggatgcatgaagagtattgaggtcaagcatagcgcgctctccgtcgaactccacagtgatatggaagtgacagttaacggccggctcgtgtccgtcccatacgtcgggggaaacatggaggtgaacgtatatggcgccatcatgcacgaagtccggtttaaccacctgggtcacatttttacttttacgcctcagaacaacgagttccagctgcagctgtcaccaaagacttttgcatcaaaaacatacggtctctgcggtatatgcgatgagaacggcgctaacgatttcatgttgcgggacggaacagtcaccacggattggaagaccctggtgcaggagtggacagtccagcggcccggacagacatgtcagcccatactggaggagcagtgcctcgtacccgatagtagccattgccaggtgctgttgctgcctctgttcgcagaatgtcataaagtccttgcgccggccacattttatgctatatgtcaacaggattcttgtcaccaggagcaggtatgtgaggttatagcaagttacgcccacctctgcaggaccaatggagtatgcgttgactggaggacgcctgatttctgcgccatgtcctgtccgccaagtctcgtttataatcactgtgagcacggttgcccacgtcactgcgacgggaatgtttcatcttgcggggatcaccctagcgagggttgcttctgcccccccgataaagtcatgcttgaaggctcgtgtgtccctgaagaagcatgcacccagtgcatcggggaggatggcgtgcagcatcaattcctggaagcatgggtgcccgaccaccagccctgccagatatgtacatgcctgtcaggaaggaaggtgaattgcaccacccagccctgcccaacggccaaagcgcccacgtgtggtctctgcgaagttgcacgcctacggcaaaacgccgatcagtgctgccccgagtatgagtgtgtatgtgatccagtgtcatgcgacctccccccagtgccgcattgtgagcggggtctgcaacccacgctcaccaaccctggagagtgcaggcccaattttacatgtgcttgtcggaaagaggagtgtaagagagtgtcaccacctagctgcccaccacacaggctcccaacactgcggaaaacccaatgctgcgacgaatatgaatgtgcatgcaactgtgtcaactccaccgtcagctgtcccttaggataccttgccagtaccgcaaccaacgactgtgggtgcaccaccactacatgtctgccagataaagtatgtgtgcatcggagtaccatttatccggtcggacagttctgggaggagggttgcgacgtatgcacatgtaccgatatggaagacgcagtaatgggcctgcgagtggcccagtgctctcagaaaccctgtgaggatagctgcaggtcaggcttcacctatgttcttcacgaaggggagtgctgcgggcgctgccttcccagtgcatgcgaagtcgtcactggatctccaagaggggactcacaaagctcttggaagtccgttgggtcccaatgggcctccccggagaacccctgtctcatcaacgagtgtgtgcgggtaaaggaagaggtgttcatccaacagcgcaacgtgagctgtccgcagctggaggttcctgtctgtccaagcggcttccagctgtcttgtaagacttccgcgtgctgtccatcctgcaggtgtgaacgcatggaggcatgcatgttaaacggcaccgtgataggccctggaaaaaccgtgatgatcgacgtgtgcacaacttgtaggtgcatggtacaggtgggtgtcatcagcggctttaaactggagtgtcggaagacaacttgtaacccttgtcccctgggttacaaggaagagaacaacaccggtgaatgctgcgggagatgcctgcccacagcgtgtaccatccaactgcgaggaggtcagatcatgacactgaaacgggatgagacgctccaggacgggtgtgatacacatttttgcaaagttaatgagaggggagaatacttctgggaaaagagggtcaccggctgccctcctttcgacgaacataaatgcttggccgagggcggcaagatcatgaagattccaggaacgtgttgtgatacctgtgaggaacctgaatgtaacgacatcacagcacgactgcagtacgttaaagtcggttcttgcaaatccgaggtggaagtagacatccattactgccagggaaagtgtgcaagcaaagccatgtactccatcgatatcaacgacgtgcaggatcaatgctcatgttgcagtcccacgcggactgagccaatgcaagttgcactgcactgtaccaacggaagcgtagtgtatcacgaggttctgaacgctatggagtgtaagtgttccccccgcaaatgtagcaag

SEQ ID NO: 12562 - DNA, 8439 bp, Artificial Sequence
  derived and/or modified sequence
atgatccccgcacgattcgcgggcgtcctgctggctctggcattaatcctgccaggaaccctgtgcgccgagggcacaagaggtcggtcctcaaccgcacgctgttcactgtttggaagtgattttgtgaacactttcgacgggtcaatgtatagcttcgctggttattgctcctatctgctggctggagggtgtcagaagagatctttctccattatcggagattttcagaacggcaaacgtgttagtttgtcggtatatctgggggagttctttgatattcacttgttcgtgaacggaaccgttactcagggcgaccagcgggttagcatgccctatgccagtaaaggcttgtatctcgaaaccgaggctggatactataaattgtccggagaagcgtatggcttcgttgcaaggatcgacgggagtggcaattttcaggtcctgctgagtgaccgctactttaataagacatgcggactctgcggtaactttaacatcttcgccgaagacgacttcatgacccaagagggcaccctgaccagcgacccttacgattttgcaaactcctgggccctgtcttccggagagcagtggtgtgaacgggcaagcccgccgtcaagttcctgcaacatatcctctggagagatgcaaaagggactttgggaacagtgccagctactgaaaagcactagcgtgtttgcaagatgtcatccacttgtggatcccgagccttttgtagccctgtgcgaaaagacactttgtgaatgcgcggggggtctggagtgcgcctgcccggccctcctcgaatacgccaggacatgcgctcaggaggggatggtgctctatggttggaccgatcatagcgcttgtagtcccgtctgccccgcaggcatggagtatagacagtgcgtgtctccatgtgcccggacatgccagtcactgcatataaatgagatgtgccaggagcgttgtgttgatggttgttcatgtcccgagggccagctgctggacgaggggttgtgtgtggaatccacagagtgtccatgcgtccacagcggaaagagatacccccctggaacttccctgtcacgggactgcaatacgtgtatctgccgcaactcacagtggatctgcagtaacgaagagtgccccggagaatgtctggtcacaggccaatctcattttaagtcattcgataaccggtatttcacgtttagtggaatctgtcaatacttattggcccgagactgtcaggaccacagcttctcaatcgtaatcgagactgtgcagtgcgcggatgatagggacgcggtatgtaccaggagtgttacagttagacttccggggctgcacaactctctggtgaagctgaaacatggagctggggtcgccatggacggacaagacgttcagctacccctcctaaagggggaccttagaatccagcatacagttaccgcaagtgtccgcctttcttatggggaggatttgcaaatggattgggatggaaggggaaggctgctcgtgaaactgagccccgtgtacgcggggaaaacatgcggtctatgcggcaactataatgggaaccaaggtgacgattttctcacgccaagcgggctggctgaaccgcgcgtcgaggattttggcaacgcttggaaactgcacggcgattgtcaggatctccagaagcaacattccgacccatgtgctttgaatccgcgtatgaccaggttctcagaagaagcctgtgccgtccttacgtctcctaccttcgaggcatgtcatcgggcggtgtccccactcccgtacctacgcaactgccgttacgatgtgtgctcttgctcagatggaagagaatgcctgtgcggagccctggctagttatgccgccgcatgcgctggacggggcgtgagggtggcgtggcgggagccggggaggtgtgaactgaattgccctaaaggccaagtttatctgcagtgcgggacgccttgcaacctcacctgtcgaagcctgagctaccccgacgaagagtgtaacgaagcctgtctggaaggctgcttctgcccacctggtctgtacatggatgaacgcggggattgtgttccaaaggctcagtgcccttgctactatgacggtgagatattccagcctgaggatattttttctgaccatcacacaatgtgctattgcgaagacggttttatgcattgtacgatgtctggcgtgccagggagtttacttccagacgctgtactctccagtccgctttcccacagatctaagcgtagcctgagttgtcgccctcctatggtaaaactggtgtgtcctgctgataacctgagggcagaagggcttgagtgcaccaaaacatgccaaaattatgatcttgagtgtatgtctatgggctgtgtgtcgggatgtctatgtccaccgggaatggtgcgtcacgagaacagatgcgtcgctctggaacgctgcccttgttttcaccagggaaaagaatatgctccgggagagacagtcaaaattggctgcaatacttgtgtgtgccaggaccgaaaatggaattgtacggatcatgtctgcgatgccacctgtagtactatcggcatggcccattatttgacttttgatggattgaaatacctgtttcccggcgaatgccaatatgtcctcgtgcaggattactgtgggagtaacccaggcacgtttagaattctagtggggaataagggctgttctcacccctccgttaagtgcaaaaaaagggtgacaattttggtcgagggaggcgagatcgagttatttgatggagaggtaaatgtgaaacgacctatgaaggatgaaactcactttgaggtggtcgagagcgggagatatataatcctattactcgggaaagccctgagtgtggtgtgggaccgccatctgtcaatatcggtggttttgaagcaaacttaccaggaaaaagtgtgtggcctctgcggcaacttcgatgggattcagaataatgacctgacttcttccaacctgcaggttgaagaggatccggtggatttcgggaacagctggaaggtgtcatctcagtgcgccgacacccggaaggtgcccttggactcttcaccagccacatgtcataacaatatcatgaagcaaactatggtagacagttcttgccggatattaacctccgacgtctttcaggactgcaataagcttgtagacccagagccgtacctcgacgtttgcatctacgacacttgttcttgtgaaagcattggtgactgcgcctgcttctgcgacaccatcgcagcgtacgcacacgtctgcgcacagcacggaaaggtggtaacttggcgcactgcaactttgtgcccccagtcctgcgaggagaggaatctgcgagagaacggctacgaatgcgagtggcggtataactcttgtgcccctgcttgtcaggtaacttgccagcaccctgagcctttggcctgtcccgtgcagtgtgtggagggttgccatgcccattgtccaccaggcaaaatcctggatgagctgcttcagacttgcgtcgaccctgaggactgcccagtgtgtgaagttgccggacggagatttgcgtctggtaagaaggtcacgcttaaccctagcgaccccgagcactgccagatttgtcattgcgacgttgtgaacctcacttgtgaggcgtgtcaagaacccgggggactcgtcgttccaccaacagacgctcccgtgtcacctaccacgctgtacgtcgaggatatcagtgaaccgcctcttcatgacttctattgctcccgtctcctggacttggtgttcctcctggacggctcatccaggctttccgaagccgagtttgaagtgctaaaggctttcgtagttgacatgatggagcgcctacgcatctcacagaagtgggtgcgcgttgccgtagtggagtaccatgacgggagtcacgcctacattggattgaaggaccgtaagagacccagcgagctacgccggattgcctctcaggttaaatatgcagggtcacaggtcgcgagcacttctgaggtgctcaaatacaccttgtttcagattttctctaaaattgatcgccctgaagcttcacgaataactctcctactcatggcaagtcaggagccacagaggatgagtcgcaactttgtaaggtacgtacaggggttaaagaaaaaaaaagtcattgtgatccccgtggggattggtccacacgcgaatttaaaacagattcgccttattgagaaacaggcccccgaaaataaagcctttgtgctgtcctctgtggatgaattggagcagcaacgggacgaaatcgtctcatacctgtgtgacctggctcctgaggcccccccccccactcttccacctgacatggcccaggtcaccgtcggcccaggactcctgggagtatccacactgggccccaagcgaaactctatggttctggatgttgcgtttgttctcgaagggagtgacaagataggagaggccgactttaaccgaagcaaggaatttatggaggaagtgatccagcgcatggatgtcggccaggactcaatacacgtaacagtgcttcagtacagctatatggttacagtggaataccctttctcagaagctcaatctaagggtgacattctccagcgggtcagagagatccgctatcagggtggtaacagaacgaacaccggacttgccctcaggtacctttcggaccatagttttctagtttctcagggcgaccgcgaacaagctcctaatctcgtctacatggtgaccggaaatcctgcatctgatgagatcaaaagacttcctggcgacattcaggttgtacccattggggtcggcccaaatgcaaatgtgcaggagttggaacgaataggttggcccaatgccccgatcctgatacaagacttcgaaaccttgccaagggaggcacctgatttggtcttacagcggtgctgctctggggaaggcctccagattcccaccctctcccctgcacctgactgttcacagccactcgatgtgatcttgctgctcgacggctcaagtagtttcccggcgagctactttgatgagatgaagagcttcgccaaagcctttatcagcaaggccaacattggaccgcgcctgacgcaggtaagtgtgctgcagtacgggtcaattaccactatcgacgtgccctggaacgtggtcccagagaaagctcatctgctgagtctagtggatgtaatgcaacgggaagggggtcctagccaaattggcgacgcacttggcttcgccgtacgatacttgacctccgagatgcatggggcacgaccaggggcgagtaaagccgtcgtgattctggtgacggacgtaagtgtcgatagtgtggacgcagcagctgatgctgcaagatctaatagggtcaccgtctttccaattgggatcggagatcgctatgacgcggcccagttaaggatcctggcgggccctgccggggattccaacgttgtcaagttacagagaatagaagaccttcctaccatggtgacgctcggcaactctttccttcataagctgtgctcaggttttgtacgtatttgtatggacgaagacgggaacgaaaagaggccgggggatgtgtggacgctgcccgaccagtgtcatactgtaacctgtcaaccagacgggcagacattactaaagtcccaccgggtaaattgtgatcgaggacttagaccaagttgtcctaatagccaatcacccgtgaaagtcgaagagacctgtggatgcaggtggacttgtccctgtgtttgtaccggctcctcaacacgccatattgtgacattcgacggtcaaaattttaagctgacaggttcttgttcatacgttttatttcagaacaaagagcaggacctggaggtgattttacacaacggcgcttgtagtccgggcgccaggcaaggctgtatgaaatcaatcgaggtgaaacacagcgcactgtccgtggagctgcatagcgacatggaggtaactgttaacggaagactggtctccgtgccgtacgttggcggaaatatggaggtcaatgtgtatggcgccattatgcatgaggtgcgattcaaccatctcggccacatattcacatttacaccgcaaaataatgaatttcagctgcaactttcccccaagacttttgcatctaagacatatggcctgtgcgggatatgcgatgagaacggagcgaatgatttcatgctccgagacggaaccgtcaccacagattggaagaccctagtgcaggaatggacagtccagagacccgggcagacctgccagccaatcttggaggagcaatgtctggtccccgacagttctcactgtcaggtccttctgttgcctctcttcgcagagtgccataaggtactggccccagcaacattctacgccatttgccagcaggactcgtgtcaccaagagcaggtgtgtgaggttatcgcctcttacgctcacctatgccgcacaaacggagtctgtgtggactggagaacacccgatttttgcgcaatgtcttgcccaccttcactcgtttataatcactgtgagcacggttgcccccggcattgcgacggaaatgtgtctagctgtggagaccacccctctgaggggtgtttttgcccgcctgataaggttatgctggaaggcagttgcgtgccggaagaggcctgcacccagtgcatcggcgaggatggggttcaacaccagttcctcgaagcatgggtgccagaccatcaaccatgccaaatctgtacatgtctgtccggcaggaaagtcaattgcactacccagccatgccccactgctaaagctcccacttgcgggctgtgcgaagtcgcacggctgagacagaacgccgatcagtgctgtccggagtatgagtgtgtctgtgatcccgtctcctgtgacctcccgcccgtgccccactgtgagcgcggtttgcagccaaccctgacaaaccctggcgaatgtagacctaactttacatgcgcgtgcagaaaagaagaatgcaaacgcgtcagccctccgtcttgtccacctcatcggctgcccacgttgcggaagacacagtgctgcgatgagtatgaatgcgcgtgcaattgtgtcaatagcaccgtttcgtgcccactgggatatttggcctcaaccgctacgaacgattgtggctgtacaaccactacttgcctgccagacaaggtttgcgtgcataggagcaccatatatcccgtgggacagttctgggaagagggttgcgacgtatgcacctgcactgacatggaggatgctgtgatgggcctgcgtgtcgctcagtgcagccagaagccctgcgaggactcatgtaggtccggatttacgtacgttctccacgagggagagtgttgtggtaggtgccttccttccgcctgcgaggtggtcacaggttcgccgcgcggggactctcagtcttcttggaaaagcgtgggcagtcagtgggctagccctgagaatccttgtcttattaatgagtgtgtgcgggttaaggaagaagtattcatacaacagagaaatgtgtcctgcccccagctggaagtgcctgtttgcccctcaggcttccagttgtcatgcaaaacctcagcctgctgccctagttgccgatgcgagcggatggaggcgtgtatgcttaatggtacagtgatcggccctggtaaaactgtgatgattgacgtgtgtacaacgtgtagatgcatggtccaagtgggcgtgatatcaggctttaagctggaatgtaggaagaccacttgtaatccctgtccccttggctataaggaggaaaataacaccggcgagtgctgcggaaggtgtctgccaacggcgtgtactattcaacttaggggggggcagatcatgaccttgaagagggacgaaacactccaggacggctgtgacacccacttttgcaaggtgaacgagcggggcgagtacttttgggaaaagcgagtgactggttgtcctccctttgatgagcacaaatgtctggcagagggtggcaagatcatgaaaatcccaggcacatgctgcgacacctgcgaagagccagaatgcaacgacattactgcacggctgcagtatgtcaaagttggaagttgtaagagcgaggttgaagtggacatccactactgtcagggcaaatgcgcatccaaggccatgtactctattgacatcaacgacgtgcaggatcagtgttcttgttgcagccccacgcgtacagagcccatgcaggttgctctgcactgtaccaacggttcagtcgtctaccacgaggtgttgaatgccatggagtgcaagtgctcgcccagaaaatgctccaag

SEQ ID NO: 12563 - DNA, 8439 bp, Artificial Sequence
  derived and/or modified sequence
atgattccagcaaggtttgccggcgtactgctcgcactagctctgatcctaccgggcacactgtgtgccgagggaactcgagggcggtcaagcaccgccagatgctcactgttcggaagtgacttcgtgaacacatttgacgggagcatgtacagtttcgcaggctattgctcctatctgttggccggtgggtgccagaagaggtcattctcaatcataggagacttccagaacgggaagcgggtatctttatcagtatacctgggcgaattttttgacatccatctgttcgtgaatgggaccgtcacccagggggatcagagggtgtcgatgccttatgcgtcgaagggcctgtaccttgaaaccgaagctggatactacaagctgtccggagaagcttacggattcgtggcacggatcgacggtagtggtaatttccaggtgctgctgagcgaccggtattttaataagacctgtggcctctgtggcaactttaacatattcgctgaggacgatttcatgacccaggagggaacgttaacctcggatccttatgatttcgccaactcctgggccctgagcagtggagagcagtggtgtgaaagggcttctccaccgagctcgtcatgcaacatctctagcggcgagatgcagaaggggctgtgggagcagtgccagcttctgaagagcacgtcagtgttcgcacgatgccatcccctggtggacccagagccgtttgtcgcgctgtgcgagaaaacgctgtgcgagtgtgccggaggcttggaatgcgcctgccccgctttacttgagtatgctagaacctgcgcccaggaggggatggtgctgtacgggtggacggatcattctgcctgctcacctgtgtgccctgcgggcatggaatatcggcagtgcgtttcaccatgtgcaaggacttgtcagtccctgcacataaacgagatgtgtcaagaaagatgtgtagatggttgttcatgtccagagggccagcttctcgacgaggggttgtgtgtggagtctactgagtgtccttgcgtacactccgggaaacgttaccctcccggaactagcctcagcagagactgtaatacctgtatttgtaggaacagccagtggatttgctcaaatgaagaatgcccgggagagtgccttgttacaggacaaagtcatttcaaatcctttgataaccggtactttactttcagtgggatctgtcagtatttgctcgctcgtgactgccaggaccactccttttctatagtgattgaaaccgttcaatgtgctgacgatcgagacgctgtgtgtaccagatccgtaaccgtgaggctgcctggactccacaactctctggtgaaactaaagcacggcgccggcgttgctatggacggtcaggatgttcagctcccattgcttaaaggggatctgcgaatacagcacacagtgacagcctcggtacgcctgagttatggcgaggacttacagatggactgggacggccgggggaggctgttggtgaagttgtcgcccgtatacgccggaaaaacctgcggcctgtgtgggaactacaacggcaaccagggagatgatttcctgacaccctcaggactggcagaacccagggtcgaagatttcggcaacgcatggaaactgcacggcgactgtcaggatctccagaagcagcacagtgatccatgcgctctgaacccccgcatgacaaggtttagcgaagaagcctgcgcagtgctgacttcacctacctttgaggcttgccacagagcagtttcccccctgccctaccttcgaaattgccgttatgacgtgtgctcatgttccgatgggcgcgaatgcttatgcggagccttggcaagctatgcagccgcatgtgcaggaagaggtgtgcgcgtggcatggcgcgaacccggaaggtgcgaactaaactgtccaaaggggcaggtttacttgcaatgcggcactccctgcaacctgacatgcagatctcttagctaccctgacgaggagtgcaatgaggcctgtttggaggggtgcttctgcccgccaggtctctacatggacgaacgcggggattgcgtcccgaaggctcagtgcccctgttactatgatggagaaatctttcagcccgaggacatttttagcgatcaccacaccatgtgctattgtgaggatggcttcatgcattgtacgatgtcgggagtgccagggtcactgttgcccgatgctgtgttaagctctcctttatctcaccggtcgaaacgatccctaagttgtcgccccccaatggtgaaactcgtctgccccgccgataaccttcgagcggaaggccttgagtgcacgaagacgtgccaaaactatgacctggaatgtatgagtatggggtgcgtttcaggctgtttatgcccgcccggcatggttcgccatgagaacagatgcgtggcactagagcgctgcccctgcttccaccaggggaaggaatacgcccccggagaaaccgtaaaaattggctgcaatacctgcgtttgtcaggacagaaagtggaattgtactgatcacgtctgcgacgccacctgtagcactatcggcatggctcattacctgaccttcgacgggctcaagtatttattccccggagaatgtcagtatgtgctagtgcaggattattgcggttccaatccaggtaccttcagaatcctggtcggcaacaaaggatgcagccatccatccgttaagtgcaagaagcgggttaccatcttggtggagggtggcgagatagaactgtttgacggcgaggtgaatgtgaaacggccaatgaaggacgaaacacatttcgaggtggtggaaagcggccggtatataatattgctgctggggaaagctctgagtgtcgtatgggacagacacctgtccataagtgtggttctcaagcagacctatcaggagaaggtgtgcggtttatgcggtaattttgacgggattcaaaacaatgatttgacaagcagcaaccttcaggtggaggaagaccctgtcgatttcgggaatagctggaaagtcagcagccaatgtgccgatacgcgtaaggtgcctcttgattcaagtcccgccacctgtcataataacatcatgaaacagaccatggtcgattcatcatgcaggattctcacaagtgatgtgttccaggattgtaataagctggtagaccccgaaccgtatctagatgtgtgcatttacgatacctgcagttgtgagtctattggggactgcgcttgcttttgcgatactattgctgcgtacgctcacgtgtgtgcgcaacatggtaaagtagtaacttggcgcactgcgaccctgtgccctcagagctgcgaggaacggaacctacgagagaatgggtatgagtgtgaatggagatacaactcatgcgcccctgcttgtcaggtgacatgtcagcatccggaacccttagcatgccccgttcagtgtgtggagggctgtcatgcacattgcccacctggtaagatcttagacgagctgctgcagacttgtgtggacccggaggattgtccggtctgtgaagtagctggacgcaggtttgcgagtgggaagaaggtcaccctgaacccttctgatcccgagcattgtcaaatctgtcactgcgacgtagttaacttgacatgcgaagcatgtcaggaacctggagggctggtggtcccccctactgatgccccagtgtcacctaccaccctttacgtagaagacattagcgaaccccccctgcatgacttttattgttcccggttactagacctcgttttcctacttgacggctcgagtcggctgagcgaagccgagtttgaagtgctgaaggccttcgtggtcgatatgatggaaagacttagaatttcacagaagtgggtccgcgtcgcagttgtcgagtaccacgacggctcccacgcctatatcgggttaaaggatcggaaacgccctagcgagctgcgtcgcattgcatctcaggtgaagtatgctgggagtcaggtcgcaagcacgtcagaggtcttgaagtacactctcttccagattttcagtaagatcgatagaccagaggcgtctcggatcaccctattgctgatggcgtcccaggagccacagagaatgagcagaaatttcgtcagatatgtccaggggctaaagaaaaagaaggttattgtaataccagtggggatcgggccccacgccaatctgaagcaaatccgcctgatcgaaaaacaagccccagaaaacaaggcattcgtcctaagttctgtggatgaacttgaacagcagcgggacgagatcgtgagctacctgtgtgatctggctcccgaggccccgccccctactctaccacccgatatggctcaggtaacggtcgggcccggcctactcggagtgtccacactaggacccaaacgaaacagcatggttttggacgtagcctttgtgctggaaggaagcgataagattggagaggctgacttcaaccgcagcaaggaatttatggaagaggtgattcaaaggatggacgtgggtcaggattctatccatgtgaccgtcctgcagtatagctacatggttaccgttgaatacccattctcagaagcccagtctaagggtgacatcctccagagagtgcgagaaattaggtatcagggcggcaacagaacaaataccggcctggcactgcggtatttatctgatcacagtttcttagtgagtcagggggatcgggaacaggcgcctaatctggtgtacatggtgaccggcaaccccgcctccgacgaaataaagagactgcccggtgacatccaggtggtacctatcggggtgggtcctaacgcaaacgtgcaggagttggagagaatcggttggcccaatgcccctattcttatccaggactttgaaacactgccgagggaagccccagatctcgtgcttcagcggtgttgttcgggtgaaggactacagattcccacactgtcacccgcccccgattgctctcagcccctggacgttatcctgctgcttgatggctcttcctcctttcccgcatcatactttgatgaaatgaagagcttcgcaaaagcttttatatctaaagcgaacattggacctaggctcacgcaagtgagtgtgctacagtacggctcaatcacaaccatcgatgtgccttggaacgtcgtgccagagaaggctcacctgctctcgctcgttgatgtaatgcagagagaagggggaccatcccagatcggtgacgctctgggctttgctgttcgttacctaacgtctgaaatgcacggagctaggccaggcgcgtccaaggccgtggtgatcctcgtcacagacgtgtccgtcgatagtgttgacgctgccgctgatgccgctcgatccaaccgcgtcacagttttccccattgggattggtgatcggtacgacgccgcccagctccgcatactcgccggccctgcaggcgacagtaatgtggtcaagctccagcggattgaagatctgccgacgatggtgacattgggcaacagctttttgcacaagttgtgcagtgggtttgtgaggatctgcatggatgaggacgggaacgaaaagcggcccggcgacgtgtggaccttgcctgaccaatgtcataccgtgacttgccagcccgacgggcaaactctgctcaaaagccatcgtgtgaattgtgatcggggtctgcgaccgagctgcccaaattcgcagtcacccgttaaggtggaggagacatgtgggtgtaggtggacctgcccttgtgtctgcactgggtcatccacacggcacattgttacatttgatgggcagaatttcaagcttactgggagctgctcttatgttctgttccagaataaagaacaggacctggaggtgattttgcataatggcgcatgttccccaggcgcgaggcaggggtgcatgaaaagcatagaggtaaaacactccgccttgtcggttgaactgcatagtgacatggaggtcacggttaacggtcgtctggtgagcgtcccctatgtcggaggaaacatggaagttaatgtctatggcgcgataatgcatgaggtgcgctttaaccatctggggcatatcttcactttcacccctcaaaataatgagttccagctacagttgtcccctaagacctttgcatctaagacctatgggctgtgtggtatctgcgatgagaacggagccaatgatttcatgctgcgcgatggcactgtgaccaccgactggaaaactctggtgcaggagtggacagtacagcggccaggtcagacctgccagccaattctcgaggaacagtgtctggttccggattcgagtcactgtcaggtcctgcttctccccctttttgccgaatgtcataaagtgctggccccagcgacattttacgccatatgccagcaggattcgtgccaccaagagcaggtgtgtgaagtcatagcctcctacgcacacttgtgtcgcacaaacggagtttgcgtggactggagaacgccagacttctgcgcaatgagctgccctccttccctggtctataaccattgtgaacatggctgtcctaggcactgcgacggtaacgtgagtagctgcggcgatcacccatcagaaggatgcttctgcccacccgacaaggtaatgcttgaggggtcatgcgtcccagaagaagcctgcacacaatgtatcggcgaggacggggtgcaacatcagtttctggaggcgtgggtgcccgaccatcagccttgtcagatctgcacgtgcctgagcgggaggaaggtaaattgtaccacccagccttgtcctacagcaaaggcccccacatgtggcttgtgtgaagtggcaagactgcgtcagaatgcggaccagtgttgcccagagtacgagtgtgtttgcgatccggtgtcttgtgacctgccacccgtgcctcattgtgagcgggggctgcaaccaacattaaccaaccctggagaatgcaggccaaatttcacctgcgcttgtagaaaggaagagtgcaagcgggtttcaccaccaagttgcccaccccatcgtctgcccacactgagaaagactcaatgctgcgatgagtatgagtgcgcatgtaactgtgtgaattctactgtgtcatgcccattgggttatctcgcctctaccgctaccaatgattgcggctgcactactaccacctgcctcccagataaggtgtgcgtgcatcggagcaccatttatcctgtaggccagttttgggaggaagggtgcgacgtctgcacgtgtacagatatggaagatgctgtgatgggcctgcgagtcgctcagtgttctcagaaaccctgcgaagatagttgcaggtctgggtttacatacgtgctacatgaaggggaatgctgcggacggtgtcttccgtctgcctgtgaagtggtcactggctcgccgcgcggggatagccagagttcttggaaatccgtcgggtcccagtgggcctctccagaaaatccatgtcttattaacgaatgcgtgcgtgttaaggaggaggtatttatccaacagaggaacgtctcgtgcccacagctagaagtgcccgtgtgtcccagcggctttcagttgtcctgtaaaacatctgcttgttgtccatcgtgcaggtgtgagaggatggaagcctgcatgttgaatggcactgtgattggccccggcaagaccgtgatgattgacgtgtgcaccacctgccgctgtatggtccaagtgggcgtgatcagcggttttaagctggagtgccgaaaaaccacctgtaacccttgtccactgggctataaagaagagaacaacactggagagtgttgtggtcggtgtctgccaaccgcatgtaccatacaactccgcgggggacagattatgactctgaagcgggacgagacgcttcaggacgggtgcgatacccatttttgtaaagtgaacgagaggggcgaatacttctgggagaagcgcgtcaccggctgcccacccttcgacgaacacaaatgcctggctgaaggaggcaagatcatgaaaatacccggtacctgttgtgatacatgcgaggagcccgagtgtaatgatatcaccgcccgactgcagtacgtaaaagtgggttcatgtaaatccgaagtcgaggtggacattcactactgccagggcaaatgtgctagcaaggcgatgtacagcatcgatattaacgatgtacaggaccagtgttcctgttgctcccccacacgcaccgagcccatgcaggtcgcactccactgtacgaacggatcagtggtttatcatgaagtgctcaacgcaatggagtgcaaatgctcccccaggaagtgcagcaag

SEQ ID NO: 12564 - DNA, 8439 bp, Artificial Sequence
  derived and/or modified sequence
atgattccagcacgattcgcaggtgtgctgttagcgctcgcgctaatcttgccgggcaccctctgtgctgagggtacgcgtggccgttccagcactgctcgatgttccctcttcggctccgatttcgtcaatacattcgatggctccatgtattcttttgcgggatactgctcatacctattagcgggcggctgccaaaaacgctcgttctcaataattggtgatttccagaacgggaaaagggtctccttgtcagtttacttgggtgaatttttcgacatacacttattcgttaatgggaccgttacccaaggtgatcagagggtgtcgatgccctacgccagcaaagggctttacttggagaccgaggcggggtattacaagctgtctggcgaggcatacggatttgtggctcggattgatggttccgggaacttccaggtgcttctttccgatcgctacttcaataaaacctgtggcttatgcggcaattttaatatcttcgccgaagacgattttatgactcaggaggggacgcttaccagcgatccgtacgattttgctaactcgtgggccctttccagtggggagcagtggtgcgagcgcgcctccccaccgtcatcttcctgtaacatttcatccggcgagatgcagaaaggcttatgggaacaatgccagctactcaagagcactagtgtatttgctcgctgtcatccactggtggatccagagccgtttgtagccctttgtgaaaagactctgtgtgagtgtgcaggcggactcgagtgcgcttgccccgcactattggagtatgcgcgcacctgtgcgcaagagggcatggtcctttatggttggacggaccactccgcgtgtagcccggtctgccccgcaggtatggaatatcgacaatgtgtttcgccatgcgcgcgcacttgccagtcactacatattaatgaaatgtgccaggagcggtgcgtggatggctgcagctgccccgagggtcaactgcttgatgagggactctgcgttgaaagtacagagtgcccgtgtgtccacagcgggaaaagatatcccccaggaacgtcattgagtcgagattgcaacacctgtatctgccgaaacagccagtggatctgttcaaatgaggaatgtccgggagagtgtcttgtcaccggtcagtcacactttaagtctttcgacaatcggtatttcaccttctccggaatttgccagtaccttttggcgagggattgccaagatcattcttttagcatcgtcatagagaccgttcagtgcgcggacgatcgggacgcggtttgcactcgtagcgtaactgtgaggttaccaggcttgcacaactctttggttaagcttaaacatggagccggtgttgcaatggacggacaggatgtacagcttcccctcctgaagggggacttacgaatacagcacacggtgacggcgagtgtgcggctttcctatggcgaggatctgcagatggactgggacggacgcggtaggctgctggtgaaactgagtcctgtatatgcgggtaagacgtgtggactttgcggtaattataatggtaaccagggtgatgattttctaacaccctccggtttggcggagccccgtgtggaagatttcggaaatgcatggaaactacacggtgactgtcaggacctccagaagcaacactcagacccttgcgccctcaaccctagaatgacgcgcttttccgaggaagcgtgcgctgtcctgacttcaccaactttcgaggcttgccatcgagcggtcagtccattgccatatcttcggaactgcagatacgacgtctgtagttgctccgacggccgagaatgcctctgcggggccttggcctcatatgcggcggcgtgcgccgggcgcggagtacgcgtagcctggagggaacccggccgatgtgagcttaactgtcctaagggacaggtctacttgcaatgcggcactccctgtaacctaacctgtcgctcactgtcctaccctgacgaggaatgtaacgaagcatgcttggaaggttgcttttgtcctcccgggctttacatggatgagcggggtgactgtgtgcctaaggctcagtgcccctgttattatgatggggagatctttcagccggaggacatcttctcggatcatcacaccatgtgttactgcgaggacggctttatgcactgtaccatgtctggcgtgcctggatccctgcttcctgacgctgttctgtcatcccccttgagccatcgttctaagcggtcgttaagctgccgtccgcccatggtgaagctggtttgtcccgcagataacctcagggcagagggtctcgaatgcacgaagacttgccaaaattacgatttagagtgcatgagcatgggttgcgtgtctggctgcctatgtcccccgggtatggtgaggcatgaaaatcgatgcgtggcattggaacggtgtccttgttttcatcaaggcaaggaatatgccccgggagagactgtgaaaatcggttgtaatacgtgtgtgtgccaggaccgaaaatggaactgtaccgaccatgtctgtgatgcaacttgctcgaccattggaatggcgcactacttgacgttcgatggcttgaagtacctgttccccggtgagtgtcaatacgtcttagtccaagattattgtgggtccaaccctggtaccttccgaattttggtgggcaacaaggggtgttcgcatccttcagtgaagtgcaagaagcgcgtgaccattttggtggagggtggggagatcgaactcttcgatggtgaggtcaacgtcaaacggcctatgaaggacgaaacacacttcgaggtcgtagaaagtgggaggtacatcattctcctgctcgggaaagctctttctgttgtatgggacaggcatctttccataagcgtggtgctgaagcagacatatcaggagaaagtgtgcggtctgtgcgggaactttgacggaattcagaataatgacttgacttcgtcgaacctccaggttgaggaggatccagtcgattttggcaactcttggaaggtgtctagccaatgtgcggatacccggaaggtacctttggattcatcgcctgctacatgtcacaacaatattatgaagcagacaatggttgactcgagttgcagaatccttaccagcgacgtgttccaggactgcaataagctcgtcgaccccgaaccgtatctggatgtatgcatctatgacacatgtagctgtgagtctataggtgactgcgcgtgcttttgcgataccatcgctgcctacgcgcatgtttgtgcccagcacggaaaggtggtcacctggcggactgccactctatgtccgcagagctgcgaggagcgtaaccttcgggagaacggttatgaatgtgaatggaggtataactcttgcgctcccgcctgccaggtgacctgccagcatcctgagcccctagcctgtcctgttcagtgcgtggagggctgccatgcgcactgtccacccgggaagatcttagatgaactcttacagacgtgtgttgatccggaggactgtccagtgtgcgaagtggccggccgtcgctttgcttctggtaaaaaagttactctgaatccctcagaccccgaacattgtcagatttgccactgtgacgtcgtcaaccttacctgcgaagcctgccaagaacccggtggactggtggtccctccaacggacgctccggtatcgccgactactctttacgtcgaggatatctcggagcccccgctccatgatttctactgctctcggttgttggacctggtctttctcttggacggttctagccggctcagcgaggcggaattcgaggttctgaaggcatttgtcgtcgacatgatggagcgtttgaggatctctcagaagtgggttagggtcgcggtggtagagtatcacgatggctctcacgcctacataggcctgaaggatcgaaagcggcctagcgagcttcgaaggatcgcttcacaagtcaagtatgctggatcccaggtggcttcaaccagcgaagtgcttaaatatacgctgttccagattttctctaagattgatcgaccagaggcttcacgaattacattgctgctcatggcatcgcaagagcctcagcgtatgtctcgcaattttgtccgttatgtccagggcctcaagaaaaaaaaggtgatcgtcattcccgtcggtatcgggccccatgccaacctaaagcagattagactcatcgagaagcaggcaccagaaaataaggctttcgttctgagctcagtcgacgagttggaacaacagcgtgacgagatagtctcgtacctatgcgatcttgctcctgaagctcctccgcccaccctacccccagacatggcacaagtgacggtagggcctggattactgggagtctccacattaggccccaagcgaaacagtatggtcttggatgtggcattcgtgctggagggctccgacaaaattggcgaagcagattttaaccgatccaaggagtttatggaagaggtcatccagcgaatggatgtgggccaggactcaattcacgttactgtgctgcagtactcctatatggttacggttgagtaccctttttccgaggcacaatctaagggagatatcttgcaacgtgtgcgagagatacgttatcaaggtgggaatcgcactaatacgggtcttgcactccggtacctctccgatcactcattcttagtgtcgcagggggatcgcgagcaagccccaaatcttgtctacatggtcacggggaatccagcatctgatgagatcaaacggctccccggcgacatccaggtcgtccctattggcgtggggcctaacgctaacgtccaggagttagaacgcattggttggcctaacgccccgatcctgattcaggatttcgagacgctaccccgagaggcgccggatttagtcctgcaacggtgttgttccggcgagggcctgcaaattcctacactgagcccagccccagactgctcgcaacccctggatgtgatcctccttctggatggctctagctctttccccgcttcctactttgatgagatgaagtcctttgcgaaggccttcatttcaaaagcaaacatcggccctcggctgacccaggtaagcgtcttacagtatggttcaataactactatcgatgtcccctggaatgttgtccctgagaaagcgcatctgctctctttggtggacgttatgcaacgcgaaggtggcccttcccagattggagatgcccttggtttcgcagtacggtacttaacgtcagaaatgcacggggctcgaccaggtgcatccaaggccgtcgtaattttagtaaccgatgttagtgttgacagtgtcgacgctgctgctgacgcagccagaagtaacagggtcactgtttttcctatcggtatcggggatcggtatgacgcggctcaactccgcattctggcgggtccagctggcgactccaatgtcgttaagctccaacgtatcgaggacctgcctaccatggtgaccttgggcaattctttcctacataagctgtgttcgggatttgttcgaatctgtatggatgaagatggcaatgagaagaggccgggcgacgtctggaccctcccggatcaatgtcacactgtcacgtgccaacccgacgggcaaacgcttctaaagtcacaccgcgtcaactgcgaccgtggcctccggccgagttgcccaaattcgcagtctccggtcaaagtcgaagaaacctgcggatgccgttggacgtgtccctgcgtctgcaccgggtcttccacccgtcacattgtgacttttgatgggcagaacttcaagttgactggatcttgctcgtatgttctgttccagaacaaggagcaagatctcgaggtcatcttgcataacggcgcttgttcccctggtgctcggcagggctgtatgaaatcgatcgaagtcaaacacagcgctctgagcgtcgagttacactccgacatggaggtaacggtcaatggacgacttgtctctgttccatacgttggtgggaatatggaggtaaatgtgtacggcgccatcatgcatgaggtgcgtttcaaccatctcggtcatatcttcacttttacgccccaaaacaatgaatttcagttacaactttcccccaagaccttcgcctcaaagacgtacggcttgtgcggcatctgtgacgaaaatggcgctaacgatttcatgctccgggacggtactgtcacgaccgattggaagacgctggttcaggagtggacagtccagcggcctggccagacgtgccaacctattctggaggaacagtgcttggtacctgactcgtcgcactgccaagtccttctccttcctctcttcgcggaatgccacaaggtcctcgcccctgctacattttacgcaatctgccagcaggactcgtgtcaccaggagcaagtttgcgaggttatcgcctcatatgcccatctatgtagaaccaacggtgtgtgcgttgactggcgcacaccagatttttgcgctatgtcatgcccgccatcgctggtgtacaaccactgtgagcacggatgcccacggcattgtgacggtaatgtatcctcgtgtggggatcaccctagtgagggctgtttttgtcccccggacaaggtgatgctggagggatcatgtgttcccgaagaggcttgtacacagtgcataggagaagacggagtgcagcatcaattcttagaggcttgggtacctgatcatcagccttgtcaaatatgcacttgtctgagtgggagaaaagtaaattgtacgacgcagccgtgccctactgcaaaggcccccacttgtggcctgtgcgaggtcgcgcgactacgacaaaatgctgaccaatgttgccccgagtatgaatgcgtgtgtgatccggtgtcctgtgacctgccgcccgttccacattgcgaaagaggactgcagccaactctcactaatccaggagagtgtcgtcccaacttcacttgtgcctgccgcaaagaggagtgtaagcgggtatccccaccctcttgccctccgcacagacttccaacgcttcggaagactcagtgctgcgatgagtacgagtgtgcttgcaattgcgtcaactcgaccgtaagttgtcctctcggttatcttgcaagcacagctacaaacgactgtggatgcaccacgacgacgtgcctgcccgacaaggtgtgcgtgcatcgctcgactatttatcctgtcggccaattttgggaagaaggttgtgacgtgtgtacttgtactgacatggaagacgctgtgatgggccttagggtggcccagtgttcgcagaagccctgcgaggactcgtgtcgaagcggtttcacgtatgtgctccacgaaggagagtgttgtggcagatgcctgccaagtgcctgtgaggtcgtgacgggctcaccaagaggtgattcacagtcgtcatggaagagcgtcggttcccaatgggcgtccccggagaatccctgccttattaacgagtgtgttagggtgaaggaggaagtctttatacagcaaaggaacgtttcatgtccgcagcttgaagtgcccgtctgcccatcaggatttcaactcagctgcaaaacttcggcctgttgcccctcctgccgctgcgagcggatggaggcgtgcatgctaaatgggactgtaatcggacctgggaaaactgtgatgatcgatgtgtgtacaacttgtcgctgcatggtacaagtcggtgttatatccggattcaaactggagtgccgcaagactacatgcaacccttgcccccttggttataaagaggagaataataccggagaatgttgcggccggtgcctccccacagcttgcacaatccagctccgcggtggacagattatgacgctgaagcgtgacgagacgctccaggacggatgcgacacgcatttctgcaaggttaacgagcgcggcgaatacttttgggagaagagagttactggttgtccgccgttcgacgaacacaaatgtttagcagaaggagggaaaatcatgaagattcccggcacctgttgtgatacctgtgaggaacctgaatgtaacgacatcactgcgcgattgcagtatgttaaagttggaagctgcaagtctgaggtggaagtggacattcactattgccaaggaaaatgtgcaagcaaggctatgtactccatcgacattaacgatgtgcaagatcaatgttcgtgttgcagccctacccgcactgaaccgatgcaggtagcgttgcactgcactaatggatcggttgtgtaccatgaggtgcttaacgccatggagtgtaaatgttccccgcgtaagtgcagcaag

SEQ ID NO: 12565 - DNA, 8439 bp, Artificial Sequence
  derived and/or modified sequence
atgattcctgccagatttgccggggttttgctcgctttagccttaattctaccggggacactgtgtgcggagggaactcggggcagaagctcaacagctcggtgttcactctttggctccgactttgttaatacgttcgacggatccatgtacagcttcgcgggctattgttcctatctgctcgcaggaggctgccaaaagagatccttttccatcattggtgacttccagaacggcaagcgtgtgtctcttagcgtctatctgggagaattttttgatattcatctgtttgtgaacgggactgtgactcaaggagatcagcgggtcagcatgccttacgctagtaagggcttataccttgagacggaagccggctactacaagcttagtggtgaagcttacggattcgtcgctcggattgacggctcaggtaatttccaggtgctgctgtcagaccgctacttcaacaaaacttgcggtctgtgcggcaacttcaatattttcgccgaggatgactttatgactcaggaggggaccctgacctccgacccctacgactttgccaacagctgggccctgagttccggagaacagtggtgtgaaagagcctccccacccagttcctcttgtaatatttcctctggtgagatgcaaaagggactgtgggagcagtgtcagttgctcaaatcaacctctgtgttcgctagatgccacccactagttgatcccgagcccttcgtggcactgtgcgagaagactctgtgtgaatgcgcaggtggccttgagtgcgcctgccctgccttgctcgagtacgcacgaacttgcgcacaggaaggcatggtgttgtatggttggaccgatcacagtgcttgttctcccgtgtgtccagcaggcatggagtatagacagtgtgtgagtccctgcgccaggacctgtcagtccctgcacatcaatgaaatgtgccaggaacggtgcgtcgacgggtgttcgtgtccagagggccagctgctggacgagggcctgtgtgtggagagtactgagtgcccgtgtgtgcactccgggaagagatatcccccaggaacttccctcagtagagactgcaatacatgtatatgtcgcaactcacagtggatttgttctaatgaagaatgccccggcgaatgtctggtaacagggcagtcacacttcaaatcttttgataataggtactttaccttctctggcatctgtcaatatctgctggcccgtgattgtcaagaccacagcttcagtatcgtaatcgaaaccgtgcagtgtgctgacgatcgagacgctgtgtgcacccgctccgtcaccgtgaggctcccgggattacacaattctctagtcaaactgaaacatggcgcgggcgttgctatggatgggcaggacgtccaactcccgcttctcaaaggggacctccggatacaacatacagtgacggctagtgtgcgcctgtcctacggggaggatctgcagatggactgggacggcaggggccgattgttggtgaagttgagtcctgtgtacgccggaaagacctgtggactgtgtggcaactacaatgggaatcagggggacgacttcctgactccctccggactagccgaacctcgcgtggaggatttcgggaacgcctggaagctacatggtgactgccaagacttgcagaagcaacatagtgacccttgcgcactcaaccctcgtatgacacgatttagcgaagaagcctgtgcagtcctgacatcgccaacttttgaggcttgccatcgcgccgtcagcccactgccctatcttagaaactgccggtacgatgtctgcagctgcagcgacggccgggaatgcctatgtggcgcactggcatcatacgcagctgcatgcgccggccggggcgtcagagtggcctggcgcgagcccggacggtgtgagctaaattgcccaaaagggcaggtgtatcttcaatgtggcacaccgtgcaatttgacctgtaggtctctctcatatcccgacgaagaatgtaacgaggcctgccttgagggctgtttctgtccgcccggactctatatggacgagaggggtgattgtgtgcctaaggctcagtgtccctgctactatgacggcgagatcttccagcccgaggatatattttctgaccatcataccatgtgttactgtgaggatggtttcatgcactgcacaatgtccggcgtgccaggatccttactaccggacgccgttctctcatccccgctttcgcacaggtcaaaaagatcgctcagctgtcgaccgcctatggtgaagctcgtgtgtccagccgacaacctgagggccgaggggctggagtgcactaagacctgccaaaattacgatctggaatgtatgtccatgggatgtgtgtccggatgcttatgtccaccagggatggtgcgtcacgagaatcgatgcgtcgccctggagaggtgcccttgctttcatcagggaaaagagtatgcccccggtgagaccgttaagatcggctgcaacacttgcgtatgtcaggatcgaaagtggaactgcaccgaccacgtgtgtgatgctacctgcagtacaatcgggatggctcactacctcacattcgatggcctgaagtacctctttcccggcgagtgtcagtatgtgcttgtccaggattattgtgggtcgaatccaggtacatttagaattctggtgggcaataagggatgcagccacccgtccgtgaaatgtaagaagcgcgtcactattttggtagagggtggtgagatcgagctgtttgatggagaagtcaacgtcaagcgcccaatgaaggacgaaacgcattttgaggtggtggaatccgggaggtatatcatcctgcttctgggaaaggccctgagcgtggtatgggaccggcatttaagcatctccgtcgtactgaagcaaacctatcaggaaaaagtttgtggcctttgcgggaacttcgacggcatccaaaacaacgatctaacatccagcaacctgcaagtggaggaggacccagtggatttcgggaatagttggaaagtgtcatcacagtgtgccgacacaaggaaagttcctttggattcatcgcctgcgacttgccataataacattatgaaacaaacaatggtcgatagcagttgccgaattcttacgtcagatgtcttccaggactgtaataagttggttgaccctgagccctaccttgacgtctgcatctacgacacatgtagttgtgagagcatcggtgactgcgcttgcttctgtgatactattgccgcttatgctcatgtgtgtgcccagcacggaaaagtggtgacgtggcgaacggccaccttatgtccgcagtcctgtgaggaacgcaacttgagagagaacgggtacgaatgtgaatggcggtataattcatgtgccccagcatgtcaggtgacttgccagcatcccgagcctctcgcctgtcctgtgcaatgcgtggagggctgccacgcccattgcccccctgggaaaatactcgacgagctgctgcagacctgcgttgaccctgaagattgtccggtctgtgaagtggcgggtcggaggtttgcctctggaaagaaagtgacactgaacccgtccgatcctgaacactgccagatctgccactgtgacgtcgtgaacctcacatgtgaagcttgtcaggagccagggggcttggtcgtcccccctaccgatgccccagtcagtccaactaccctctatgtggaagacatcagtgagcccccactccatgacttctattgctcaaggttgttggatctggtgtttcttcttgacggctcttctaggctgagcgaggccgagttcgaagtgctaaaggcctttgtggtggatatgatggaaagactcaggataagtcagaagtgggttcgtgtcgcggtcgtagagtatcacgatgggtctcacgcttacataggcctgaaagacaggaagcggccttcagaattacgccgcatcgctagccaagtgaagtatgccggctctcaggttgcttcaacatccgaagtgcttaagtatactctattccagatctttagcaagatcgacaggcctgaggccagtagaataaccctcctgcttatggcctcccaggaaccgcagcgtatgtcacgaaatttcgtccgttatgtacaggggctaaaaaagaaaaaggtgatcgtgattcctgttgggatcgggcctcatgcaaatcttaaacagattagactgatcgagaagcaggcccctgaaaataaggcctttgtgttgtcctccgtcgatgagctggagcagcaacgggatgagatcgtgtcctacttgtgcgacctggcccccgaggctccgcctcctacactgcctccagacatggcccaggttaccgtgggtcctggactgcttggagtttccacactcggccccaagagaaattcaatggtgttggacgtcgcttttgtgttggaagggagtgacaagataggagaagccgacttcaatagatctaaagagtttatggaggaagtaatccagaggatggacgtcggacaggacagcatccatgtcactgtactgcagtacagttacatggtgaccgtcgaatatcccttttctgaggcccagtcaaaaggagatatcctgcagagggtgcgggagattaggtaccagggcggaaaccggaccaacaccggcctggcgttgcgttatctctccgaccattctttcctggtgagtcagggtgaccgtgagcaggcccccaacctggtgtatatggtgactgggaatccggcttctgatgaaattaagcggcttcctggcgatattcaggtggttcccatcggagtgggcccaaatgcaaacgtgcaagaacttgaaaggattggatggcccaatgcacctattctgattcaggactttgaaactctcccccgtgaggcccctgatctggtgctccaaagatgctgctccggcgaaggcctgcaaattccaaccttatcaccggcgcctgattgcagccagcctctcgatgtcatcctgttgctggatggctcatcctcgtttccggcatcttacttcgacgagatgaagagctttgcgaaagccttcatctcaaaggctaacatcggtccccgcttgacccaggtctccgttttgcagtatggtagcatcaccactatcgatgtgccctggaacgtagttccggagaaggcgcatctgctctccctcgtggatgtgatgcagcgggaaggaggacccagccagataggagacgccctgggattcgccgtcaggtacctaactagtgagatgcatggggctaggccaggcgcgtcaaaggcagtggtaatccttgttacagacgtctctgttgattctgtggacgcggctgcagatgccgctcgttcaaatcgggtgactgtgttccctataggcatcggcgatcggtacgatgccgcccaactgcgaatcctggcaggtccggctggagacagcaatgttgtcaaattgcagcgcatcgaagacctgcctacaatggtgacccttggcaatagctttcttcacaaactttgttccgggttcgtgcggatctgcatggacgaagacggcaacgagaaaagacccggagatgtatggacccttccggatcaatgccataccgtaacttgccagcctgacggacagacactgctcaagtcccatagggtcaactgtgaccgagggctgcggccctcatgtcctaactcccagagtccagtgaaagttgaggagacttgtgggtgccgttggacctgtccttgcgtgtgtacggggagctctacacgccacatcgtgactttcgatgggcagaacttcaaattgaccggatcgtgctcctacgtcctgtttcagaataaggagcaggacctggaggttatcctgcacaatggggcatgttcgcccggggcccggcagggctgcatgaaatccatcgaagttaaacacagtgctctgtcagttgaactgcactctgatatggaggtcactgtaaatgggcggctcgtctcggtcccatatgttggcggcaatatggaagtgaatgtttacggagccattatgcatgaggtgcggtttaaccacctcggccacatattcacctttacaccgcagaataacgaatttcagttacagctgtcccctaagactttcgctagcaagacatatggcctttgtgggatatgtgacgaaaacggcgcgaatgacttcatgttgcgagacggaaccgtgaccactgactggaagactctggtgcaagagtggaccgtgcagagacccgggcaaacgtgccaacccatcctggaagaacagtgtctggtgccggattcatcacattgccaggttctgttactaccgctctttgcggaatgccataaggtcctcgccccagcaaccttttacgcaatttgtcagcaggattcttgtcatcaggagcaggtgtgtgaggttatcgccagttacgcccatttgtgtcgcactaatggtgtgtgcgtcgattggagaacaccagacttctgcgccatgagttgccctccttccttggtgtataaccactgcgaacacggctgtccaagacactgcgatggcaacgtatcttcttgcggggatcatccaagtgagggatgcttctgcccacctgataaggtgatgctggagggcagctgcgtgccagaagaggcctgcacgcaatgcatcggcgaggacggcgttcagcaccagttcctggaggcatgggtgccggaccaccagccctgccagatttgcacatgtctgtcaggcaggaaggtcaactgtaccacacagccctgtcccacggccaaagcacccacgtgcgggctgtgtgaggtggcaagactacgccagaacgctgatcagtgctgtcctgagtatgagtgtgtctgtgacccggtatcttgtgatttgcctcccgttccccactgcgagagggggctgcagccgaccctgacgaatcccggggagtgtaggccaaatttcacgtgcgcatgtcgaaaggaagaatgtaagagagtctccccaccgagctgcccccctcaccgcctgcccacccttcggaagacacagtgttgtgacgagtatgagtgtgcttgcaattgtgtaaatagtactgtgtcttgccctctgggatatcttgctagtaccgccacaaatgactgcggatgcaccactacaacctgtctccccgataaagtctgcgtccacaggagcactatctaccccgtcgggcagttctgggaggagggctgtgacgtgtgtacctgcaccgatatggaagatgccgtcatgggtttgagggtggcccagtgttcacagaagccctgtgaggacagttgtcgaagtggcttcacttatgttctgcacgaaggggagtgctgcggccgttgcttgccgtcagcatgtgaggtggtgacagggagtccccgtggagattctcaatcaagctggaaaagcgtgggcagccagtgggcttcgcctgaaaatccatgcctcatcaacgagtgtgtgcgcgtgaaggaggaggtgttcatccagcaacgcaacgtctcttgtccccagctcgaggtgccagtgtgccccagcggcttccagctgtcttgcaagacttcagcctgttgtccatcctgtaggtgtgagagaatggaggcctgcatgttgaacgggactgtcattggccccggcaagacagtgatgatcgatgtttgtactacgtgccgttgcatggtgcaggtgggcgtcatctccggatttaaattggaatgtcggaagactacctgcaatccgtgtcctctgggctacaaggaggagaacaataccggcgagtgttgtggaagatgcctgcctactgcctgcacaattcagctgcggggtggacagatcatgaccctgaagcgcgatgagactctccaggacggatgtgacactcacttctgtaaggtgaatgaacgaggggagtacttttgggagaagcgagtgacgggctgtcccccattcgacgaacataagtgtctcgcagagggcggcaaaatcatgaaaatacctggaacttgttgcgacacttgtgaagagcctgaatgtaacgatataaccgcgcggctccaatacgtcaaggtgggaagttgcaagtccgaagtagaggtagacattcattattgtcaggggaaatgcgcaagtaaagcaatgtattccatcgatattaacgacgtgcaggatcagtgttcctgctgctccccgacccgaaccgaacctatgcaggtcgctctgcactgcactaacggaagcgtggtgtaccatgaagtcttgaatgctatggagtgcaagtgctccccacggaaatgcagcaaa

SEQ ID NO: 12566 - DNA, 8439 bp, Artificial Sequence
  derived and/or modified sequence
atgatcccagcaagattcgctggtgtccttctagctcttgctctcatccttcctggaaccttgtgtgcagaggggaccaggggaaggagttcaacagcgagatgctcgctcttcggatcggacttcgtgaatacattcgacggaagcatgtatagcttcgccggatactgcagctacctgctggccgggggctgtcagaagagaagcttctctataatcggcgacttccaaaacggaaagcgggtcagcctgtcggtctatttgggggaattttttgatatacatctctttgtcaatggaaccgttacacagggagatcagcgggtgagcatgccctatgcctcaaagggtttgtacctcgaaactgaggctggatactacaaactttcgggggaagcttatgggttcgtggccaggattgatggtagcggcaattttcaagttctgctgagcgaccgatactttaataagacttgcggactgtgcggaaacttcaatatattcgccgaggacgattttatgacccaggaaggcaccctgacctccgacccttacgacttcgcgaacagttgggctctgtcaagcggagagcaatggtgcgaacgcgcctcaccaccgtcctcgagttgtaacatctctagtggcgaaatgcagaagggtttgtgggagcaatgtcaacttctcaagagcacgagcgtgtttgcccggtgtcacccactcgtcgacccagaaccatttgtggctctgtgtgaaaagactctgtgcgagtgtgccggagggttggaatgcgcctgtcccgccctgttggaatacgcccgaacatgcgcccaagaaggaatggttttgtacggttggacagaccacagcgcttgttcacctgtctgccctgccggaatggagtacagacagtgcgtgagtccctgcgctcggacctgccagagcctgcatattaacgagatgtgtcaggagagatgtgtcgatggttgctcttgccctgagggccagctgctggacgaaggtctatgcgtggagagcaccgagtgcccgtgcgtgcactccgggaagaggtacccgcccggaacaagcctgtcaagggactgcaacacatgtatctgtagaaatagccagtggatctgcagcaatgaagagtgtccgggtgagtgtcttgttacaggccagtcacactttaagtcttttgacaatagatacttcacattctctggcatctgccagtaccttctggcaagagattgccaggaccactccttctcgattgttatcgagactgtccagtgcgctgatgaccgcgatgctgtttgtactcggtcagtgaccgtgcgtttgcccggtttgcataattccttagtgaagctaaaacatggcgccggcgtggcgatggatggccaggacgtgcagctgccactgctgaaaggcgatttgagaatacagcataccgtcacagcgagcgtccgccttagctatggagaagatctgcagatggattgggatggtcggggaaggctccttgtgaagttatcacccgtgtatgcaggcaaaacctgcggcctgtgtgggaactacaatgggaaccagggagatgacttcctgacaccttcaggcctagccgagcctcgggttgaggacttcggtaatgcatggaagctccatggagattgccaggacttgcagaagcagcactctgatccctgtgccctgaaccctcggatgacgaggttctcagaagaagcttgtgctgttctgaccagccctacgtttgaagcctgccatcgggctgtgtccccacttccatatttacggaactgtagatacgacgtctgctcgtgttcggacggccgagagtgcctctgcggcgccttggccagttacgcagcagcatgcgcagggaggggcgtgcgggtggcctggagagagcccggtcgttgcgaacttaactgtcccaaaggccaggtgtacctacagtgcggtacaccctgcaacctgacatgccgctctctcagctacccagacgaagaatgcaacgaggcatgtctggagggatgcttctgtccccctgggctgtatatggacgagaggggagattgcgttccaaaagcacagtgcccttgctattatgacggcgagatctttcaacctgaggacattttctcagaccaccatacaatgtgctattgcgaagacggttttatgcattgcactatgagtggcgtgcctggaagcctgctcccagatgcggtgcttagctccccactatcccatcgctcgaagaggtccctgagttgtcggcctccgatggttaagttggtctgccccgccgacaacctgagggccgaaggtctggaatgtactaagacatgccagaattacgacctggaatgcatgagtatgggttgcgtaagcggatgtctctgccctccagggatggtgaggcatgagaatagatgtgtggcacttgaacggtgcccttgctttcatcaggggaaagaatacgcgccaggtgagaccgtcaaaataggctgtaacacgtgcgtctgtcaagaccgcaaatggaattgtactgatcacgtgtgtgacgctacatgtagcacaatcggcatggcacattaccttactttcgacggtctgaaatatcttttccctggcgaatgccagtatgtactggtacaggactattgcggctccaatccaggcacatttcggattctcgtggggaacaagggttgctctcatccctccgtgaagtgtaaaaagagagtcacaatcctcgtcgagggaggcgaaattgagcttttcgatggtgaggtaaacgtcaaacgcccaatgaaggacgagacccactttgaagtggttgaatcagggcgttatataattctgttgctggggaaggccctctctgtggtgtgggatcggcatctctcaatcagcgtggtactgaagcagacttatcaagaaaaggtatgcggactgtgtgggaacttcgacgggatacaaaacaatgatttgacttctagcaatcttcaggtcgaagaggaccctgtggatttcggcaattcatggaaggtgagtagccagtgcgcggacacccgcaaggttcctctagactcttcgcctgccacgtgccacaataatatcatgaaacagactatggtggattcatcctgtaggatcctaacatccgacgtgtttcaggattgtaacaagctggtagatccggagccatacctagacgtgtgcatatacgacacatgtagctgtgagtctatcggagactgtgcatgcttttgcgatactatcgcggcgtatgcacacgtgtgcgcgcagcatgggaaggtagtgacatggagaactgccacactgtgccctcaatcttgcgaggagcggaacctccgagaaaatggctatgagtgtgagtggaggtacaattcgtgtgcacccgcctgtcaggtgacctgccagcaccccgagccactggcctgccccgtgcagtgcgtggaaggctgccacgctcattgcccccccgggaaaatactggatgagctgttacaaacctgcgtagatccggaagactgccccgtgtgtgaagttgccggaaggaggttcgcttccggaaaaaaagtcacactcaatccttctgaccctgaacattgccagatctgccattgcgatgtcgtaaatctgacctgcgaggcctgtcaggagcccggaggattggtcgtccctcctacagatgctcctgtatctcccactaccctctatgtggaagacattagtgagcctccactgcatgacttttattgctcccgactactagatctcgtttttctgctcgatggatctagccggctaagtgaagctgagtttgaagtgctgaaagcattcgttgtggatatgatggagcgcctcagaattagccagaaatgggtgcgggtagcagtggtggaataccacgacggcagtcacgcatatatcggcctcaaagatagaaagaggccatcggagctcaggcggattgcttcccaggtcaagtacgctggcagtcaagtggcgtccactagtgaggtcctgaaatataccctgttccagatattttcgaaaatcgataggccggaggcgagtcggattacgcttctgttaatggcttcccaggagccccaacgtatgagtagaaacttcgttagatatgtgcagggtctgaagaagaaaaaagtaattgttattcccgtaggcattgggcctcacgcaaatctcaagcagatcaggctcattgaaaagcaagcacctgaaaacaaggccttcgtgctcagcagtgtggatgagctcgagcaacagcgggacgagatcgtgtcttatctttgtgacctggcccctgaggcaccgccccccactctgccacccgatatggcccaggtgactgttggcccaggtttgttgggcgtgtccaccctaggacccaagaggaacagtatggtgttagatgtggccttcgtgctggagggatcagataaaatcggagaggcagatttcaaccggtctaaggagtttatggaggaagttatccagaggatggatgtgggacaagattcaattcacgtaaccgtgctgcagtactcgtacatggtgacagtggagtatcccttttctgaagctcagagtaaaggagacatcctgcagcgcgtgcgcgaaatccgctaccagggcgggaatcgaaccaacacgggtttagcactgcgatacttatcagatcactcgttcttggtgtctcagggggatagggagcaggccccgaacctggtgtacatggtgactggaaacccagctagcgatgagatcaaacggctccccggggacatccaggtcgttccaataggggtcggtcccaatgcaaacgtccaggagctggaaagaattggttggccaaatgcaccaatccttatccaggacttcgagaccctgcctagggaggcgcctgatctggttctgcagaggtgttgttccggagaaggattacagattcctacattgagcccggcccctgactgttctcaacctctggacgtaatcctgcttctcgacgggtctagctcattcccagcctcctacttcgacgagatgaagagcttcgccaaggcattcattagcaaagcaaacataggccctcgcctgactcaggtctctgtccttcagtatgggtcaattaccaccatcgacgtaccctggaatgtggtgcccgagaaggcccacttgctgtccctcgtcgatgttatgcaacgtgagggcggcccgtcgcagataggcgatgccttggggtttgccgtgcgctaccttacatccgagatgcatggtgcacggccgggtgcctccaaagctgtggtgatacttgtgactgatgtttcagttgatagtgtcgatgcggccgcggacgcagcgcgcagcaacagggtgacagtgttcccaatcggcataggggatcgctatgacgctgcccagctccgtattctggcaggccccgccggggattcaaatgttgtgaagctgcagcggattgaggacttacctactatggttacccttggcaattcgttcctgcacaagctgtgctccgggttcgtaaggatctgcatggatgaggatggaaatgagaaaaggccgggtgacgtttggaccctgcctgatcagtgtcataccgttacttgccaaccagacgggcaaaccctgctgaaatcccaccgcgtcaattgcgatcgcgggctgcgaccgtcctgccctaactctcagagccccgtgaaggtcgaggagacatgtgggtgccgatggacatgcccctgcgtctgcacaggcagttccacccggcatatcgtcactttcgatggacagaacttcaaactcactggtagttgtagctatgtgcttttccagaacaaagagcaagatctcgaagtcatcctgcataacggggcgtgcagcccgggagcgagacagggttgcatgaagagtatcgaagtaaaacacagcgctctgtcggtggaattacatagtgacatggaggtgaccgttaacggccggctagtgtcagtaccctacgtgggcggaaatatggaggttaatgtgtacggagccatcatgcatgaggtgaggtttaaccatttggggcacatctttacattcactccacagaataatgagtttcagctgcagctgtctcctaagacctttgcgtcaaagacgtatggcttgtgtggtatctgtgatgagaacggtgccaacgatttcatgcttagggatgggaccgtcacaactgattggaaaacactcgtacaggaatggactgtacagaggcctgggcagacttgccagcctatccttgaggaacagtgcctggtgccggatagcagccactgtcaggtcctgttactgcctctttttgccgagtgccataaggtgctggcccccgccaccttttatgcgatatgtcagcaggattcctgccaccaggaacaggtttgtgaggtaattgcttcctacgctcacctgtgccgaaccaacggggtctgtgtagactggaggacgccagatttctgcgctatgagctgccccccttccctggtttataaccattgtgaacacggatgccctcgccattgtgatggaaatgtcagctcttgcggcgaccacccatctgagggttgtttctgtccgcctgataaggtaatgctcgagggctcctgcgtacctgaggaagcatgcacccaatgcatcggggaagacggcgtccagcatcagttcttggaggcctgggtccccgaccatcagccctgtcagatatgtacctgcctctccggaaggaaggtcaattgtactacccaaccttgtccgacggcaaaggcccccacgtgcggcctgtgtgaagtggcaagactgcggcagaacgcagaccagtgttgtcctgagtatgagtgtgtgtgcgatccagtcagctgcgatctaccccctgtgccccattgtgagagggggcttcagcctaccctcactaacccaggcgagtgcagacctaattttacctgcgcgtgccggaaggaggaatgcaaacgggtgagtcccccgagctgcccacctcaccggctgcccactctgcgtaagacccaatgttgtgatgaatacgaatgtgcttgtaattgtgtcaactccactgtgagctgccccttaggatacttagcctcaaccgcaaccaatgactgtggatgtacgacaacaacatgcctgccagataaggtgtgtgtgcatcggtccaccatatatcctgtcggtcagttctgggaggaagggtgcgatgtctgtacttgtacagacatggaggacgcagtgatgggattgagagtggcacaatgctcgcaaaagccctgcgaagactcatgtcggtccggctttacatacgtgctccatgagggggagtgttgcggcaggtgcctccccagtgcctgtgaggtcgtcaccggatccccacggggagactcacagtcttcctggaagtccgtcggctctcagtgggcttcccccgagaatccgtgcctgatcaacgaatgcgtccgggttaaagaggaagtgtttatccaacagcgtaacgtttcctgtccccaactggaggtcccagtatgcccttcggggtttcagctgtcatgtaagacctctgcttgctgtcctagttgccggtgcgaacgaatggaagcctgcatgctcaatggcactgtcatcgggccgggcaaaactgtcatgatcgacgtctgcaccacctgtcgctgtatggtacaggtcggtgtcatatccgggtttaagctggaatgccggaagactacttgcaacccgtgtccactgggttataaagaagagaataacacaggggagtgttgcggacgctgcctgcccactgcttgtaccatacaactcaggggcggacagattatgacactaaagagggatgagacgctgcaagacgggtgcgatacccacttctgtaaggtaaatgaacgcggagagtatttctgggagaaaagagtaacaggctgcccacctttcgatgagcacaagtgtctggctgaaggcggtaaaatcatgaagatccctggaacttgctgtgacacgtgcgaggaaccagagtgcaacgatatcacagcgcgattgcagtatgttaaggtcgggtcctgtaaatctgaggttgaggtggacattcactactgtcagggtaagtgcgcaagtaaagctatgtattccatcgatataaacgacgtgcaggatcaatgctcctgctgcagtcccactagaactgagcctatgcaggtggcccttcattgcacgaacgggtcggttgtgtatcacgaggtactgaacgcaatggaatgtaagtgttccccgaggaaatgttccaaa

SEQ ID NO: 12567 - DNA, 8439 bp, Artificial Sequence
  derived and/or modified sequence
atgattccagcccggtttgcgggcgttcttctggctctggctctaatattaccaggtaccctatgcgccgagggcacaagggggcgaagtagcactgccaggtgctcactgttcggctctgatttcgtaaatacattcgatggatccatgtactccttcgctgggtattgttcttatttgctcgccgggggatgccagaagaggtctttcagcatcattggcgattttcagaatggcaagagagtgtcactgtctgtctatctcggtgagttcttcgatattcacttattcgtcaacggcaccgtcacccagggggatcagagggtatccatgccgtacgccagtaagggcctgtatctggagactgaggccgggtactataaacttagcggtgaagcgtacggtttcgtcgcgcgcatcgatggaagcggcaacttccaggtcctcttgagcgaccggtattttaacaaaacgtgcgggttatgtgggaatttcaatatattcgcggaagatgacttcatgactcaggaggggaccctgaccagcgacccctatgatttcgcgaacagctgggccctgagctctggagagcagtggtgtgaacgggcatcccccccatcctcatcctgtaatatctccagcggcgaaatgcagaagggcctgtgggagcagtgccagttgctgaagtcgacttccgtctttgcccggtgtcaccccctcgtggacccagaaccttttgtagctctgtgcgaaaaaaccctttgcgaatgcgctggaggcctggaatgtgcctgtccagctctgctggagtacgcccgcacatgtgcccaggagggtatggtcctttatggatggacagaccattctgcatgcagtcccgtctgtccagctggcatggagtacagacaatgtgtgtccccttgcgcccgtacttgccagtcccttcacataaacgagatgtgtcaggagcgttgtgtggacggttgtagctgtccagaaggtcaacttttggacgaggggctatgcgtcgagtccacagaatgcccttgtgtgcacagcggaaaacggtatcctccaggtacatcactgtcccgcgattgcaatacatgtatttgcaggaacagccagtggatttgcagcaatgaggagtgcccgggggagtgtttggtgactggtcagtcccactttaaatctttcgataataggtactttactttctcaggtatatgccagtacctcctcgcccgggactgtcaagatcattccttctctatcgtgattgagaccgttcagtgcgccgatgaccgagacgctgtgtgcaccagatccgtgactgtgcgactccctggactgcacaatagtcttgtcaaattgaaacacggtgctggagtggcaatggatggccaggacgtccagctgcccctgctgaaaggtgatcttcgcattcaacataccgtaacagcctcagtgcgactgtcatacggcgaagatctacagatggattgggacggccgtggcagacttctggtgaaattatctccagtgtacgctggaaaaacatgtggcctctgcgggaattataatggcaaccaaggggatgactttctcaccccgtctggacttgccgaaccccgcgtcgaggattttgggaacgcttggaaacttcacggggactgtcaagatcttcagaaacagcactccgatccttgcgccttaaatccccggatgacccggttctcagaggaagcctgtgccgtacttacatctcccacattcgaagcttgccatagagccgtatctccactcccatatctaagaaactgccgatacgatgtttgtagctgcagtgacggacgcgaatgcctctgtggcgctttggcttcttacgccgccgcctgtgcgggcagaggtgtccgggtggcctggagggaaccagggcgttgtgagctgaactgtccgaaggggcaggtgtacctacagtgcgggaccccctgtaaccttacatgtcgcagcctatcttacccagatgaggagtgcaatgaagcctgcctagaggggtgtttctgtccacctggattgtacatggacgagcgaggagactgtgtcccgaaggcacagtgcccatgctattacgatggcgaaatcttccagcctgaagatattttcagtgatcaccacaccatgtgctactgtgaagatggctttatgcattgtactatgtcgggagtccctggatccctccttcccgacgccgtgctgagctctccactatctcaccgaagcaagcgatcactatcctgcaggccccctatggtcaagttggtttgcccagccgataatctgcgggctgagggcctggagtgcactaaaacctgtcaaaactatgacctcgaatgtatgtccatggggtgcgtgtccgggtgcctatgtccacctggcatggtgagacacgaaaatcggtgcgttgccctcgagcggtgcccctgctttcaccaaggtaaagaatacgccccaggggagaccgtgaagattggctgcaacacctgcgtttgccaggaccggaaatggaactgcaccgaccacgtgtgcgacgccacctgctctacaataggcatggcccattacttgacattcgatgggcttaagtacctatttcccggggagtgccagtatgtgctcgtccaagattattgcggatctaaccctgggacattcaggatcttagtgggaaacaaggggtgtagccatccatcggttaagtgcaagaagcgggtgaccatcctcgtcgaaggcggggagatcgaactgttcgatggcgaggtgaacgtcaagcgccctatgaaggacgaaacccacttcgaagtagtggaaagcggccgctatatcattcttctccttggcaaggcgttatccgtcgtgtgggatcgtcacctgtctatctcggtcgtactgaaacagacataccaggaaaaggtgtgcggactctgcggcaactttgatggcatccagaacaatgacttgacatcctctaatctgcaggtggaggaggacccggtcgacttcggtaactcctggaaagttagttcacagtgtgccgatacccgcaaagttcccctggactcttcgcccgcaacatgtcataataatattatgaaacagactatggttgattcctcttgtcgtatattgactagtgacgtctttcaggactgtaataaactggtggatccagaaccatatctggacgtctgtatctatgatacatgcagctgtgagagcataggcgattgtgcttgcttctgcgatacgatcgctgcctatgcacacgtgtgtgcccagcacggaaaggtggtaacctggaggacagctactttatgcccccagagttgtgaagagcgtaatttaagagaaaatggatacgagtgcgagtggcggtataattcctgcgcccccgcctgtcaggtaacctgccagcaccctgagcctctggcctgccctgtgcaatgcgtcgaagggtgccacgcgcattgcccccctggtaagatcctggatgaattactgcagacctgcgtggacccagaggactgccccgtttgcgaggtcgcaggtaggcgttttgctagtggtaagaaggtgacgttgaatcctagcgacccagagcactgtcaaatctgtcactgcgacgtagtgaatcttacctgcgaggcatgccaagagcccggaggcttagtagtcccacccacagatgccccagtcagccccaccaccctgtatgttgaggatatctccgagcctcccctccatgatttttattgtagccgcctgttggatctcgtgtttctgcttgacgggtcatcccgtttatccgaagcggagttcgaagtgctcaaagccttcgttgtggacatgatggaacggttgcgcatctcacaaaagtgggtgcgcgtggccgtcgtagaataccacgatggaagccacgcttacataggcttaaaggaccgcaaacgtccctcagagttacgccggattgcgtcccaggtaaagtatgcgggatctcaggtggcttccacatctgaagtactgaagtatacactgttccagatctttagtaaaatcgacagacccgaagcttctcggattacccttctgctcatggcaagtcaagaacctcaaaggatgtcacgcaactttgtgagatatgttcaggggctgaagaagaaaaaagtcattgtaatcccagtgggaatcgggccacacgcgaacctgaagcagatacgattaattgaaaagcaagcacctgagaataaggctttcgtgcttagttctgttgacgaactggagcagcaacgagacgagatcgtaagttacctgtgcgatctggctccagaagcccctcctcctactctgcctccagatatggctcaagttacagtaggtccggggttactaggcgtttcgaccttaggaccaaagcgcaatagcatggtgcttgacgttgctttcgtgttggagggcagcgataagatcggagaagcggacttcaataggtccaaggagttcatggaggaggttattcagaggatggacgtcggtcaggattcgatccatgtgaccgtgctgcaatatagttacatggtaacggtcgagtacccgtttagtgaggcccaaagcaagggcgatatactacagcgcgtgcgggagatcagatatcaggggggaaaccggacaaacacaggactggccctcaggtacctttcagatcatagcttcctggtgagtcagggcgatcgagagcaggcccccaatctggtgtacatggtaacaggtaatccagcgtcggatgaaattaaaagactgcccggcgacatccaggtggttcctattggggtcgggcccaatgccaatgtgcaggaattggagagaatcggctggccaaatgcccctatcctgattcaggacttcgagacacttccaagagaagcccctgacttagtcctgcagcgctgttgtagcggggagggtctgcagataccaacactgtcccccgctcccgattgtagccagcccttggatgtaatactgctcctggacggtagcagtagcttccccgcctcctatttcgacgaaatgaaatccttcgctaaggcattcatttccaaggctaatataggtccacgtttgactcaggtgtccgtgctgcagtacggctccattactaccattgacgtaccgtggaatgtagttcctgagaaggcccatctcctgtccttggttgatgtgatgcaacgtgaggggggccccagtcagattggagacgctctgggctttgcagtgagatatctcacatctgagatgcatggagctcgaccaggagctagtaaagccgttgtgatcttggtcaccgacgtgtcagtcgactctgttgatgctgctgcagacgcagcaagatccaatagagtgacagtgttccctatcggcatcggcgaccgctacgacgccgcccaactgcgcatcctggctggacccgctggcgattcaaatgttgtgaagctccagagaatcgaggatctgcctaccatggtgacactgggcaacagtttcctccacaagctgtgtagtggctttgtgcggatttgcatggacgaagatggcaatgagaagcggccgggagatgtgtggactctgcctgatcagtgccacaccgttacttgccaacccgatggtcagactctgctaaagagccaccgcgtgaactgcgatcgcggtctcaggccttcatgcccaaactctcagtccccagtgaaggtggaagagacatgcggctgtcggtggacctgtccttgcgtttgcactggatccagcactagacatatagttaccttcgacgggcagaattttaagttaactggtagctgttcctacgtgctattccagaacaaagagcaggatctcgaggtgattctgcacaatggtgcgtgctccccaggagctcgtcagggatgtatgaagtcaattgaggtgaaacatagtgccctcagtgtagaactccatagcgatatggaggtcaccgtcaatgggcgactcgtcagtgtcccatatgtgggtggtaacatggaggttaacgtctatggagcgattatgcatgaagttagattcaaccacctgggccacattttcactttcacgcctcagaataacgaatttcaactgcaactgtcacccaaaacattcgccagcaagacctacggcctgtgtggcatctgcgatgaaaatggagccaatgattttatgttaagagatggcaccgtgacaactgactggaagactctcgtccaagagtggaccgtacaacgccccggtcaaacttgtcagcccattttagaggagcagtgcctcgttccagattctagccattgtcaagttttgctactgcccctgtttgccgaatgtcataaagtgttggctccagccacgttctacgctatatgccaacaggactcttgtcatcaggagcaggtatgtgaggtgatcgctagctatgctcatctctgtagaacaaatggagtgtgcgtcgattggcgaacacccgacttttgtgcaatgtcgtgccccccaagtcttgtgtacaaccattgcgagcatggttgcccgcgtcattgtgatggtaatgtgtctagctgcggcgaccacccatcagagggctgtttttgccccccagacaaggtaatgctagaaggttcatgtgtgccagaagaggcctgtactcaatgtatcggagaggatggtgtccagcaccagtttcttgaagcctgggtgcctgaccaccagccgtgccagatttgcacatgcttatcggggcgcaaagtgaattgtactactcagccatgcccaaccgctaaagctccgacgtgcggtctctgtgaggtagcccggttacgccaaaacgctgaccagtgctgtcccgagtacgagtgcgtgtgcgatcccgtttcatgcgacctgccacctgtcccacactgcgagagaggcttacagccaacactgaccaaccccggagagtgccggccaaatttcacgtgtgcctgcaggaaggaggaatgtaaacgagttagcccgcctagctgtcccccccaccgtctgccgaccctgaggaagacgcagtgctgtgacgagtacgaatgcgcatgtaactgcgtaaactctactgtctcttgcccccttggttacctagcttctactgccacaaacgactgtgggtgtacgaccaccacttgcttgccagacaaggtgtgtgtgcacaggtccaccatctaccccgtgggccagttttgggaggagggctgcgatgtgtgcacctgcaccgacatggaagatgccgtcatggggctgagggtcgctcaatgcagccagaaaccttgtgaggatagttgcaggagtggttttacctacgtgctgcacgagggggaatgctgtggcagatgcctgccgagcgcttgtgaagttgtgacaggatctcctagaggcgatagccagtcatcctggaagtccgtcggatcccagtgggccagtccagagaatccttgtttgatcaatgagtgcgttcgggtgaaggaagaagtgttcattcagcagagaaatgtttcatgccctcaattagaggtgcccgtctgtccatcgggtttccagctctcttgtaagacatcagcgtgttgcccctcatgccgttgtgaaagaatggaagcttgcatgctcaacggcactgttatcggccccgggaaaactgtgatgattgacgtgtgtaccacctgtagatgtatggtgcaagtaggcgtgatcagtgggttcaaactcgagtgcaggaaaaccacctgcaacccatgcccgctgggctataaggaagaaaacaatacgggtgagtgttgtggccggtgcctgcctaccgcatgcaccatccagctgcgcggaggacagatcatgaccctgaaacgagatgaaacactgcaagatggatgcgacacacatttttgcaaggtcaacgaaagaggcgagtacttctgggaaaagagggtcactggttgtccgccctttgacgaacataagtgtctggccgaaggcggaaaaatcatgaaaattcccggtacctgctgcgacacctgtgaggaacccgagtgcaatgacattaccgctagactgcaatatgtgaaggttggcagttgtaaaagtgaggtggaggttgacatccactattgccaaggcaaatgcgccagcaaggcaatgtactctattgatattaacgatgtccaggaccagtgttcctgctgctcgcctacgcggaccgaaccgatgcaggtggctctccattgcactaatggaagcgttgtatatcacgaagtgcttaacgccatggagtgtaagtgctcaccccgcaaatgctctaaa

SEQ ID NO: 12568 - DNA, 8439 bp, Artificial Sequence
  derived and/or modified sequence
atgatcccagcccgattcgctggagttctcctcgcactggcccttatcttgcccggcacactgtgtgctgagggcacccggggaagatcttccacggccagatgcagtctgttcggctcagatttcgttaacactttcgatgggagcatgtatagtttcgcaggatactgttcttatctcctggccgggggctgtcagaagagatctttctcaattattggcgactttcagaatggaaaacgagtgtctctctctgtgtacctgggagagtttttcgacatacacttgttcgtgaacggaactgtgacacaaggagaccagcgggtgtccatgccttatgcctccaagggcctgtacctggagacagaggcaggctactataagctctctggcgaagcttacggatttgtggcacgaatcgatgggtcagggaatttccaggtcctcctcagtgatcggtatttcaataagacttgcggattgtgtggcaattttaacatattcgctgaggacgacttcatgactcaggagggaacactgacaagcgatccttatgattttgctaacagttgggccctgtcatccggcgagcagtggtgcgaacgagcgtctcctccctcttcttcctgcaacatatcttcaggtgaaatgcaaaagggcctgtgggagcagtgccaattgctgaagagtacttcagtttttgcacgatgccacccacttgtggatcccgagcctttcgtggctctgtgcgaaaaaactctgtgtgagtgtgcaggcggcctggaatgcgcttgccctgctctgttggagtatgctcgaacctgtgcacaggagggaatggtcctttacggatggactgaccatagtgcctgctcccccgtatgccctgcgggaatggagtacagacagtgtgtgagcccctgtgcccgaacatgccagtccctgcatatcaatgagatgtgtcaagaacgatgtgtggacggatgtagctgtccagagggtcagctgctggacgaggggctttgcgtggagtccactgagtgtccatgcgtgcactcagggaaacgctatccccctggtacctcactgagtagggactgtaacacgtgtatctgtagaaacagccaatggatctgtagcaacgaggagtgcccaggggagtgcctggtgactggccaatctcacttcaagtcctttgacaaccgatatttcacattttcaggaatttgccagtacctcctcgctcgggactgccaggatcattccttcagtatcgtgatcgagactgtgcagtgcgctgatgaccgcgatgccgtctgtacacggtctgtgaccgtgcggctgccagggctccacaactctctggtgaagctgaaacacggtgcaggggtggcaatggacggccaggatgtgcagcttcctctgctgaagggcgacctcagaatccaacataccgttacagcttcagtaagactcagttacggagaagaccttcagatggactgggacgggcgcggaaggctgctcgtcaaattgtcccctgtatacgctggcaaaacatgcgggctgtgcggaaattataatggcaatcagggcgatgactttctgactccatctgggctggccgagcctcgggtggaggactttggtaacgcatggaagctgcacggagactgtcaggacctgcagaagcagcactctgacccttgcgctttgaatccccgaatgactcgattttcagaagaggcctgcgctgtactgacttctcctactttcgaagcgtgtcatagagccgtgagcccactgccctaccttcgcaattgtcggtatgacgtatgttcttgctccgacgggagagagtgcctctgcggtgcgctggcctcctatgccgccgcctgcgcggggagaggggtgagagtggcatggagagagcccgggagatgtgaattgaactgtcccaagggccaagtatatctgcagtgcggcacaccatgcaaccttacctgtaggagcttgagctaccccgatgaagaatgcaacgaagcttgtctggaggggtgcttctgccccccaggcctgtacatggatgagcgaggggattgcgtcccaaaagctcagtgcccttgctactacgacggcgagatttttcagcccgaggacatctttagtgatcatcacaccatgtgttactgcgaggatggcttcatgcattgtactatgtctggcgtgccaggcagcttgcttcctgatgcagtgctgagctctcctctgtctcaccgctctaagcggagcctgtcctgccggccccctatggtaaaactggtgtgccccgccgacaatctgagggcagaaggtctggagtgtaccaagacttgccagaactacgacctcgagtgcatgtccatgggatgcgtctccgggtgcctctgccctccaggtatggtgcgccacgaaaacagatgcgtcgccctggagcggtgcccttgcttccaccaggggaaagagtacgcacccggtgagactgtgaaaatcggatgcaatacctgtgtatgtcaggataggaagtggaattgtacagaccacgtgtgtgacgccacatgtagcaccattggcatggctcattatctgacgtttgacggcctgaagtacctcttccccggagagtgtcaatacgtactggtccaggattactgtggaagtaaccctgggaccttcaggattctggtgggcaataaggggtgtagccatcccagtgttaagtgcaagaaacgcgtgacgatactggtggaaggcggcgagattgagctgttcgacggtgaggttaacgttaagcggcccatgaaggatgagacccatttcgaagtagtcgaatccgggagatacatcatcctgctgcttggcaaggcactgagtgttgtgtgggatcggcacctgtccatctccgttgtgctgaaacagacataccaggaaaaggtgtgtggactttgcgggaattttgatggaatccaaaacaacgacctgaccagtagtaacttgcaggtggaggaagacccggtggactttgggaatagttggaaagtgagctcccagtgtgctgataccagaaaagtaccccttgattcatctccagccacatgccacaataacataatgaagcagaccatggtggatagtagctgtaggattctgacttctgatgtgttccaggattgcaacaagctggttgatccggagccttatctggatgtgtgcatctacgatacttgctcctgtgagagtataggagactgcgcatgtttttgtgataccattgcagcctacgcgcacgtttgcgcacagcacggcaaagtggtcacatggagaactgccacattgtgtccgcagagctgcgaggagagaaatctcagagagaacggatatgagtgcgagtggcgatacaactcttgtgctccggcctgccaggtgacttgtcagcacccagaaccgttggcatgtccggtacagtgcgtggaaggttgtcacgcccactgcccccctggaaagattctggacgaactcctgcagacttgtgtggaccccgaggactgtccggtgtgcgaagtggccggtcgcagattcgcgagtggaaaaaaggtgaccctcaacccctccgaccccgagcactgtcagatctgccactgtgacgtcgttaatctcacctgcgaggcctgccaggaacctggggggctggtagtgcctcctactgacgcaccagtcagtccaactaccttgtacgtcgaggacattagtgaaccgcccctgcatgacttctattgctctcgactcttggatctggtttttctcctggatggcagttcacgcctgtctgaggcagagttcgaagtcctgaaggctttcgtggtagatatgatggagagactcaggattagtcagaaatgggtcagagtcgctgtcgtggagtaccacgacggctctcatgcttatattggactcaaggaccggaaaaggccttcagagttgagaaggatcgcgtctcaggttaagtatgctggttcacaagtggcatccactagcgaggtacttaaatatactcttttccaaattttctccaagatagatagacccgaggcttctaggatcacgctgctgctgatggccagccaggagccacagcggatgtctagaaattttgtgcggtacgtgcagggccttaagaaaaaaaaggtcatcgtcattcccgtaggcattggtcctcacgctaatctgaagcagattcgcctgatcgaaaagcaagcaccagagaacaaagcatttgtcctcagcagcgtggacgagctggagcagcaaagggatgagatcgtgagttatctttgcgatctcgccccggaagctccgccccctacgctcccccccgacatggctcaagttactgtggggcctggtctgctcggtgtgagtaccctgggccccaaaagaaactcaatggtgctcgacgtcgcctttgtcctggaagggagcgacaaaatcggagaggccgacttcaacagatccaaggaattcatggaggaagttatccagaggatggatgttggtcaggattccatacatgtgactgtgctccagtactcctacatggttaccgtagagtatccattctctgaagcacagtctaagggtgatattctccaaagagtccgagagatccgctatcaggggggcaatcgcaccaacactgggttggccctccgctacctgagtgaccatagtttccttgtatcacagggagaccgcgagcaagctcctaacttggtttatatggtgacaggcaaccccgccagcgatgagatcaagcgcctcccaggcgatatccaggtggtgccaattggagtaggccctaatgccaacgtgcaggagctggagaggatcgggtggcccaacgcccccatactcattcaggattttgaaacgcttcctcgagaggcaccagacctggtcctgcagaggtgctgttccggtgaaggactgcaaatacccaccctgtctcccgcccctgattgcagtcagcctctggacgttatcctcctgttggatggatccagtagctttcccgcttcttacttcgacgagatgaaatcattcgcgaaagcgttcatctccaaggccaacataggccccagactgacgcaggtctctgttttgcagtacggctcaatcaccaccattgacgtgccctggaacgtggtgcctgaaaaggcacatttgttgagcctggtggatgtcatgcaaagggaagggggcccttcccagataggggacgcactcggatttgcggtgcgatacctgacgtccgagatgcatggggcccgaccaggcgccagtaaagccgtagtgatactggtgacagacgtctcagtggactctgttgatgctgccgcagatgcagcccgctctaatcgggtcactgtcttccctattggcataggtgaccggtacgatgcggctcagctcagaatactggccggaccggccggtgattccaacgttgtgaaattgcagagaatcgaggacttgccaaccatggtgacacttggaaattcttttcttcataagctctgcagtggatttgtgcggatttgcatggacgaagacggaaacgaaaagaggcctggggacgtgtggactttgcctgaccaatgtcacacagtgacctgccaacccgacggccagactttgctcaagagccaccgcgtgaattgtgacaggggcctgaggccaagttgccccaatagccagtccccagtgaaggttgaggaaacatgcggatgtagatggacatgtccctgtgtgtgtaccggaagctctactagacacatcgtgacttttgacgggcagaacttcaaactgacaggcagctgttcttacgtgctgttccagaacaaagaacaggaccttgaagtgatccttcacaacggagcttgctctccgggcgctagacagggttgcatgaaatcaatcgaggtgaagcattccgctttgtctgtcgagttgcactccgacatggaggtaaccgtgaatgggcgcttggtaagtgtgccttatgtcggagggaatatggaggtgaacgtgtatggggccatcatgcatgaggttagattcaatcatctgggacacattttcacattcacaccacagaacaacgagtttcaactccagcttagcccgaaaactttcgcttcaaagacctatgggctctgcggcatctgtgacgagaacggggccaacgatttcatgctccgcgacggtactgtaactaccgattggaagactctcgtgcaggagtggaccgttcaacggcccggacagacctgtcagccgatactcgaggagcaatgcttggttcctgactccagtcactgtcaggtcctgcttttgcctctcttcgccgagtgtcacaaagtgctcgcccctgctacattctatgctatttgccaacaggacagttgccatcaggaacaggtgtgtgaggtaattgcaagctacgcacatctgtgtagaacaaatggcgtgtgtgtcgattggcggacgcctgacttctgtgctatgagttgcccaccatcactcgtgtacaaccattgtgagcacggctgtccaaggcattgcgacggcaacgtcagttcttgtggggatcacccaagtgagggatgcttttgtccgcctgacaaagtcatgctggaaggcagctgcgtcccagaggaggcttgcacccagtgtatcggggaggatggcgtccagcaccagttcctggaggcctgggtgcctgatcatcagccatgtcagatttgcacctgtctctctggccgaaaggtgaactgcacaactcagccctgcccaactgctaaagcccctacgtgtggcctctgtgaagtggcaagactgcggcagaacgccgaccaatgttgccctgagtatgaatgtgtttgcgaccctgtttcttgcgacctgccccctgtcccccactgtgagcgcggtctgcagccaaccttgacaaatcccggggaatgtcggcctaatttcacatgtgcttgccgcaaagaagagtgcaagcgggtaagcccaccctcttgtccaccccataggcttccaacacttaggaaaactcagtgttgcgacgaatacgaatgcgcttgcaactgcgtaaatagcaccgtgtcctgtccattggggtacctggcaagtaccgctaccaacgattgcggctgcacaactaccacttgcttgcccgacaaggtctgcgttcaccggtccacaatctatcctgtaggccagttttgggaagagggttgtgatgtgtgcacttgcaccgacatggaggatgccgtgatgggcctcagggtcgcccagtgcagtcaaaaaccatgcgaagattcctgtcgatcagggtttacttatgtcctgcatgaaggcgagtgttgtggccggtgccttccttctgcttgtgaggtcgtgactggctcaccacgcggagattcccaaagtagctggaagagtgtgggaagtcaatgggcctcacccgagaatccttgcctgatcaacgagtgcgttcgcgtgaaagaggaggtctttatccaacaaagaaacgtgtcctgtcctcaactggaggtgcccgtgtgcccctctggctttcaactgtcctgcaagacaagcgcatgttgccccagttgtcgatgcgagagaatggaagcttgtatgctgaatggcactgtcataggccctgggaaaacagtgatgattgacgtgtgcaccacctgccgctgcatggttcaggtcggtgttatctctggcttcaagttggagtgtcggaagaccacctgcaacccttgtccactgggatataaggaggaaaataacactggagagtgttgtgggagatgtctgcccacagcctgcactattcagctgcgaggaggccagattatgacactcaaacgggacgagacacttcaggatgggtgcgacacacacttctgcaaagtgaacgagcggggagaatatttttgggagaagagagttacaggatgccctccatttgacgagcataaatgtttggccgaagggggcaaaataatgaaaattccaggtacctgttgcgacacatgtgaggagcccgaatgtaatgacattaccgcgcggctgcagtatgtgaaggtaggtagctgcaagagcgaagttgaggtagatatccattactgtcagggaaaatgcgcatccaaagccatgtacagcatcgatatcaatgacgtgcaggaccaatgctcctgttgctctcccacacgcaccgaaccaatgcaggtggccttgcactgcactaatggcagtgtcgtctaccacgaagtgttgaatgcgatggagtgcaagtgctccccaaggaagtgtagtaaa

SEQ ID NO: 12569 - DNA, 8439 bp, Artificial Sequence
  derived and/or modified sequence
atgatccctgctcgatttgccggggtacttcttgccctggccttgatcctccccggaaccctttgcgccgaagggaccagggggcgctcctctacagcacggtgttcgctcttcggatctgatttcgtcaacaccttcgatggtagcatgtacagctttgcaggatattgctcatacctgcttgctggggggtgtcagaaacggagtttcagcatcatcggagactttcagaacgggaagcgagtgagcctatccgtctatctaggagaattttttgacattcatctatttgtgaatgggaccgtaacgcagggtgaccagagagtgagtatgccttacgcttctaagggcctttaccttgagaccgaggcagggtattataaactcagtggagaagcatatggtttcgtagctcggattgatggctcaggaaatttccaagtgttgttgtcagacaggtactttaataagacctgtgggctctgcggaaactttaatatatttgccgaggacgactttatgacgcaggagggcaccctgacctccgacccatatgactttgcaaactcctgggccctgtcctctggagaacagtggtgtgagcgagcgtcaccaccctcttcaagctgcaacattagttcaggggagatgcagaaggggctgtgggagcagtgtcagctattgaagtccacatcagttttcgctagatgtcatccactggtggacccagagccctttgttgccctgtgcgaaaagaccttgtgcgaatgcgccggcggactcgagtgtgcatgtcccgcgcttctcgagtacgcaaggacttgcgcccaggagggaatggtgctctacggatggaccgaccactctgcgtgcagtcccgtgtgtcctgccggcatggagtatcgccagtgtgtaagtccttgtgccagaacttgtcaatcactccatatcaacgagatgtgtcaagagcggtgcgtggatgggtgctcttgcccagagggccagctcctggacgaagggttatgtgtggagtccacagaatgcccttgtgtgcactctggcaaacggtacccaccagggacgagtctgagccgcgactgcaatacttgtatttgccggaattcccagtggatttgctcaaacgaggagtgccctggtgagtgtttggtgacagggcagtctcacttcaaatccttcgacaatcgttacttcactttctccgggatatgccagtatctattggcccgggattgtcaggatcattcgttcagtatcgttattgagacggtccaatgcgccgatgaccgtgatgctgtttgtacacgcagcgtgaccgtgaggttaccaggacttcacaatagcctggtcaaactgaagcacggcgctggcgtagcgatggacggacaggacgtgcagcttcccctgctgaagggcgatctgaggatccagcacaccgtaactgcttctgtccgtttaagctatggtgaagacctacagatggactgggatggacggggacggttactcgtcaaactctccccagtatacgccggaaaaacatgtggcctttgtgggaactataacggcaaccagggagacgacttcctgacccccagcggtcttgcagagccaagggtggaggatttcggaaacgcctggaaacttcacggagattgccaagacctacagaagcagcactccgacccctgtgcactgaaccctcggatgacccgattctctgaggaggcctgcgcagtactcacgagcccgacttttgaggcctgccaccgcgccgtgtcccctctgccttacctaagaaattgccgctacgatgtatgtagttgctctgatggtcgtgaatgtctgtgtggggctctggcaagctacgccgcagcgtgtgcaggtcgaggggtccgtgtcgcttggcgagagccagggcggtgcgaattgaattgccccaaaggacaggtgtatctgcaatgcggtacaccctgcaacttaacttgcagaagcctctcgtatcctgacgaagaatgcaatgaggcatgtctggagggctgcttctgccctcccggtctgtacatggacgagaggggggattgtgtccccaaggctcagtgcccatgttattacgacggggaaatcttccaacctgaggacatttttagtgaccaccataccatgtgctactgtgaggatggttttatgcactgcacgatgtccggtgtgccaggttccttgcttcctgatgcagttctaagcagtcccctaagccatcggtctaagcggagtctgagttgccgcccccccatggtgaagctcgtctgcccagcggacaacctgagggccgaaggcctggagtgcacaaaaacctgtcagaactatgatctggaatgcatgtccatgggatgcgtttccggctgcttgtgccctccaggaatggtccgccatgagaacaggtgtgtagccctggagagatgcccatgttttcaccagggcaaagaatacgctcccggcgagacagtcaaaatagggtgcaatacctgtgtctgccaggatcggaagtggaattgcacagaccacgtctgtgacgccacatgtagcaccattggcatggctcactatctaacattcgacggcctgaagtatctatttcccggggaatgccagtacgtactggtccaggattactgcggctctaatccagggacatttcgaattctagtgggaaacaaagggtgcagtcatccttctgtcaagtgcaagaaaagggttaccatcctggtggagggtggcgagatcgagctctttgatggtgaagttaacgttaagagacccatgaaggacgaaacccatttcgaagtggtagagtcaggacgctacattatacttctgttgggcaaggccctatcagtcgtgtgggaccgccacctgtctatatctgtggttttgaagcagacgtatcaggagaaagtctgcgggctatgcgggaacttcgatggcattcagaataatgatctgacctccagcaatctgcaggttgaggaggaccccgtcgacttcgggaactcctggaaggtctccagccagtgcgcagacacccggaaagttcctctggatagcagtccggcaacctgtcataataatataatgaaacaaactatggtggacagctcctgcagaattctcacttccgacgtgtttcaggattgcaacaagctggtagacccggagccatatctggatgtgtgtatttacgatacctgctcctgcgaatctattggtgactgcgcatgcttttgcgacaccatcgccgcttacgcccacgtctgtgcacagcatggcaaagtcgtgacctggcgcacggctacattatgcccccagtcttgcgaagaacggaacctgcgggagaatggctatgagtgtgaatggagatacaattcctgcgctccggcttgccaggtaacatgccagcatcctgagcctctagcctgtcctgtgcagtgtgtggagggctgccacgctcactgccctccaggtaagattttggacgaactcctgcaaacttgtgttgacccagaggactgtccggtctgtgaggtcgctggtcggaggttcgctagcgggaaaaaagtcactctgaacccaagcgacccagagcattgccagatctgccattgtgatgtggtgaatttgacatgcgaagcctgccaggaaccaggcgggttggtcgtccccccgactgatgccccagtcagcccaacaactttgtacgttgaggatatttcagagccacctctgcacgacttctattgttcgcgactgctggacctggtgtttctgctggacgggtctagccgtctcagtgaggctgaattcgaggtacttaaagcctttgtggttgatatgatggagcgcctgcgaatcagtcagaagtgggtaagagttgccgttgtggaataccatgatgggtctcacgcgtacatcgggctaaaggacagaaagaggccctccgagctgagacgcattgcctcacaggtgaagtacgccgggtcgcaggtcgcgagcacctccgaggtcttgaagtacactttgttccagattttttctaaaatcgatcgtcccgaggcctcgagaattacattgctactcatggcgtctcaagagccacaacgcatgagcagaaacttcgtgaggtacgttcagggactgaagaagaagaaagtgatcgtgatccctgtgggtattggcccacacgctaatctcaagcaaatcagactgatcgagaagcaggccccagagaacaaggcatttgtccttagttcggtcgacgagctcgaacagcagcgcgatgagatcgtcagttacctctgcgatctggctcccgaagcaccccctccgaccctccctcccgacatggcccaggtcacagtcggtcccggcttattgggcgtgtcgacactgggccccaagaggaactctatggtattggatgtggccttcgtattggaaggatctgacaaaattggggaagccgatttcaatcgttctaaggagttcatggaggaagttatccagaggatggacgtaggtcaggatagtattcacgtcaccgtgctgcagtactcttatatggtgactgtggagtaccccttctccgaggcccagtcgaagggagatatcctccagagggttcgcgaaattcggtatcaggggggcaatcggaccaacaccggccttgcactacgttacctgagtgaccatagctttcttgtgtctcagggagacagggagcaagctccgaatctggtgtacatggtcactggcaatcccgcaagtgacgaaataaaaaggttgcccggggatattcaagtggtgccgatcggggtcgggcccaatgctaacgttcaggaactcgaaaggattggctggcctaatgctccgatcctaatacaggattttgaaacactaccacgggaggcgcccgatctggtgctccagcggtgttgctctggagagggacttcagattcctactctcagccctgcccccgactgctcccaacccctcgacgtgattctgcttttggacggctcttcctctttccccgctagctacttcgacgaaatgaagtcattcgcaaaagcctttattagcaaggccaatatagggccaagattaactcaagtgagcgtgcttcagtatggatctatcactactatagacgtgccttggaacgtggtgcccgagaaggcgcatttactctctttggtagacgttatgcaacgtgaagggggaccttcccagattggcgacgctctcgggtttgccgtgcggtatttgacctcggagatgcatggagctagacccggagcttctaaggcagtcgttatcctcgtgacggatgtctcagtggactcagttgatgccgccgctgacgccgctcggtctaaccgggtaacagttttcccaatcgggatcggcgaccgctacgacgccgcccaacttcgcatccttgccggacctgccggggactccaatgtcgtgaagctgcagcgtatcgaggatttacccaccatggtgacactgggtaactcatttctgcacaagctctgcagcggatttgtgcgaatctgcatggatgaggacgggaatgagaaaaggcccggtgacgtttggactctccctgaccaatgtcataccgtcacctgtcaaccggatgggcaaactctgttgaagtcacacagggtgaactgcgacagaggcctgcggcctagttgccccaacagccagtcacccgtgaaggtcgaagagacttgcggctgtcgatggacctgcccctgcgtctgtacaggcagctcgacccgacacattgtgacttttgacgggcagaatttcaagctgaccggaagctgctcatatgtacttttccagaacaaggagcaggacctcgaagtgattttgcacaacggtgcctgctcacccggcgctaggcagggttgtatgaagtcaatcgaggtgaaacactcagcactttccgtggaactccatagtgacatggaagtgactgtaaatgggcgtctcgtgtctgtgccctacgtcggcgggaacatggaggtgaatgtgtatggggcaattatgcacgaagtaagatttaatcatctcggccacatcttcacctttacccctcagaacaatgaatttcagcttcaattgtcaccgaagaccttcgcctctaaaacttacgggctatgcgggatctgcgacgagaatggggccaacgatttcatgctgagagacggcacggtgacgactgattggaaaaccctggttcaggaatggactgtgcagcggcccggacaaacatgccagccaattctggaggaacagtgcctggtgccagattcatcacactgtcaagttctgctgttgccgctcttcgccgagtgtcacaaggtccttgctcctgccacgttttatgccatctgccagcaggactcttgccaccaggagcaggtgtgcgaggttatagccagctacgcacatctgtgccgaaccaatggggtatgcgtggattggaggacaccagatttttgtgcgatgagttgtccgccttctttggtgtacaaccactgtgaacacggttgcccacggcactgcgatggcaacgtaagtagctgcggtgaccacccgtctgaagggtgtttctgcccccctgataaagtcatgcttgagggaagctgtgtccccgaggaggcttgcacccagtgtatcggcgaagatggggtgcagcaccagttcctggaagcttgggtgcctgatcaccagccttgtcagatctgtacctgcctgagcgggagaaaggttaattgtaccacacagccctgccctactgctaaggctccaacatgcgggctctgcgaggttgcacgcttgaggcagaatgctgaccagtgttgtccagaatatgaatgtgtgtgtgatccagtgtcctgcgacctgccacccgtgccacattgcgaacgaggcctgcaacccaccttgacaaaccctggcgagtgcaggccaaacttcacttgcgcctgtcggaaagaggaatgtaagcgtgtatcgccgccaagctgcccaccacaccggctcccaaccttaaggaagacacagtgttgcgatgagtacgagtgcgcttgcaactgtgtgaatagcaccgtgtcctgcccactcggatacctcgcgagtacagccacaaacgattgcggttgcactaccaccacttgtctcccagacaaagtctgtgtgcatcgctcaacaatatatcccgtcgggcagttctgggaggaagggtgtgacgtttgtacatgtacagacatggaagacgcagttatgggtctgcgagtcgcccagtgctcacagaagccatgtgaggatagctgccgctcaggttttacctacgtcctacacgaaggagagtgctgtggcaggtgcttaccttcagcctgtgaagtcgttaccggcagccctcgtggggactcgcagtcaagctggaagtcagttggtagtcagtgggccagcccagaaaacccctgcttgattaatgagtgcgtgcgggtgaaagaagaagtattcattcagcagcgtaatgtgagttgcccgcagctggaggtccccgtctgcccaagtggatttcaattgtcatgcaagacttccgcatgttgtccatcttgtaggtgtgagcgtatggaagcatgcatgctgaacggaacagtcataggcccaggcaagaccgtcatgatcgacgtttgcactacatgtcggtgcatggtgcaagtgggtgtgatttcagggttcaagctggagtgtcggaagaccacctgtaacccttgtccacttggatacaaagaggaaaacaacaccggcgaatgctgcggtaggtgtctacccaccgcctgcacaatccagctgcgaggtgggcaaatcatgaccctaaagagggatgagacactccaagatgggtgtgacacccacttttgtaaggtgaatgaaagaggggaatatttctgggagaagagagtgaccggttgccctccttttgacgagcacaagtgtctcgcggagggaggtaaaattatgaaaatcccaggtacttgctgtgatacatgcgaagagcctgagtgcaatgatatcacggcgcgtttacagtatgtgaaagtgggttcttgtaagtccgaagtggaagtagatatccactattgccagggtaagtgcgcctctaaggcgatgtactctattgacattaacgacgtgcaggaccagtgtagctgttgctctcctacccggacagagcctatgcaggtggctcttcactgcaccaacggcagtgttgtgtaccacgaagtgctgaacgccatggaatgtaagtgctccccgagaaagtgtagcaag

SEQ ID NO: 12570 - DNA, 8439 bp, Artificial Sequence
  derived and/or modified sequence
atgatacccgcaagattcgcgggagtgctgcttgctctggcactgatcttgcctgggactctatgtgctgaggggacacggggccgcagctccaccgcaagatgctcactgtttgggtctgattttgtgaacaccttcgatggctccatgtattcgttcgctggatactgctcctacctcctcgcagggggctgccaaaaacgctcgttctcaatcattggggacttccaaaatggaaaaagagtctccctgagcgtctacctgggcgagtttttcgatattcatctctttgtgaacgggactgtaacccagggcgaccagcgcgtgtcaatgccttatgcctcgaagggcctttatctggagactgaggccgggtactataaactgtcaggggaagcttacggcttcgtggcccgcattgatggatccgggaattttcaagtcctgctgtcagatagatatttcaacaaaacctgcggcttgtgtggcaacttcaacatatttgcagaggacgacttcatgactcaggagggaacccttacttcggacccttacgatttcgcaaacagctgggctctttcgagtggagagcagtggtgtgagcgagcctcccccccatccagctcgtgcaatatatctagcggcgagatgcagaagggtctttgggagcagtgccaactcttgaaatcaacctctgtatttgccagatgtcatcccttggtggatccagagccgttcgttgcgttgtgtgaaaaaaccctgtgcgagtgcgcaggcggcctggagtgtgcctgtccagccctcctcgagtatgctaggacctgtgcccaggagggcatggtgctttacggatggaccgatcactcagcttgcagtccagtgtgtccagcggggatggagtatcgacagtgcgtttccccatgcgctaggacctgccagagtttgcatattaacgagatgtgccaggaaagatgcgttgatggatgcagctgtcccgagggacagcttcttgacgaaggactttgcgtggaatctacggagtgtccttgcgtgcactctggtaagcgttacccaccaggcaccagcctttcgagggactgtaacacttgtatctgtcggaatagccagtggatttgtagtaacgaagagtgcccgggtgaatgtctggtgactggccagtcccattttaaatcttttgataacagatacttcaccttctctggaatctgccagtacctcctcgcccgcgattgccaggaccactcgttctccatcgtcatcgagactgtgcagtgtgccgacgatcgagatgctgtgtgcactcggtcagtcaccgtgaggttgcctggcttgcacaactccctagtgaagctaaagcacggcgctggcgtagcaatggatggccaggacgttcagttgcccttactgaagggcgacctcaggattcaacatacggtcactgcctcggttaggctctcatatggtgaagatctccagatggattgggacggacgggggcgactgctagtgaagctgagccctgtttacgcagggaagacttgtggtctgtgcggcaactataacggaaaccagggggacgacttcctgaccccttccggcctcgccgagcctcgcgtggaagatttcggcaacgcctggaagttgcacggagactgtcaagaccttcagaaacagcacagcgacccctgcgctctcaaccccaggatgacccggttctctgaggaggcctgcgcggtccttacctcccccaccttcgaagcctgccaccgcgccgtatccccattgccgtaccttcgcaattgtcgatatgacgtgtgtagctgtagcgatgggcgggaatgcttatgcggggccctggcctcttatgcagctgcctgcgcgggtaggggtgtgcgggtggcatggagagaaccgggtcgctgcgaactgaattgtccaaagggccaggtgtacctccagtgcggcactccatgcaacttaacctgtcggagtttgtcttatcctgacgaagaatgtaatgaggcatgcctcgaaggatgtttctgcccgcctggactatatatggacgaacgaggagattgtgttccgaaagctcagtgtccgtgctattacgacggtgaaatattccagcctgaggatattttctccgatcaccatacgatgtgttactgcgaagatgggtttatgcattgcactatgagtggggttcctggctcgctgctgcctgacgcagtgctgtccagtccactatcgcatcggtccaagaggagcttgtcttgccggccccccatggtgaaactcgtgtgccccgctgataatctacgtgcggaaggcctcgagtgcaccaagacatgccagaactacgatctggagtgtatgagcatggggtgtgtgtcaggctgtctgtgtccccccggtatggtcagacacgagaataggtgtgttgcactggagagatgcccctgcttccatcagggcaaagaatatgccccgggggagaccgttaagattggttgcaacacttgtgtctgtcaagaccgcaaatggaactgcaccgaccacgtctgtgacgcgacttgtagcaccattgggatggcgcactacctaacattcgacgggcttaaatatctgttccctggggagtgtcagtacgtcctagtccaagattactgcgggtctaacccgggaacatttcggatactcgtgggcaataaggggtgcagccacccttcggttaaatgtaaaaagcgggtgactatccttgtcgaaggcggtgaaatcgaactgttcgatggtgaggtgaatgtcaagaggcctatgaaggatgaaacccacttcgaggtggtcgaatcggggaggtacattatactcctgctggggaaggcactgtctgtcgtttgggacagacacttgtccatctccgttgtgcttaaacagacttatcaggagaaggtctgcgggctctgcggcaactttgacggaattcagaacaatgacttgacttcatcgaatctgcaggttgaggaggacccagtcgatttcgggaatagttggaaggtgagctcgcagtgcgcagacacacggaaagtgcctctagacagtagcccagctacatgtcacaacaatatcatgaagcagacaatggtggattccagttgccggattcttacctctgacgtgtttcaggactgcaacaaactcgtagaccctgaaccctatctggatgtctgcatatatgacacctgttcttgcgaaagcattggagattgcgcctgtttctgcgatacaattgccgcatatgcccatgtctgtgctcagcacgggaaggtagttacatggaggacagccaccttgtgcccccagagctgtgaggagaggaatctacgcgaaaacggatacgagtgtgaatggagatataattcatgtgcccccgcctgtcaggtaacctgtcaacatcctgaacccctggcgtgccctgtgcagtgtgtcgagggttgccacgcccattgcccgcccgggaagatactggatgagctgctacagacatgtgtggatcctgaagactgtccagtatgtgaggtggctggtcggcggtttgcgagcggaaaaaaggttaccttaaacccatcagatccagaacattgccagatctgccattgtgatgtggttaatctgacctgcgaggcatgccaagagcctggtggcctcgtggtcccacctaccgacgctcccgtttctcccactactttgtacgtagaggatatatcagagccacctctacatgacttttattgcagccggttgctcgacctcgtttttctccttgacggatcttctcggttatccgaggccgaatttgaagtcctcaaagcatttgtggtggatatgatggagcgtttacgcatctctcagaagtgggtgcgtgtggcggtcgtggagtaccacgacggtagtcatgcctatattggcttgaaggatcggaaacgccccagtgagctcaggcgtatcgccagccaggtgaaatacgctggaagccaagtggcctcaacctctgaggtgctcaagtatacattgtttcagattttcagtaagatcgaccgacccgaggcctcccgcatcacactgctgttgatggcatcacaagagccgcagaggatgagtcgaaacttcgtgagatatgtgcaggggctgaaaaagaaaaaggtgatcgtgattccagtcggtatcggacctcacgctaatctaaagcagatccgtctcattgaaaaacaggctccagagaacaaggcctttgtgctttcctcggtcgatgaactggagcagcaacgcgatgaaattgtaagctatctctgtgacctggccccggaagcgccaccccccaccctgccaccagacatggcacaggtaacagtcgggccaggcttacttggtgtgtccactcttggacctaagcgcaactctatggtattagatgtcgccttcgtgctggagggaagtgacaaaatcggtgaagccgattttaatcgctctaaggagtttatggaagaggtcatccagagaatggatgtcgggcaggatagcatccatgtcactgttctgcaatatagttacatggtgactgtcgaatatcctttctccgaagcccagtccaagggcgacattttgcagagggtgcgcgaaattcggtaccaggggggtaatcgcactaatacaggcctggcactcaggtatctgagcgaccatagcttcctggtgagtcagggggaccgcgagcaggcaccaaacctggtctatatggtgactggtaaccccgcgtccgacgaaattaaacggctgcctggcgatatacaagtcgtgcccattggcgtgggacctaatgccaacgtgcaagaactggaaagaataggttggcccaacgcccccatactgatccaggacttcgagacgttgcccagggaagcccccgatcttgtcctgcagaggtgctgctcaggcgagggtcttcagatccccactttaagtcccgcccccgactgtagccaacctctggacgtgattctgcttcttgatggatcgagctcattccctgctagctatttcgacgagatgaaatcattcgctaaggctttcatctccaaagccaatatagggcccaggctgacacaggtaagcgtgttgcagtacgggtcaattaccacaattgacgtgccttggaatgtggtgccggaaaaagcccacctgctaagcttagtggatgtcatgcaacgcgagggcggcccctcgcaaattggggatgccctaggatttgctgtgcgttacctcaccagcgagatgcacggcgcccgacccggtgcgagtaaggctgtggtgattctggttacagacgtcagcgtggactccgtggacgcagcggctgacgcggctaggtcaaaccgagtcaccgtgttcccaataggtattggcgaccgctatgacgccgctcagcttagaatcttggccggcccggccggggattctaacgtcgtcaaactgcagcgcatagaggatcttcctaccatggtgactttgggtaactcctttttacacaaactgtgttctgggtttgtgagaatttgcatggatgaagatggtaacgagaaacgtccaggtgacgtatggacacttccagatcagtgccacaccgtgacgtgccaacctgacggtcagactcttctgaagtcgcaccgcgttaactgcgaccggggcttgcgaccctcatgcccaaactcccagagcccggtgaaagtggaagaaacctgtggctgtcgatggacttgcccctgtgtgtgtactgggagctccacccggcacatcgtgacatttgacggccagaacttcaaactgactgggagttgtagctacgtgttgttccagaataaagaacaggatctcgaagttatcctacataatggggcgtgcagccctggggcacggcagggctgtatgaaatcgattgaagtgaagcactcagcgctgtcagtagaactacatagtgacatggaggtcactgtgaatggcagactggtctctgtgccgtacgtgggagggaacatggaagttaacgtttatggggccattatgcatgaagtgagattcaatcacctgggccatattttcactttcaccccacagaacaacgaatttcagctgcagctttcacccaagacgtttgcctctaaaacgtatggcctgtgtggtatttgcgatgagaacggcgctaacgacttcatgttacgggacgggaccgtgaccaccgactggaagacgttagtgcaagaatggacagttcagcgtccaggccaaacctgccaaccaattctggaagaacagtgtcttgtgccagatagttctcactgccaggtactgctcctgcccctgttcgccgagtgccacaaggtcctggctccggcaaccttttatgccatatgccaacaggacagctgccatcaagagcaagtctgcgaggtcatcgcttcctatgctcatttatgtaggactaatggcgtgtgcgtcgactggagaacgccagatttttgtgctatgagctgcccacccagtctggtgtataaccactgcgagcacgggtgccccagacattgcgacggcaacgtcagtagctgcggcgaccacccttcagaaggctgtttctgccccccagacaaagtgatgctcgaaggaagctgtgttcccgaggaggcctgtacacaatgtataggtgaggacggggtccagcatcagttcctagaagcgtgggtgcctgaccaccagccatgccagatatgcacatgtttgagcggtcgcaaagtgaactgcaccacacagccgtgccctaccgcgaaggctcctacctgtggcctctgtgaggtagcccggctgaggcaaaacgccgaccagtgctgccccgaatatgagtgtgtgtgcgatccggtgtcatgcgacctgcctccagtgcctcactgtgaaagggggttacaacccacattaacgaatcctggcgaatgtagaccgaacttcacatgcgcttgtaggaaggaggagtgcaaacgcgtctcgcccccttcttgtcctcctcacaggttacccactctcagaaagactcagtgttgtgatgagtatgaatgcgcatgtaactgtgttaactctactgtttcctgtcccctgggttatttggcctcaaccgcaacaaacgactgtggctgcaccactaccacgtgcctgcctgataaagtgtgcgtgcataggagcaccatttacccagtggggcagttctgggaggaaggctgcgacgtgtgtacctgtaccgatatggaggacgccgttatggggctccgtgtcgcccagtgctcccagaaaccctgcgaggacagctgccgttctggctttacatacgtgctacatgagggcgagtgctgcggaaggtgtcttccatcggcttgcgaagttgttaccggctcccctcggggggactcccagtcttcctggaagtccgttggatcacagtgggccagtcctgaaaacccgtgcctcattaacgaatgtgtgcgcgtgaaagaggaagtcttcattcagcagcgcaacgttagttgtcctcagctggaggtgcctgtgtgcccaagcggcttccagctgtcttgcaagaccagtgcctgttgcccctcttgtcggtgcgagcggatggaggcctgtatgctcaatggcacagtgattgggcccggaaagactgtcatgattgatgtgtgcactacatgtaggtgtatggtccaggttggcgtaatctctggcttcaagctggagtgccggaaaacgacatgtaacccatgccctcttggatataaagaggaaaacaatacaggagagtgctgtgggcgctgtctgcccaccgcctgcaccatccagcttagaggcggtcagatcatgacacttaagcgggacgagaccttacaggatggttgcgacacccatttctgcaaggtgaacgaacgcggcgaatacttttgggagaagcgagttaccggctgtcccccttttgatgagcataagtgcttagctgaaggtgggaaaattatgaaaattcctggtacctgttgcgacacctgcgaggaaccggaatgtaacgacatcactgcacggttgcagtatgtaaaagtcggctcgtgcaagtcagaggtggaagtcgacattcattactgccagggaaagtgcgcgtcaaaagccatgtattcaatcgacatcaacgatgtgcaggatcagtgtagctgctgtagtcccaccaggacagagcccatgcaggtggccctgcactgtacaaatggcagcgtggtgtaccatgaagtgcttaacgccatggagtgcaaatgctcacccaggaaatgctcaaaa

SEQ ID NO: 12571 - DNA, 8439 bp, Artificial Sequence
  derived and/or modified sequence
atgattcctgcccgctttgccggcgtattgctcgccctggctctgatcctgcctgggacactctgcgcagagggaacacgaggcaggtcaagcaccgcccggtgttcactcttcgggtccgactttgttaatacattcgacggcagcatgtattccttcgctggctactgcagctacctgctggccggtggatgccagaagaggtctttcagcattatcggcgactttcagaatgggaaaagagtgagcctgtcagtctacctaggggaatttttcgatatccatctgtttgtgaatggcaccgtgacccagggggatcagagggttagtatgccctacgcaagcaaaggattatacctagagaccgaggccggttattataaattgtctggcgaggcctacggcttcgtggctaggatagatgggtctgggaatttccaggtactgctttctgaccgctattttaacaaaacctgtggtctctgcggcaattttaatatcttcgccgaagatgacttcatgacccaggagggtacactgacaagtgacccatatgacttcgcaaactcttgggcactaagcagtggcgagcagtggtgtgaaagggccagtccaccctcgtcctcatgtaatatcagtagtggggaaatgcaaaaagggctttgggaacagtgtcagctcctcaagtccacctccgttttcgctaggtgtcatcctctagtggatcccgaaccttttgtggcgttgtgcgaaaaaactctgtgcgaatgtgccggagggctcgagtgcgcttgccctgctctcctagaatatgctcggacttgtgcgcaggaagggatggtgttgtacgggtggacggatcacagcgcatgcagtcccgtctgccccgctggcatggagtatcggcagtgtgtgtccccgtgtgcccgcacctgtcaaagccttcacatcaacgaaatgtgtcaggaaaggtgcgtcgatggttgctcatgtccggaaggacagttgctagatgaaggactctgcgtggagagcactgagtgcccatgcgtccactccgggaagcgatatccacccggaacctctcttagcagggactgcaatacttgcatctgccgaaattcccagtggatctgcagtaatgaggaatgcccgggagaatgtctggtgaccgggcagtctcattttaaaagttttgacaacagatactttactttctctggcatctgtcagtacctgctcgctcgcgactgtcaggatcactcgttctcaattgtgatcgagaccgtccaatgcgccgacgaccgtgacgccgtttgcacgcgttctgtgaccgtcagactgcctggtctgcacaactccttggttaaactgaaacatggcgcgggagtggccatggacgggcaggatgttcaattgccactgttgaagggagacttgagaatccaacacaccgtaacagccagcgtgcgtttatcttacggggaggatctgcagatggactgggacggcagaggccgacttctggtgaagctgtcacctgtttacgcaggtaagacttgtgggctatgtggaaactacaatggcaaccaaggtgatgactttctcactccgtcaggcctcgctgagccacgtgtcgaggattttggcaatgcgtggaagctgcacggcgattgccaggatctgcagaagcagcacagcgatccttgcgccctgaatccccggatgacacgcttctctgaagaggcttgcgcagtgctgacgtctcccaccttcgaagcctgccaccgagctgtctcgcctcttccctacctgcgaaattgcaggtacgacgtgtgtagctgctcagatggaagagagtgtttatgtggcgcgttagcttcatacgcagctgcctgcgcaggacgcggggttcgggtggcctggcgcgagcccggccgctgcgaactgaattgtccaaagggtcaggtctatctgcagtgtggaactccctgtaatctcacatgcagaagcctgagctaccccgatgaggaatgcaacgaggcatgcctcgagggctgcttctgcccgcccggactgtacatggacgagcgcggcgactgtgttcctaaggcacagtgcccttgctattatgacggagaaatctttcaaccagaagacatcttctccgaccaccatactatgtgttattgtgaggacgggttcatgcactgcacaatgtccggcgtgcctggttctctactgcccgacgccgtactgagctcgcctttgtctcatagatctaagcggtccctaagctgccgaccaccgatggtcaaactggtgtgtcctgccgataacttgagggctgaagggctcgagtgtacaaagacatgtcagaattacgacttagagtgtatgtccatgggctgcgtctctggttgcctatgcccacctggcatggtacgacatgaaaatcggtgtgtggccctggaaagatgcccctgcttccaccaaggtaaagaatatgcccctggggagactgtgaagattggctgcaacacctgcgtgtgccaggaccggaagtggaactgcaccgatcacgtctgtgatgcaacttgctctacgatcggcatggcccactacctaacattcgacggtctgaaatatctgtttccaggagagtgtcagtacgtgctggttcaggattattgtgggtccaacccagggacctttcgtatactggtgggtaacaagggctgcagtcatccctcggtcaagtgcaaaaaacgggtcacgatccttgtagaaggcggggagatagagctctttgacggtgaggtaaacgttaagaggccaatgaaggatgaaacccattttgaggtggtggaaagtggcaggtatatcatcttgctcctgggtaaagctctttccgtcgtgtgggatcggcacctctcgatcagtgtcgtgctgaagcagacctaccaggaaaaggtctgcggtctctgcggaaacttcgacgggattcaaaataacgatctcacgagcagcaatctgcaggtggaagaggatcccgtggactttgggaatagctggaaggtttcaagccagtgtgctgatacgcgaaaggtaccccttgattcctcgcccgctacctgccataataacattatgaaacaaacaatggtcgactccagctgtcgcatcttaacatcagatgtgtttcaggactgcaataagctcgtggacccggagccttatctcgatgtgtgcatctatgatacatgctcttgcgagtcaatcggggattgtgcatgcttttgcgatacgatcgccgcatacgcccacgtatgcgcacagcacgggaaagtcgtcacttggagaactgctacactttgcccccagagctgcgaagagcgcaatctgagggagaacggttacgagtgcgaatggcgttataactcctgcgcgccagcctgccaggtgacatgtcaacatcctgaacccctcgcatgccccgtgcagtgcgtggagggctgtcatgcccactgccctcctgggaagatacttgacgaactcctgcagacatgcgtcgatcccgaggattgtcccgtttgcgaagtcgcgggccgaagatttgccagtggcaagaaggtcactctcaatccatccgacccagagcactgtcagatctgccactgcgatgtggtgaacctgacttgtgaggcctgtcaggaacccggcgggttggtggtaccaccaaccgatgcccctgtgtctcccacaacactgtatgtcgaggacatcagcgagccgcctctccacgacttctactgctcccgcctgttagatttggtgtttctgcttgacggttctagcaggctgagcgaggccgagtttgaggttttaaaagcctttgtcgtggacatgatggagaggttgcggatcagccaaaagtgggtgagagtcgccgtggtggaataccatgacggaagccacgcctatattggcctaaaggaccgaaaaagacccagtgaactgcgtcgcatcgcaagtcaggtcaagtacgcgggcagtcaagtggccagcaccagcgaggtgctaaagtacaccctcttccaaatattcagtaaaattgaccggcccgaagcaagtaggataactctcctgctgatggcaagccaggaaccccaacggatgagtaggaacttcgtgcgttacgtgcagggccttaagaagaaaaaggttatcgtcatccctgtgggtatcggtccccatgcaaatctgaaacagattagactcattgagaagcaggccccggaaaataaggctttcgtgctgtcctctgtcgacgagctggagcagcagcgggacgaaattgtatcctatctatgtgatctcgcgcccgaggcccccccgcctactctgcctcccgacatggcccaggttaccgtggggccaggtctgttgggcgtcagcacactgggtcctaagagaaattccatggtccttgacgttgcgttcgtcctggaaggtagtgataaaatcggcgaggccgacttcaatagatcaaaagaatttatggaggaagtaatccagagaatggatgtgggccaggacagtattcacgtgaccgtgcttcagtatagctatatggtcacagtggagtatccattctccgaggctcagtctaagggcgatatcttgcagagggtcagagaaattcgctatcagggcggtaataggacaaataccggcctggctttgcgatatctgtctgatcattccttcctggtgagccagggcgatagggagcaggcgcctaatctggtctacatggttaccgggaatcctgccagtgatgaaatcaagcgattgccgggagatattcaggtggtgcccatcggcgttggcccaaacgccaatgttcaggagctggaaagaatcggatggccaaatgcacccatcttgatccaggactttgaaacactcccccgggaggcccccgacctggtgcttcaaaggtgttgctctggagaggggttacagatccctacgctcagccctgcacccgactgctcacagccacttgatgtgattcttctgctcgacgggagctcttcattcccagcctcctacttcgatgagatgaagagcttcgccaaggctttcatttctaaagcaaacataggccctagattaacccaggtgtctgtactccagtacggcagcatcacgacaattgacgtgccctggaacgtcgtgcccgagaaagcacaccttttgagcctcgtcgatgtcatgcagagggaagggggaccgtctcagataggggatgctctgggctttgccgtgaggtacctgacgtctgagatgcatggagccagaccaggggctagcaaagccgttgtcatcctagtcaccgatgtgtccgtagacagtgtggatgcagccgctgatgcggcaagatcaaacagggtcaccgtgtttcctattgggatcggagacagatatgacgcagctcaactcagaatactggccggtcccgcaggagattcaaatgtggtcaaactccagaggatcgaggatctgcccacgatggtgacccttggcaattcatttctccataaactgtgttccggctttgttaggatatgtatggacgaggatgggaatgaaaagcgccccggcgatgtatggacattgcccgatcaatgtcatacggtgacgtgccagcctgacggtcagacactattgaagtctcatcgggtgaattgtgaccggggactaaggccaagttgccctaactctcagtccccagtaaaggtcgaggagacatgcgggtgccggtggacctgcccatgtgtgtgtaccggatcctccacccgacatatagtgacgttcgatgggcagaacttcaagttgacgggtagttgttcatacgtgctctttcaaaataaggagcaagacctggaggtcatactccacaatggcgcgtgctcccccggggcacgtcaaggttgcatgaagagtattgaggtaaagcattcagcactgtccgtagagctgcacagcgatatggaggtgacggtgaacggacgcttggtttcagtgccgtatgtcggtggtaatatggaagtgaacgtttatggcgcaattatgcatgaggtcagattcaatcatttgggacacatattcacttttacccctcagaataatgagtttcagctgcagctatctccaaaaacgttcgcctccaagacatacggactttgtggtatatgtgatgagaacggggccaacgactttatgctgcgcgacggcacggtgacaacagactggaaaacacttgttcaagagtggactgtgcagcgcccgggccaaacctgccagcctattctcgaggaacagtgcctggtgcctgacagtagtcactgccaggtgttactcctgcctctctttgccgagtgccacaaggttctcgctccagctactttctacgcgatctgtcaacaggattcgtgccaccaggagcaggtatgtgaggttattgcaagctacgcccatctgtgtcgtacaaatggagtctgtgtcgattggcggactcccgacttctgtgccatgagttgccctcccagtttagtgtacaaccattgcgaacacgggtgtcctcgacattgtgatgggaatgtttcatcctgcggcgatcatccatcagaaggctgcttttgccctcctgacaaagtaatgctggaagggtcctgtgtgcccgaggaggcatgtacccagtgcatcggggaggatggcgtacagcatcagtttttggaggcctgggtgcccgaccatcagccttgccaaatatgcacatgccttagcggcagaaaggtaaattgtacaacccagccctgccccactgctaaggcaccgacctgcggcctctgcgaggtggcaaggctgcgccagaacgctgaccagtgctgtccagagtacgagtgcgtttgcgaccctgtgtcttgtgacctccctcccgtcccgcactgtgagagaggtctccaacccaccctgaccaaccccggtgaatgtcggcctaatttcacctgcgcatgtagaaaggaggagtgcaagcgtgtgtcgccaccgagctgccctccacatcgcctccccacgctccggaaaactcagtgctgcgacgaatatgagtgtgcatgtaactgcgtgaatagcacagttagctgtcccttgggctacctggccagcaccgctaccaacgattgcggatgtaccaccaccacctgtctacctgataaggtgtgtgtgcaccgctctaccatctatcccgtgggtcagttttgggaagagggttgcgatgtctgcacgtgtactgacatggaggatgccgtgatgggactgagagtagcccagtgctcacaaaaaccatgcgaggacagctgtaggagcggttttacatatgttcttcacgagggagagtgttgcgggcggtgtttgccatcagcatgcgaagtcgtgaccggcagtccacggggggactcccagtccagctggaaatccgtgggctctcaatgggcttcgcctgagaatccctgtctgatcaatgagtgcgtccgtgtaaaagaggaggtatttatccagcagagaaatgtaagttgcccacagctggaggtccctgtatgtccctccggtttccagttgagctgcaagacatctgcatgttgtccctcttgtagatgtgaacgcatggaagcatgcatgctcaacggtacagtgatcggaccaggcaagaccgtgatgatcgacgtatgtacgacgtgccgctgtatggtccaagtcggtgttatttcgggcttcaaactcgaatgcagaaaaactacttgcaacccctgcccacttgggtataaggaagagaataacacgggagaatgttgcgggcggtgtctgccgactgcttgcaccatacaactgaggggaggccagattatgaccttgaagagggatgaaacgctgcaagatgggtgcgatacccacttttgtaaggtcaacgagcgcggggaatatttttgggagaagcgggtgacaggatgtccacccttcgacgagcacaaatgcctggccgaaggcggcaagattatgaaaatacctgggacctgctgcgacacctgcgaggagccggaatgtaatgacataaccgcccggttgcagtacgtgaaagtcggctcttgtaagtctgaagttgaggtggacattcactattgtcaaggtaagtgcgcttctaaagctatgtattccatcgatatcaatgatgtacaggaccagtgctcctgttgttctccaactcggaccgaacccatgcaggtggccctgcattgcaccaatggatcagtggtctaccatgaggtccttaatgctatggaatgcaagtgctcacctaggaagtgcagtaag

SEQ ID NO: 12572 - DNA, 8439 bp, Artificial Sequence
  derived and/or modified sequence
atgatacccgcacgtttcgcaggcgtcctcttggccctggcgctgatcctgcctgggaccctgtgcgcagaaggcacccgcggccgatctagcacggcccgatgcagcctgttcggttctgatttcgttaatacctttgacggcagcatgtacagctttgcggggtactgctcttatttgctggcgggcggctgccagaagaggtctttttccatcattggcgattttcaaaacggtaagcgcgtgtccctgagcgtgtatctcggtgagttttttgatattcacctgttcgtgaatggcacagtgacccagggcgaccagcgcgtgagcatgccgtatgcaagcaagggtctgtacctggaaacggaagcgggttattacaaactgagcggtgaggcttacggatttgtggcccgcattgacggtagcggcaatttccaggtactgctgagcgaccgctactttaataagacctgtgggctgtgcggcaacttcaatatctttgcagaagacgattttatgacccaggagggaacgcttaccagcgacccgtatgactttgccaacagctgggccttgagcagcggtgagcagtggtgcgagcgcgcgtctccgccatcaagctcttgtaacatttcctcaggagaaatgcagaagggtctttgggaacagtgccagctactaaaatccacgagcgttttcgcgcgctgccatccactggttgatccagagccattcgtggccctgtgtgaaaagactctgtgcgagtgcgcgggcggcctggaatgcgcctgccctgcgctgctggagtacgctagaacctgcgcgcaagagggcatggtcctgtatggctggaccgaccacagcgcgtgcagtccagtttgtccagcgggtatggaatatcgccagtgtgtctccccatgtgcgaggacctgccagagcctgcatattaacgagatgtgtcaggagcgctgcgtcgatggttgctcttgccctgagggtcagctgctggatgaaggcttgtgtgtagagtctaccgagtgcccatgtgtccacagcggtaagaggtatcccccggggacctcactgtcgcgcgattgtaacacgtgtatttgccgtaacagccagtggatctgcagcaatgaggaatgtcccggtgaatgcctggtgacgggtcagagccattttaaatcatttgataacagatattttacctttagcggtatttgccagtatctgttggctcgtgactgccaagatcactctttctccattgtcattgaaaccgtccagtgtgctgacgatcgcgatgctgtctgtacccggtctgtgacggttagactgcccggactgcacaattcgctggtgaagttgaaacacggcgcaggtgtggcgatggacggtcaggacgtacaactcccactgttaaagggggacttgcgcattcaacacactgtgaccgcatctgtgcgattgagctacggcgaggacctgcaaatggactgggatggtcgcggacgcctactggtgaaactttctccggtgtacgccggtaaaacgtgtgggctatgcgggaactacaacggtaaccagggggatgatttcctgacgccgagcggattggccgagccacgcgtggaagacttcggcaacgcttggaagctgcatggtgattgtcaagatctgcagaagcaacacagcgatccttgtgctctgaacccaagaatgacgcgtttttccgaggaagcctgtgcagtgctgacgtcaccaacgttcgaggcctgtcacagggctgtctctcctctgccatacctgaggaactgccgctatgatgtttgttcctgttctgacgggcgagaatgcctgtgcggtgcgcttgcgtcgtatgcggcagcgtgcgctggccgcggcgtccgcgtcgcatggcgcgaacctggtcgctgtgaactgaattgccctaaaggtcaggtttatctgcagtgtggtaccccgtgcaatcttacgtgtcgctccctgagctacccggatgaagaatgcaacgaggcatgcctggaaggctgtttttgtcctcctggcctgtacatggatgagcgcggagactgtgttccaaaagcacagtgcccttgctattatgatggcgagatcttccagcccgaggacatcttctctgatcaccacaccatgtgctattgcgaagacggttttatgcattgtacaatgagcggtgtgcctggaagcctgctgccagatgctgtgttgagcagcccgctgtcgcaccgcagtaagcgcagcctgagctgccgccctccgatggtgaaattggtgtgtcctgcggacaatctgcgtgctgagggcctcgagtgtacgaagacctgtcagaattatgatctggagtgtatgagcatgggatgcgtttctggttgtttgtgcccacctgggatggtcaggcatgagaatcgctgcgtcgcactggaacgttgtccgtgctttcatcagggcaaagagtatgcgcctggtgagactgtcaagataggttgcaacacgtgtgtgtgtcaggaccgcaagtggaattgtaccgaccacgtgtgtgacgcaacctgctccacgataggcatggctcactacctcaccttcgacggcctcaaatatctgtttcctggtgagtgtcagtatgtattggtccaggactattgcggaagcaacccgggaacttttcgcattctggtcggtaataaaggttgttcccacccgagcgtcaagtgtaagaagcgtgtaacaattctggttgagggtggtgaaatcgagctgtttgatggcgaagtaaacgtaaagaggccaatgaaggatgagacccattttgaagtggtggagagtggccgatacattattctactattaggtaaggcgctgtctgtggtctgggaccggcatctgagcatctccgtcgttctgaaacagacttatcaagaaaaggtgtgcggcctgtgcggcaactttgatggtatacaaaataatgacttgacctcttctaacctgcaagtagaggaagatccagtggatttcggaaattcctggaaagtttcctcccagtgtgccgacaccaggaaggtgccattggactcctcgccggcgacctgccataacaacattatgaagcagactatggtggatagctcctgtcgcattttgacgagcgatgttttccaggattgcaacaagctggtcgatccggaaccgtacctggacgtgtgtatctatgatacgtgtagctgcgagtctattggtgactgcgcgtgcttttgcgacacaatcgcggcgtacgcgcatgtttgcgctcagcacggtaaggtggtgacttggagaactgcgaccctgtgcccgcagtcatgtgaggagcggaacctgcgcgaaaatgggtatgagtgtgagtggcggtacaactcctgtgctccggcatgccaagttacgtgccagcacccggaaccgctggcgtgcccggtccaatgcgtggagggttgccatgcacactgcccgcccggtaaaatactggacgagctgctgcagacctgcgtggacccggaggactgcccggtctgcgaagttgctgggcgacggttcgccagcggtaagaaggttacgctgaacccgagcgatcccgagcactgccaaatatgtcactgcgacgttgtgaatctgacttgcgaggcctgccaggaaccgggaggtctggtcgtgcctccgactgatgcaccggttagcccaaccaccctctacgtggaggacatttccgagccgccattacatgatttctactgctcccgcctattggacctggttttcttgctcgatgggtcatcccgcctgtcggaagctgaattcgaggtcctgaaggcttttgttgtggatatgatggagcgcctgcgcatcagtcaaaaatgggtgagagttgcggtcgttgagtaccatgacggtagccatgcatacattggtctgaaggatcgcaagcgcccttcggagctccgccgcatcgcaagccaggtgaagtacgctggttcacaagtggcgagtaccagtgaagtgctcaagtatactctgtttcaaatattttctaagatcgaccgccctgaagcatctcgtattaccctgctgctgatggcgtcgcaagaaccgcagcgcatgagccgcaacttcgtccgttacgtccaggggctgaaaaagaaaaaggtgatcgtcattccagtgggtatcggtccccacgcaaacctcaaacagatccgtctgatcgaaaagcaggctccagagaataaagccttcgttctttcatcagtcgatgaactggaacagcaacgagatgaaattgtgagctacctgtgcgacttagctcccgaagcgccacccccgacgttgcctcctgacatggcgcaagtcaccgtgggccctggtctgctgggtgtgtccaccctgggtccaaagcgtaactctatggtgctggatgttgcttttgtgttggaaggtagcgataagattggtgaagcggatttcaaccggagcaaggaatttatggaggaagtgatacagcgaatggacgtcggtcaagatagcattcatgttactgtgctccagtatagctacatggtgaccgtggagtacccattcagcgaagcgcagagcaagggtgacatcttacaacgcgtccgcgaaattcgataccagggtggtaacagaactaacactggactggccctgcggtacctgtcagaccacagcttcttagtgagccagggtgatcgcgagcaggcgccaaatttggtgtatatggtcactggaaacccagccagcgatgagattaagcgcctgcctggtgacatacaggtcgttccgattggtgtgggtcctaatgctaatgtacaggagctggaacgcatcggttggcccaatgcacccattctgatccaggactttgaaaccctcccacgcgaagctcctgacctagttttgcagcggtgctgcagcggtgagggtctgcagattccaaccttgagcccagccccggactgcagccagccgctggacgtgatcctgctgctagacggctcctcctcctttccggcctcatatttcgacgagatgaaaagctttgcgaaggcgttcatctccaaagcaaacattggccctcgcttgacccaggtcagcgtgctgcagtacggctctatcaccactattgatgtcccgtggaacgtcgtgccggaaaaggcacatctgctttctttagtcgatgtgatgcagcgggaaggaggtccgtctcaaattggtgatgcgctgggcttcgccgtgcgctatcttaccagcgagatgcacggtgcacgtccgggcgccagcaaagcagtcgtgatcctggtcacggatgtttcagttgatagcgtggatgccgccgctgatgccgcccgtagcaatcgtgtgactgtcttcccaatcgggattggggataggtacgatgccgcacagctgcgcatcctggcaggtcctgccggcgatagcaatgttgtgaagctgcaacggatcgaggatctgccgaccatggttactttaggtaactcctttctgcacaaactgtgctctggttttgttcgcatttgcatggatgaagatggtaatgagaaacgcccaggcgatgtgtggactctaccggaccagtgtcataccgttacctgccaaccggacggacagacgttgctgaaaagccaccgtgtaaattgcgaccgcggactgcgccctagctgccctaattcccaaagcccggtgaaggttgaggaaacatgcggatgtcgctggacctgtccgtgtgtttgcactggcagctctacgagacacatcgttactttcgatggtcagaatttcaaactaactggcagttgttcctacgtcctgtttcaaaacaaggagcaggatctggaggtgatcttgcacaatggtgcctgtagcccaggcgcgcgccaaggctgcatgaaatcaatcgaggttaaacatagcgcgctgtctgtggagctccattcagacatggaggtcaccgtgaatggccgtctggtctccgttccttacgtgggtggcaatatggaggtcaatgtgtacggtgccattatgcacgaagttcggttcaaccatttgggccacattttcacatttacgcctcagaacaacgaatttcaactgcagctctctcctaaaactttcgcaagcaagacttacggattgtgcggtatctgtgatgaaaatggcgctaatgacttcatgctgagagatggcacggtgaccaccgactggaagacgctggtccaggaatggacggtgcaaagacctggtcagacctgccaacctatcctcgaagagcagtgcttggtgccagacagcagccattgccaggtcctgctgctacctctgtttgctgagtgtcataaggtgctggcgccggcaaccttctacgctatctgtcagcaggacagctgccaccaggaacaggtgtgcgaggtgattgcttcctacgcacacctgtgcaggactaatggtgtctgcgtggattggcggaccccggatttctgcgctatgtcttgtcctccttctctggtgtataaccactgtgagcacggctgtccccgtcactgcgacggaaatgtgtcttcgtgcggcgaccacccatctgagggttgcttttgtcctccagacaaagtcatgctggaagggagctgcgttccggaggaggcatgcacgcaatgcatcggggaagacggtgttcagcatcaatttctggaagcctgggtgccggatcaccaaccgtgtcagatttgcacgtgtctctcaggtcggaaggtgaattgcaccacacagccatgtccaaccgcgaaggccccaacgtgtggtctgtgtgaggttgctcgcttgcgccaaaatgcagatcagtgttgcccggagtatgagtgcgtctgcgacccggtgtcctgtgatctgccgcctgtgccacactgtgagaggggtctgcagcctaccctgactaacccaggggagtgcagaccaaattttacctgcgcatgccgcaaagaggagtgcaaacgcgttagcccaccttcttgccccccacatcgcttgcccacccttagaaagactcagtgttgtgacgaatatgagtgcgcctgcaattgcgtgaactctaccgttagctgtccgctggggtacttggcaagtacggccacgaacgattgtggttgtacgactacaacgtgcctgcctgataaagtgtgtgttcaccgctccaccatttaccctgtcggccagttttgggaagagggttgtgacgtatgcacctgtaccgacatggaagacgcagtgatgggtctgcgtgttgcacagtgctcccagaagccctgcgaggatagttgccggagtggattcacctacgtcctgcatgagggagagtgctgtggccgctgcctgccaagcgcgtgtgaagtcgtgaccggcagcccgcgcggtgacagccagagttcatggaaaagcgttggttctcagtgggcgtctccggagaacccttgtctgattaacgagtgcgtgcgcgtgaaagaggaagtattcatccagcagcggaacgtgtcttgcccccaactggaggtccctgtttgcccttccggcttccagctgagctgtaaaacgtcggcgtgctgtccgagctgccgctgtgagcgcatggaggcgtgcatgctcaatggcaccgtcatcggtcctggcaagacagtcatgattgatgtctgcacaacatgtagatgtatggtccaagtcggggttatcagcgggttcaaactggaatgtcggaagaccacctgcaacccgtgccctctgggctacaaggaggaaaataataccggtgagtgttgtggaagatgcctgcctacggcctgcaccattcagctgcgaggcggccagattatgacgttaaagcgcgacgaaactttgcaggacggctgcgacacccacttttgcaaagttaatgagcgaggtgagtatttttgggagaaacgcgtgaccggctgtccgccatttgacgagcataaatgtctcgctgagggcggcaagatcatgaagatcccaggcacctgttgcgacacctgtgaggaaccggaatgcaatgacatcacggctcgccttcaatatgtgaaggttggctcgtgtaaaagcgaggtggaagttgatatccactattgccaaggcaagtgcgcttccaaagctatgtattccatcgacattaatgatgttcaggatcagtgctcttgttgcagcccgacccgaactgagccaatgcaagttgcgctgcactgcaccaacggaagtgtggtttaccatgaggtgctgaatgccatggaatgtaaatgctcgccgcgcaaatgttcaaag

SEQ ID NO: 12573 - DNA, 8439 bp, Artificial Sequence
  derived and/or modified sequence
atgatcccagctcgcttcgcaggtgtgctgctggctctcgcactgatcctcccgggcacattatgtgcagagggaacccggggaagaagtagcacagctaggtgtagcctgttcggttctgactttgttaatacgttcgatgggagcatgtactcgttcgctggttattgctcctacttgcttgcagggggttgccagaaaaggtctttctccatcattggtgatttccagaatggtaaaagagtgtcgctgtccgtgtatttgggcgagttttttgacattcacttgttcgttaacggcactgttacccaaggcgatcagcgcgtaagtatgccttacgctagcaaaggcttatatctggaaacagaggctgggtattataaactctctggagaagcctacggtttcgtggcccgtatcgacggatccggaaacttccaggtcctgctatcagaccggtacttcaacaagacctgtggtctttgtggaaacttcaacatcttcgcggaggatgacttcatgacgcaggaggggaccttgacctccgatccatacgattttgctaatagctgggcactctccagcggagaacagtggtgcgagcgcgcatctcctccctcttcgagctgtaacatctcctcgggggagatgcagaaaggtctgtgggaacagtgccagctcttgaaaagtaccagtgtttttgcccggtgccacccattggtggacccagagccgttcgtggccctttgcgagaagacgctgtgtgagtgcgccggcggcctggaatgtgcctgtcccgccttattggagtacgcccggacatgtgcacaggaaggcatggtgctttacggctggaccgatcactcagcatgttcacccgtgtgtcctgctggcatggagtacaggcaatgcgtcagcccctgtgcccggacttgtcagtccctccatatcaacgagatgtgccaggagaggtgtgttgatggttgcagctgtcctgaaggtcagctcctcgacgaggggttgtgtgtagaatctaccgagtgtccctgcgttcacagcggaaagcgctatccacctgggactagtctatcacgggattgcaatacatgcatatgccggaattcccagtggatttgttctaacgaggagtgccctggcgaatgtctcgtgaccggtcagagccacttcaaaagcttcgacaatcggtatttcacatttagcggtatctgtcaatatctgttggctagagactgtcaggaccactctttcagcatagtgattgagacagtgcagtgcgctgatgacagggacgcagtgtgtactagaagcgtgaccgtgcgtctccccggtctccacaacagtttggtgaagctgaaacatggagcaggggtcgcgatggatggccaggatgtgcaactgccgttgctcaagggagatctgcggattcagcacacagtcactgccagtgttcgactgagctacggagaggacttgcagatggactgggacggcagggggaggttgttagtcaaactaagcccagtgtatgcgggaaaaacttgtggcctctgtggaaattataatggcaaccagggagatgactttctcacaccctcagggctggctgaacctagggttgaggattttgggaatgcttggaaactgcacggagattgtcaagatttacagaagcaacactcagatccttgcgctctgaacccccgcatgaccagattcagcgaagaggcatgcgccgtccttacatctcccacgttcgaagcctgccacagggcagtcagcccgttgccttatctgagaaattgccgttatgatgtctgcagttgtagtgacggccgagagtgcctgtgcggtgccctagcctcctacgcagccgcttgtgccggaagaggggtccgtgttgcatggcgcgagcccggccggtgtgagctaaattgccccaaaggacaagtctaccttcagtgtggcaccccctgcaatcttacctgccgtagcttatcctatccagacgaggaatgcaacgaggcttgcctagaggggtgtttctgtcctccgggtctttacatggacgagagaggggattgtgtcccaaaagcccagtgtccctgttactacgatggcgagatctttcagcccgaggatattttctccgaccaccatacaatgtgctattgtgaagatgggttcatgcactgtacgatgagtggtgttcccggttccctgctacccgatgcagtattgagcagccccctgagccaccggtctaaacggagtctctcatgccggccgccaatggttaagttagtgtgccccgccgataacttgagagccgaaggactggaatgcaccaaaacgtgtcagaactacgatctggagtgcatgtctatggggtgcgtgagtgggtgtttgtgtcctcctggaatggtcagacacgagaaccggtgcgtcgcactggaacgctgcccgtgctttcaccaaggaaaggagtatgcgcctggcgaaactgtgaaaatcgggtgtaatacctgcgtgtgccaggataggaaatggaattgcaccgaccatgtttgtgatgcaacctgctccacgattggtatggcccattacctgacctttgacggcttgaagtacttgtttcccggggagtgtcaatatgtcctcgtccaggactactgtggatctaaccccggaacatttcgcatcctggtggggaataaaggctgttcgcatccctctgttaagtgcaagaagcgcgttactattctggtggagggtggagaaattgagcttttcgacggtgaggtgaacgttaagagaccaatgaaggacgaaactcactttgaagtcgtagagtctggccgttatataatcctcctgttaggcaaagctctatctgtggtgtgggatcgacatctgagcatctccgttgtactcaagcaaacttatcaggaaaaggtctgcgggctatgcggcaattttgatgggatccagaacaatgacttgacttcctctaacctgcaggtcgaagaagacccggtggactttggtaattcttggaaggtgagttcccaatgcgcagataccagaaaagtgccactcgattcatctcccgccacgtgccataataacattatgaagcagaccatggtagactcttcctgccggatccttacatcagatgtgttccaggattgcaacaagctcgtagatccagagccctaccttgacgtgtgcatctacgatacttgtagctgcgagtcaattggggactgtgcatgtttttgtgatactatagcggcttacgcacatgtgtgcgctcagcatggaaaagtggtcacctggagaacagccaccctatgtccgcagtcctgcgaagagcgcaacctgagagagaatggctatgagtgcgagtggaggtacaactcttgtgcacctgcatgccaagtgacttgccagcatccagagccactcgcatgtccagtacagtgcgtggagggttgtcacgcccactgccctcctggtaagattctagacgagctcttacagacgtgtgtggaccctgaagattgcccggtgtgtgaagtagcaggacggcgattcgcttctggaaaaaaggttaccctgaaccccagtgatcccgagcattgccagatctgccactgtgatgttgtgaacctgacatgcgaggcctgccaggagcctggcggcctggtagtgccccctacggacgccccggtgtcacccaccacactgtacgtcgaggacatctccgagcctcctctgcacgacttctactgttcacgtctgctggatctggtgtttctgctcgacggctcgtcgcgcctgtccgaggctgaatttgaggtgctgaaagcatttgtagtcgacatgatggagcggctccgtatatcacagaaatgggtgcgcgtggccgtggttgagtaccacgacgggagccacgcatacatcggactgaaggatcgaaagaggccaagcgagcttcggcgcatagcttcacaggtaaaatacgcaggaagtcaagtggcgtcaacaagcgaagtgcttaaatacacactgtttcaaattttttccaagatcgaccggcccgaggcctcccgcataaccctgttgctcatggcttctcaggaacctcagcgcatgagccgaaacttcgtcaggtacgttcagggtctcaagaagaagaaggtcattgtcatacccgtcggaatagggccgcatgcgaatctgaagcaaatccggctgatagagaaacaggccccagagaacaaagcctttgttctctcctcagtagacgagctggagcagcagcgcgatgaaattgtaagttatctctgtgatcttgctcccgaagcaccaccccctaccctacctccggatatggcccaggttactgtagggcccggattgctgggcgttagcaccctgggccctaaacgtaattctatggtattggacgtggcctttgtcctggagggatctgataagattggggaggccgattttaaccgcagcaaggagttcatggaggaggtgatccagagaatggacgtgggacaagatagtatccatgtcaccgttcttcagtattcttatatggtaaccgtggaatatccattttcagaagcccaaagtaagggggacatcttacagagggtgcgggaaataaggtatcaaggggggaatcgaactaacaccgggcttgcattgaggtatctatccgatcactccttcctggtcagccaaggggatagggagcaggcacccaatctcgtttatatggtaacgggtaatcctgcatcagacgagatcaagagattgccgggcgatattcaagtggtgcccattggcgtcgggccaaacgcgaatgtgcaggagctggaaaggatcggctggcctaacgcaccaattctgattcaggatttcgagaccttgcctcgggaagctcccgacttagtcctgcaacgatgttgttccggggagggcctgcaaatccctacacttagtcctgccccagattgctcacaacccctagacgtgatcctgttgcttgatggcagtagcagctttccagccagctatttcgacgaaatgaagtcattcgctaaggccttcatttcaaaagccaacattggacccagactaacacaggtgagtgtcctccagtacggttctataaccacgatcgacgtgccctggaacgtggtccctgaaaaagcgcatcttcttagcctggttgatgttatgcaaagagaaggggggccatcacaaataggcgacgcactaggatttgctgtgaggtatctgacatccgagatgcacggagccagaccgggagccagcaaagcagtggtaattctggtgaccgacgtgtctgtcgattcagtggacgccgcggccgacgccgcacgatcgaatagagtgaccgtgtttcccattgggattggggatcggtacgacgccgcccagctgcgcatcctcgctggccctgccggcgactccaatgttgtcaaactgcagaggatcgaggacctcccgactatggtgactctgggcaacagcttcctacacaagctgtgttctggtttcgtccgtatctgcatggatgaggatggtaacgaaaaacggccgggggacgtgtggaccctacccgatcagtgtcataccgtgacctgccaacctgacgggcagacccttttaaagtcacaccgagtaaactgcgatcggggtttacgcccatcttgccctaatagtcagagcccagtaaaggtggaggagacctgtggctgcagatggacctgtccctgtgtttgtaccggatcttcaactagacacatcgtcactttcgatgggcagaacttcaaactaaccgggagttgtagttatgtgctgttccagaataaggagcaggacttggaagtgatcctccataacggagcctgtagtcctggagcgcgccaaggctgcatgaaatccattgaggtgaagcacagtgcgctaagcgttgagttacatagtgacatggaggtgactgttaacgggcgtttagtatcggtgccatacgtgggaggtaatatggaggtcaatgtgtatggcgccataatgcacgaggtgagatttaatcatctggggcatatcttcaccttcacacctcagaataacgagttccagctgcaactaagccccaaaacgtttgcctccaagacttatggtctatgcggtatatgtgacgagaacggcgccaatgactttatgctgcgcgatgggactgtgacaacagattggaaaactctcgtccaggagtggaccgtgcagcggccaggacagacttgccagccaatactagaggaacagtgtcttgtccccgactcttctcactgccaggtgctcctgctgccactgtttgccgagtgtcacaaggtgttagctcctgctacattctatgcaatttgccagcaggactcctgccaccaggaacaggtgtgtgaggttatcgctagttacgcacatctctgtaggacaaacggggtttgcgtggactggaggacacccgacttctgtgctatgtcatgccccccttctctggtgtataaccactgcgaacacggttgccctcggcactgcgatgggaatgtgtcatcttgcggagatcacccaagcgagggctgtttctgcccacctgacaaggtgatgttggaaggctcatgcgtaccagaagaagcatgtactcagtgcattggagaggacggtgtgcagcatcagtttctggaggcttgggtccccgaccaccagccatgccagatctgcacctgcctgtctggaaggaaggtgaactgcaccactcagccctgtccgacagctaaggcccctacctgtggcctttgcgaagtggctaggctcagacagaacgccgaccagtgctgtccagagtatgaatgcgtgtgtgatccagtgtcctgtgacttgcctccagtccctcactgcgaacggggtctccagcctactcttacgaaccccggcgagtgcagacccaacttcacgtgcgcttgtcgcaaagaggagtgcaagcgagtgagcccgccctcttgccctccgcatcgacttccaactttgaggaagacacagtgctgcgacgaatatgagtgcgcctgtaattgtgtaaacagtacagtgagttgcccgcttggttatcttgcttcaacagccaccaacgattgcgggtgtacgacgactacctgtctccctgacaaggtatgtgttcatcgctccactatttacccagtgggacagttttgggaggaaggatgtgacgtctgcacctgcaccgatatggaggacgctgtcatgggacttagagtggcccagtgttctcagaaaccttgtgaggattcttgccggtcggggttcacttatgtgctgcacgagggcgaatgttgtgggcgctgtctacccagcgcatgcgaggttgtgactggtagtcctcggggggattcacagagttcctggaaatccgtgggctcccagtgggcgtcgcccgagaacccatgtttgatcaacgaatgtgttcgcgtcaaagaggaagtgttcattcaacaaagaaatgtaagctgtccccaactggaagtgcctgtgtgcccctccgggtttcagttgtcctgtaaaaccagcgcttgctgtccatcgtgcaggtgtgaacggatggaagcatgtatgcttaatggtacagtgatcggtcccggcaaaacggtgatgatcgacgtctgtacaacctgtcggtgcatggtgcaggtcggcgtcatctcaggatttaagcttgagtgtcgcaaaacgacatgtaacccttgccctctgggttataaggaggagaacaatactggagagtgctgtggacgatgtttgcctaccgcttgtaccatccagctccgaggcggacagatcatgacactaaagcgggatgaaaccctccaggatggttgcgacacacacttttgtaaagtgaatgagcgcggcgagtatttctgggagaagcgcgtgaccgggtgcccaccattcgacgagcataagtgccttgccgaaggagggaagataatgaagatacctggcacctgttgcgatacgtgcgaggaacccgaatgcaacgacataacagctcgtctccagtacgtgaaagtgggcagctgcaaaagcgaggttgaagtagacatacactactgtcagggaaagtgcgccagtaaagcaatgtattccatcgatataaatgacgtgcaggatcagtgttcatgctgctcccccacccggaccgaacctatgcaggttgctcttcattgcaccaacggatctgtggtgtatcacgaagtgctgaacgctatggagtgtaagtgttcgccgcgcaagtgctccaag

SEQ ID NO: 12574 - DNA, 8439 bp, Artificial Sequence
  derived and/or modified sequence
atgatccccgcgaggtttgccggcgtgctcttggcgctcgccctgatcctgcccggcaccctctgcgccgagggcacacgcggccgctcaagcacagctcggtgctccttgtttgggagcgacttcgtgaacactttcgatggctccatgtactcttttgccggatactgcagctacctgctggccggagggtgccagaaaagatctttttcaatcatcggggatttccagaacggtaaacgggtaagcctgtccgtgtacctgggagagtttttcgacatccacttgtttgttaatggaaccgtgactcaaggagaccaaagggtgtctatgccatatgctagtaaaggcctgtacctggagactgaagcgggttactataaactgtctggcgaagcctacggattcgtggctcggatcgacggatcaggcaatttccaggtgctcctttctgacagatatttcaacaaaacctgcgggctgtgcggtaacttcaacatctttgctgaggacgattttatgacacaggagggcactctgacttccgacccttatgattttgccaacagctgggccctgagctctggtgagcagtggtgcgagagagctagcccccctagttcctcttgcaatatatcttcaggtgagatgcagaagggtctgtgggaacaatgtcagttgttgaaaagcacaagcgtgtttgcaagatgtcaccccctggtcgacccagaacccttcgtggcactttgtgagaagaccctgtgtgagtgcgctgggggccttgaatgtgcctgtcccgcattgttggagtacgcaaggacttgtgcccaggaggggatggtcctgtacggctggaccgatcattctgcttgttcaccggtctgtcctgcggggatggagtatagacagtgcgtttcaccgtgtgcccgaacttgtcaaagtctccacattaatgaaatgtgtcaagaacgatgtgtggacgggtgctcttgccctgaggggcagcttcttgatgaaggcctgtgcgtcgagtctacagaatgcccgtgtgttcattctggcaaacgatatcctcctggcacttctttgtctagagattgcaacacctgcatatgtaggaactcccagtggatttgttccaacgaggagtgccccggagaatgtctggtgactgggcagtctcatttcaagtcatttgacaaccggtacttcacattttctggtatctgtcaatacctgttggctcgagactgtcaagatcatagtttcagcattgtcattgaaactgtgcaatgcgcggacgatagagacgccgtgtgtacacggagtgtcactgttagattgccaggcctgcataacagtttggtcaaactcaagcacggcgccggagtggccatggatgggcaggacgtgcagctgccgcttctcaaaggagacctgcgaattcaacacacagtcacagcatcagtccggctgtcctacggcgaagatctccaaatggactgggacggacggggccggctcctggtcaagctcagccctgtgtacgccggtaaaacgtgcggcctgtgcggcaactataatggaaaccaaggcgatgattttctgaccccatcagggcttgctgagccccgggtggaggacttcggcaatgcatggaaactgcatggtgactgtcaggacctgcaaaagcagcacagcgacccttgtgctctgaaccctaggatgacaagattctcagaggaagcttgcgcagtactgacttccccaacatttgaggcctgccatagggccgtgagccccctgccttacctgcggaattgtcgatatgatgtatgcagttgttccgacggcagagagtgcttgtgcggagctctggcctcctacgccgcagcgtgcgccggtaggggcgtaagggtcgcatggcgcgaaccaggccgctgcgagcttaactgcccaaagggtcaggtgtatttgcaatgtggtacgccatgtaacctgacatgtaggagcctgtcttaccctgacgaggagtgcaacgaagcctgtctggaagggtgtttttgccctccgggactgtatatggacgaaaggggagattgtgtgcccaaagcccagtgtccgtgctactatgacggagaaatctttcagccagaagatattttcagcgatcaccacactatgtgttactgtgaggacgggttcatgcactgtacaatgtctggagttcctggaagcctgctgcctgacgctgtgctgagcagtcccctgagtcaccgctccaagagaagtctgagctgcaggcctcccatggtaaaactggtgtgcccagctgataacctccgagccgagggactggagtgtacaaagacttgccagaactatgatctcgagtgtatgtcaatgggatgtgtgagcgggtgtctgtgccctcctggcatggtcaggcatgaaaatcgctgtgtcgcgctcgaacgatgtccctgcttccaccaaggcaaggagtatgctccgggagagaccgttaagataggatgtaacacgtgtgtttgccaggacaggaagtggaactgcactgatcacgtctgtgatgctacctgttcaacaatcgggatggctcactatctcacattcgatgggcttaagtacctgttcccaggggaatgccagtatgttctggtacaggactactgcggcagcaacccaggcacattcagaattctggttggaaacaagggttgctctcatccttctgtgaaatgtaagaagcgagtcaccatcctggtggagggcggagagatcgagctgttcgacggcgaggtaaatgtgaaaaggcctatgaaagatgaaacacactttgaggttgttgaaagtggcaggtatattatccttctgctcgggaaggccctgtctgtagtctgggatcgacatctgtccatcagcgtggttctgaaacaaacataccaggaaaaggtgtgcggtctttgtggaaattttgacggaatccaaaacaacgatttgacaagcagtaacttgcaggttgaagaggacccggtggactttggcaactcttggaaggtatcaagccagtgcgccgacacacgcaaagtcccacttgactcttcccctgctacctgccacaacaatatcatgaaacagacgatggttgactcatcctgcaggattctgacttcagacgtcttccaggactgtaataagcttgtagatccagagccgtacctcgacgtatgtatttacgacacatgtagctgcgagagcattggggattgcgcctgcttctgtgataccattgccgcttatgcgcatgtttgtgcgcaacacgggaaggtggtgacgtggaggaccgccacgctgtgtcctcagtcctgtgaagagcgcaacctgagagagaatggatatgagtgtgaatggcggtacaactcttgcgcccccgcctgccaggttacatgtcagcatcccgagccactggcctgtcccgtgcagtgcgtggagggctgccatgcccattgcccaccaggcaaaatcttggatgaacttcttcaaacatgcgtggatccagaggattgtccagtatgcgaagttgccggaagaagattcgctagtggaaagaaggtgacccttaatccgagtgaccccgaacattgtcagatatgtcactgcgatgtagtaaacctgacttgtgaggcgtgccaggaaccggggggtctggtagtgccacccactgacgccccagtgagcccgaccactctctacgtggaggacattagcgagccaccactccatgatttctactgttcacgcctcctcgatctcgtgttcttgctcgacggctcttccagactgtctgaggctgagttcgaagtgcttaaggcctttgtggtggacatgatggagaggctcaggatcagtcagaagtgggtgagagtagctgtcgtggaataccatgatggctcccacgcttatattggcctcaaagaccggaagcggccgtctgagctgcggagaattgcgtctcaagtcaagtacgcgggctcccaggtcgccagcaccagtgaggtgctcaaatacacactctttcagatcttctccaagatagaccggccagaggcaagcagaatcacattgctgctgatggctagccaggaacctcagaggatgagcaggaattttgtgcgctacgtccagggcctgaagaagaagaaagtgatcgtgatccccgtgggaatcgggccacacgcaaacctcaaacagatccgattgatcgagaagcaggcccccgagaacaaggcctttgtgctgagcagcgtggatgagctggaacagcagagggatgagatcgtgtcctatctctgtgacctggcacctgaggcccctccgcccactttgcccccagacatggcccaggtgacagtgggccctggcctcctgggagtgagtacccttggacccaagcggaactctatggtactggatgttgctttcgtgctggaaggctcagataaaattggagaggcagatttcaatcggtcaaaggagtttatggaagaggtaatccagcggatggacgtcggacaggactccattcatgtgacagtcctccagtactcttacatggtgaccgttgagtacccattttccgaagcccagagcaaaggcgacattcttcagcgggtaagggaaattagatatcagggcggcaacaggaccaacacaggcctggccctgaggtacctgtccgaccactcattcctggtgtctcaaggcgatcgcgaacaagcccccaacctcgtgtatatggtgacaggtaacccggcctcagacgagatcaaacgattgcctggtgatattcaggtcgttcctattggtgtgggaccgaacgccaacgtgcaggagttggagcggatcgggtggcccaatgccccaatcctcattcaggacttcgaaacattgccgagagaagcacctgatctggtgttgcagcgctgctgttctggtgagggtctgcaaatccctactctgagtcccgcacctgactgctctcagccgctcgacgttattttgctgctggatgggtctagcagctttcctgcatcctattttgatgaaatgaagtctttcgcaaaagcctttatcagcaaggccaatataggacccagactcactcaggtcagcgtgctgcagtacggaagcatcaccacaatagatgtgccctggaacgtggtgccagaaaaagcccacctcttgtcccttgtggacgtgatgcagcgggagggcggaccaagtcagataggtgatgccctcggcttcgcagtccggtatttgactagtgagatgcacggcgcacgccccggcgccagcaaggccgtggtaatcctggtcaccgacgtttccgtcgactccgtcgacgccgccgccgacgccgccagatccaacagggtcacagtcttcccaatcggtatcggcgatcgctacgatgctgcacaattgagaatcctcgccggacccgctggtgacagcaacgttgtcaaactccagaggattgaggatttgcctaccatggtgactctcggcaacagtttcctgcataagctttgctctggctttgttcggatctgcatggacgaggacggtaatgaaaagagacctggcgatgtgtggacccttcccgatcagtgtcatactgtaacttgccagcccgacgggcagacactgcttaagagtcatcgggtgaattgtgatcgagggctgcggccgagctgcccaaactcacaatcaccagttaaggttgaggaaacatgcggatgtaggtggacatgcccctgcgtgtgcacaggtagctccactcgccacattgtgacttttgatggtcaaaattttaagttgaccgggagttgctcctatgtcctgttccaaaacaaagagcaggatcttgaagttattctgcataacggagcatgctcccctggcgcccgccaggggtgcatgaaaagcattgaggtgaagcattccgcccttagcgtggaactccattctgacatggaggtgaccgtcaacggcaggctggttagtgtcccttacgtcggagggaatatggaagtcaacgtgtatggcgccatcatgcatgaagtgaggtttaatcaccttggccatatcttcacctttaccccccagaacaacgaattccagttgcaactctcccccaaaactttcgcatcaaaaacctacggcttgtgcggcatatgcgatgaaaatggagctaatgactttatgctcagggatggcaccgttacaactgattggaaaacgctggtgcaggagtggaccgttcagagaccgggtcagacctgccagccaattttggaagagcaatgcctggtgcccgacagtagccactgtcaagttctcctgcttccgctgtttgcagaatgccataaggtattggcacccgccaccttttatgctatctgccagcaggacagctgtcaccaggaacaggtctgcgaggtgattgccagctatgcccatctgtgtcggacgaatggcgtttgcgtggactggaggaccccggatttctgcgcaatgtcctgcccaccgtctttggtgtataaccactgtgaacatggttgtcctcgccactgcgatggtaacgtctccagctgcggagatcatcctagcgaaggctgtttctgcccccccgataaggtgatgctggaaggatcttgtgttcctgaggaagcttgtacacagtgtatcggcgaggatggggtgcagcatcagttcctcgaggcctgggttccagaccatcaaccttgccagatctgcacttgcctttctggtagaaaggtcaattgtaccacacagccttgtcctacagcgaaagcgccgacctgtggcctctgtgaagtggcaaggctgcgccaaaacgccgaccagtgctgccccgaatatgaatgtgtgtgcgaccctgtctcttgtgacctccctcccgtgccccactgcgagagaggtctgcaacccacgttgacgaacccaggcgagtgccggccaaattttacttgcgcgtgtaggaaggaggagtgcaaacgggtgtcacctccatcatgtcctcctcacagactcccaacactgagaaaaacccaatgctgcgatgagtatgagtgtgcgtgtaactgtgtgaactccaccgttagctgtccccttggctatcttgcatcaacagccactaatgactgcgggtgtaccaccaccacctgcctgcctgacaaggtttgcgtgcataggagtacgatctacccagtggggcagttctgggaagaaggctgtgacgtatgcacatgcaccgacatggaagatgcagtaatggggcttcgcgtggcccagtgttcccagaaaccgtgtgaagacagttgccggtctggcttcacttacgtcctgcacgaaggtgaatgctgtgggcgatgcttgcctagcgcgtgcgaggtggttactgggagcccgcggggcgactcccagagctcttggaagtctgtgggatctcagtgggcaagtcccgagaacccttgtctgatcaatgaatgtgtgcgagtgaaggaggaggtcttcatacagcagcgaaacgtgtcttgcccacagctggaggtcccagtgtgcccatccggattccaactgtcttgcaaaaccagtgcatgctgcccatcatgtcgatgtgagagaatggaggcctgtatgctgaatggtacagtgatcggcccaggtaagaccgtgatgatcgatgtatgcacaacctgccggtgcatggtgcaggtaggcgttattagcggctttaaattggagtgtcgaaagactacatgcaacccttgcccccttgggtataaggaggagaacaataccggggagtgttgcggaagatgtctccctaccgcctgtacgattcaactccgaggaggccagatcatgacccttaaacgggatgagaccctgcaagacggttgtgatactcatttttgcaaagttaacgagagaggcgaatacttctgggaaaagagagttacgggttgcccaccgtttgacgagcataagtgtctcgcagagggtggaaaaattatgaaaatccccggaacctgttgcgatacatgcgaggagccggagtgcaacgacattactgccagactgcagtacgtgaaggtaggatcatgtaaatcagaagtggaggtggacatacactattgtcaagggaagtgtgccagtaaagcaatgtatagtattgatattaatgacgtccaggatcagtgttcatgttgtagcccgacccggactgagcctatgcaggtggctttgcactgcactaacggctcagtggtctatcacgaggttctgaacgcaatggaatgtaaatgctctccgaggaagtgctccaag

SEQ ID NO: 12575 - DNA, 8439 bp, Artificial Sequence
  derived and/or modified sequence
atgattcccgcacgtttcgcaggggttctattggcccttgccttgatcttgcccggtacgctgtgcgcagagggcacaagggggcgatctagcactgccaggtgctccctgtttggatcggattttgttaacacgtttgacggatcaatgtacagctttgccggctactgcagctacctattagccggaggctgccagaaacgctccttttcgatcattggtgattttcagaatggcaagcgggtttccctaagcgtctacctgggcgagttctttgacatccatctcttcgtaaacggcaccgttacacaaggcgaccaacgcgtgtctatgccctacgcatctaaaggcctctatcttgagaccgaggccggttactacaagctgtccggtgaggcctatggtttcgtcgctcgtatagatggctccggcaacttccaggtgctactgtcagatcgctattttaacaaaacctgcggtctttgcggcaatttcaacatttttgcagaagatgactttatgacccaggagggaaccttaaccagcgatccctacgactttgcgaattcctgggcgcttagttcgggagaacagtggtgcgagcgggcctctccaccgtccagcagttgtaacatctcctcgggcgaaatgcagaagggcctgtgggagcagtgtcaactcctgaagagcacctcagtgttcgcacgctgccatcccttggtagacccggagccttttgtggcgctgtgtgagaagaccttgtgcgagtgcgctggagggcttgaatgtgcttgccccgccctcttggaatatgccaggacctgcgcgcaagagggcatggtcctctatggctggacagatcactcggcttgctcgccggtctgcccagccggaatggagtatagacagtgtgtcagtccctgtgcgcgcacgtgccagtccctgcacatcaatgagatgtgccaggagcgttgcgtggacggatgttcgtgcccggagggccagctgttggacgagggcctgtgtgtggagtccacggagtgcccctgcgtccactccggtaagcggtatccgcccgggacatcacttagtcgggattgtaatacgtgtatttgccgtaacagtcagtggatatgctcgaatgaggaatgtcccggcgagtgcctggtgaccggacaatcccattttaagagcttcgataaccgctatttcacgttctcgggaatctgccaatatctgctggctcgagactgtcaggatcacagtttctcgattgttatcgaaaccgtccagtgcgccgacgaccgcgatgcggtgtgcacccgcagcgtgaccgtccgcctgccgggtctacacaacagcttagtcaagttgaagcatggtgccggcgtcgccatggatggccaggatgttcaactgccgctgttgaaaggcgacttgcggatccagcacacggtgacagcttcggtcaggctgtcctacggagaggacttgcagatggattgggacggtcgtggccgtctcctcgtcaagctgtcaccggtatacgccggcaagacatgtggtttgtgcggaaattacaacggcaatcagggcgacgactttctcacgccatcgggcctggccgaacccagagtggaggattttggaaacgcatggaagcttcacggagattgccaggatttgcagaagcagcattccgacccttgtgctttgaaccctcggatgactcgcttctccgaggaggcgtgtgccgtgctgacgtctccaaccttcgaagcgtgccatcgcgccgtcagccctctgccgtacttgcgtaactgtaggtacgatgtgtgttcttgcagcgatggccgcgaatgcctctgtggtgctctggcctcgtacgcggctgcctgcgccggtcgcggggttcgcgtggcctggcgagaaccaggaaggtgtgaactgaactgccccaagggtcaggtctacctgcagtgcggcaccccgtgcaaccttacatgccgatctttgtcgtatccagacgaggagtgcaacgaggcctgcctggagggttgcttctgcccgccgggattgtacatggacgagcgcggtgattgcgtcccaaaggcccaatgtccgtgctactatgacggtgagattttccagccagaggatattttctcagatcaccatacaatgtgctactgcgaagatggttttatgcattgcaccatgagcggggttccaggctctctgttgccagacgccgtcctgagcagcccgttgtcccaccgctcgaagcggtctctgagctgcaggccgccgatggtcaagctcgtctgccccgccgataaccttcgcgccgaaggcttagagtgtacgaaaacctgccagaattatgatctggagtgcatgtcgatgggttgtgtatcgggatgtctgtgtccgcctggtatggtgcgtcatgagaatcggtgcgtggccctcgagaggtgcccttgcttccaccaaggtaaggaatacgcccccggagaaactgtcaagataggctgcaacacctgcgtgtgccaggatcgcaaatggaactgcacagaccatgtctgcgatgctacatgctccacgattggcatggcacattacctaacattcgatgggctgaagtacctattccctggcgaatgccagtacgtgctggtacaggattattgcggcagtaaccctggtacgttccgcatcctggtgggcaataagggctgctcccatccgtctgtcaagtgcaaaaaaagagttaccatcctggttgaaggtggcgaaattgagctcttcgatggcgaggtgaatgtgaaacgcccgatgaaggacgagacccacttcgaggtagttgagagcggcagatatatcattttgctgctggggaaggcactgagcgttgtatgggaccgtcatctgtcaatttctgtcgtgctgaagcagacgtaccaagagaaggtgtgtggcctttgtggcaattttgacggaatacagaataacgatctgaccagctccaatttacaggtggaagaggatcctgtagacttcggaaacagttggaaggtgtcatcccaatgcgcagatacgcgaaaagtacccctggatagctcacccgcgacgtgccataataacataatgaagcagacgatggtggattcctcgtgcagaatccttacgtcggacgttttccaggactgcaacaagttagtcgaccccgagccatacctggatgtgtgcatttacgatacctgcagttgtgagtcaataggtgattgcgcgtgcttctgcgacaccatagcagcatatgctcacgtgtgcgcccaacatggtaaggttgtcacgtggcgcactgcgaccctgtgcccacagtcctgcgaagagcgcaatctgcgcgagaatgggtacgagtgcgagtggcgctataacagctgcgccccggcatgccaggtcacctgccagcacccggagccattagcatgcccggtgcagtgcgtggaaggatgccatgcgcactgcccacccgggaaaatcctggatgaactgctgcagacgtgtgtcgatcccgaggattgccccgtttgtgaggtggccggccgccggttcgcttccgggaagaaggtgactttgaaccccagcgaccccgaacactgccaaatttgtcattgcgatgtcgttaacttgacgtgtgaggcatgtcaggaaccaggcggactggtcgttcccccaacagacgcaccagtgagcccgacaaccttgtatgtggaagatatttccgagccgcccctgcatgacttctactgttcgcggctattggacttggtctttctgctggacggaagctcgcgactgtcggaggctgaattcgaggttcttaaggccttcgtggttgatatgatggagaggttgcgcattagccagaaatgggttcgcgtagcagttgtcgagtaccatgatggaagtcacgcctatataggactgaaggatagaaagcgccccagtgagctgcgccggatagcctcgcaagttaagtatgcagggagtcaagtcgcatctacaagtgaggtgctgaagtatacactgttccagattttttctaaaatcgaccgccctgaggcttcccgtattactttgctgcttatggcctcacaagagccgcaacgaatgagccggaacttcgtgcgttatgtgcagggcctgaagaaaaagaaagtgattgttattcccgtgggaattgggccccacgccaacctgaaacagatccgattgatagagaagcaggcacccgaaaataaggcatttgtcctgtcatcagtggatgagttggagcagcaacgtgatgagatcgtatcctacttatgcgatctggccccggaggcacccccccccaccctccccccggatatggcccaggtcacagtcggtccgggattgctgggtgtcagcaccttgggccccaagaggaattccatggtgctggatgtggctttcgtgctggagggctcagataaaatcggcgaagccgattttaaccgtagtaaggagttcatggaagaagtaatccagcgcatggatgtcggccaagactccatccacgtgacggtgctgcagtattcctacatggtaaccgtcgagtaccccttttcagaggcgcaatcgaagggggacattctacaacgcgttcgcgagattcgataccaggggggcaacaggacgaacaccggattagctctgcgctacctgagcgatcactcgtttctggtgtcacagggggatagggagcaggcccccaatctggtgtacatggtaaccggcaaccccgcttcagatgagatcaagcgcctccccggcgacattcaagtcgtcccgattggtgtgggaccgaatgccaacgtgcaggagctggaacgcataggctggccgaacgcgccgatcttgatacaggatttcgagaccctgccgcgcgaagctcccgacctggtcctgcaaaggtgctgctcgggcgaggggcttcagatcccgaccctgagtcccgcgcctgattgctcccagccattggacgtaattctcttgttggatggcagctcgagcttcccagcctcgtacttcgatgagatgaagagttttgcgaaggcctttataagtaaggcaaatataggcccccgactaacccaggtttcagtattgcagtatggctctataacgactattgatgtcccctggaacgtcgtgccagaaaaagcccacctgctatcgctggtagatgtgatgcagcgagagggaggaccctctcaaatcggcgacgccctgggattcgccgttcgatatctcacctcggaaatgcacggagcccgtccgggagcttccaaggctgttgtcattctagtgactgacgtgtccgtggactcagtagatgccgcggcggatgctgcgcgctccaaccgtgtgacggtgtttcccattgggataggcgatcgctacgatgccgcccagcttaggatcctggccggaccggccggtgacagcaacgtcgtcaagctgcaacgtatcgaggatctgcccactatggtgaccctgggaaattcgttcctccataagctttgctcgggattcgtacgaatatgtatggatgaagatggtaatgagaagcgtcccggcgatgtatggacgctgccagatcagtgccacaccgtgacatgccagccggacggtcaaaccctactcaagagtcatcgcgtgaactgcgaccgcggccttcggccgagctgccctaattcgcagtccccagtcaaggtggaggagacctgcggctgcaggtggacgtgtccctgcgtgtgcacgggaagtagtacgcggcatattgttacgtttgatgggcagaacttcaagcttacagggtcgtgctcatacgtccttttccaaaacaaggagcaggatctagaggtcatcttgcataacggcgcttgttcacccggagccaggcagggctgcatgaaatcgatcgaagtgaagcattccgccttgtcggtcgaacttcattctgacatggaagtgactgtgaacggccgcctcgtgagcgttccctatgttggtggtaatatggaggtgaacgtctacggagctataatgcacgaagtccgctttaatcacctaggccatatcttcacattcacaccccagaataatgagtttcaactgcagctctccccgaagacatttgccagtaagacttacggtctgtgcggaatctgcgacgagaatggtgcaaacgactttatgttacgtgacggaaccgtgacaaccgattggaaaaccctggtgcaagaatggacagtgcagagaccgggtcagacctgccagcccatactggaagaacaatgcctggttcccgacagcagtcactgtcaggtgctgcttctgccgctgttcgcggagtgccacaaagtgttggccccggccacattttacgcaatatgccaacaggacagttgccatcaagagcaggtctgcgaggttatagcctcctatgcccacttatgccgtaccaacggcgtctgcgtggattggcggacgcctgatttttgtgcaatgtcatgcccccccagtctcgtgtataaccactgcgagcacggctgtccccgacattgcgacggcaacgttagctcctgcggcgaccacccttccgagggatgtttttgccccccagataaggtgatgctagaaggatcatgcgttccagaagaggcctgcactcagtgcatcggcgaggatggcgtgcagcatcagttcctggaggcctgggtgccggaccatcaaccctgtcagatctgcacctgcctgtccggcaggaaagtcaattgtaccacccagccctgccccacagccaaagccccaacatgcggtttgtgcgaggtggcgaggctccgccagaacgcggaccagtgttgcccagagtacgaatgtgtgtgtgacccagtttcatgcgatctgcccccagttccgcactgcgagcgtggactgcagcccactctcacgaaccccggggagtgccggccgaactttacgtgcgcttgccggaaagaggagtgcaagagggtgagccctccatcctgtccgccccataggctcccgactctgcgaaagactcaatgctgcgatgagtacgagtgcgcgtgcaattgtgtcaatagcactgtatcttgccccttggggtacctagcctctacggccactaacgattgcggttgtaccaccacgacctgcctaccggacaaggtgtgcgtgcatcgatccaccatatatccagtcggccagttttgggaagagggctgcgatgtgtgtacatgcacagatatggaggatgctgtcatgggtctgcgggtggctcaatgctcacagaaaccgtgcgaagatagctgcaggtccgggttcacgtacgttcttcatgagggcgagtgttgcggccggtgcttgccaagtgcgtgtgaggtcgtgacgggatcgccgcgcggtgatagtcaatcgtcgtggaaaagtgtgggcagccaatgggcgtcaccagagaacccgtgtctcatcaatgagtgcgttcgggtgaaggaggaggtgtttatccagcagcgcaatgtctcgtgtccccagttggaggtgccggtgtgcccgtctggtttccaactaagctgtaagacctccgcatgttgtcccagctgccgctgcgagcgaatggaggcttgcatgcttaatgggaccgtgattggacccggcaagacagtgatgatcgatgtgtgcacgacatgtaggtgtatggtgcaagtcggagtaatctctggattcaagttggagtgccgcaagactacctgcaacccgtgccccctgggttataaggaggagaataacaccggtgagtgttgcggacgctgcctgccaacagcgtgcaccatccagctccgaggaggccagataatgacgttgaaacgtgatgagacgctgcaggatggatgcgacacgcacttctgcaaggtgaacgaaagaggtgaatacttctgggagaagagagtgacaggatgtccaccgttcgatgaacacaagtgcctcgcggagggcggtaaaatcatgaaaatacccggcacctgttgcgacacatgcgaggagcccgagtgcaacgacatcaccgcccgccttcagtacgttaaggtcgggtcttgtaagtcggaggtggaggtggatatacactattgtcagggcaaatgtgcctccaaggccatgtactcgatcgacatcaacgatgtacaggatcagtgctcatgctgcagcccgacgcgcactgaacccatgcaggttgctctgcactgcactaatggaagcgtcgtctaccacgaggtgcttaatgccatggaatgcaagtgttcaccacgtaaatgctctaag

SEQ ID NO: 12576 - DNA, 8439 bp, Artificial Sequence
  derived and/or modified sequence
atgataccggcgcgatttgcgggtgttctattagcgttagcgttaatactaccgggtacgttatgtgcggaaggtacgcgaggtcgatcgtcgacggcgcgttgttcgctatttggttcggattttgtaaatacgtttgatggttcgatgtattcgtttgcgggttattgttcgtatctactagcgggtggttgtcaaaaacgttcgttttcgataataggtgattttcaaaatggtaaacgtgtatcgctatcggtttatttaggtgaattttttgatatacatctatttgtaaatggtacggtaacgcaaggtgatcaacgagtttcgatgccgtatgcgtcgaaaggtctatatctagaaacggaagcgggttattataaattatcgggtgaagcgtatggttttgttgcgcgtatagatggttcgggtaattttcaagtattattatcggatcgatattttaataaaacgtgtggtttatgtggtaattttaatatatttgcggaagatgattttatgacgcaagaaggtacgctaacgtcggatccgtatgattttgcgaattcgtgggcgctatcgtcgggtgaacaatggtgtgaacgagcgtcgccgccgtcgtcgtcgtgtaatatatcgtcgggtgaaatgcaaaaaggtttatgggaacaatgtcaattactaaaatcgacgtcggtatttgcgcgttgtcatccgctagtagatccggaaccgtttgttgcgttatgtgaaaaaacgctatgtgaatgtgcgggtggtttagaatgtgcgtgtccggcgctattagaatatgcgcgaacgtgtgcgcaagaaggtatggtactatatggttggacggatcattcggcgtgttcgccggtatgtccggcgggtatggaatatcgacaatgtgtttcgccgtgtgcgcgtacgtgtcaatcgctacatataaatgaaatgtgtcaagaacgatgtgttgatggttgttcgtgtccggaaggtcaattactagatgaaggtttatgtgtagaatcgacggaatgtccgtgtgtacattcgggtaaacgatatccgccgggtacgtcgttatcgcgtgattgtaatacgtgtatatgtcgtaattcgcaatggatatgttcgaatgaagaatgtccgggtgaatgtctagttacgggtcaatcgcattttaaatcgtttgataatcgttattttacgttttcgggtatatgtcaatatctattagcgcgtgattgtcaagatcattcgttttcgatagtaatagaaacggtacaatgtgcggatgatcgagatgcggtatgtacgcgatcggtaacggttcgactaccgggtttacataattcgttagttaaactaaaacatggtgcgggtgtagcgatggatggtcaagatgttcaattaccgctactaaaaggtgatttacgtatacaacatacggttacggcgtcggttcgtctatcgtatggtgaagatttacaaatggattgggatggtcgtggtcgtttattagtaaaactatcgccggtttatgcgggtaaaacgtgtggtttatgtggtaattataatggtaatcaaggtgatgattttctaacgccgtcgggtttagcggaaccgcgtgtagaagattttggtaatgcgtggaaattacatggtgattgtcaagatctacaaaaacaacattcggatccgtgtgcgctaaatccgcgtatgacgcgattttcggaagaagcgtgtgcggtattaacgtcgccgacgtttgaagcgtgtcatcgtgcggtatcgccgttaccgtatctacgtaattgtcgttatgatgtatgttcgtgttcggatggtcgagaatgtttatgtggtgcgttagcgtcgtatgcggcggcgtgtgcgggtcgaggtgtacgtgtagcgtggcgtgaaccgggtcgatgtgaattaaattgtccgaaaggtcaagtatatctacaatgtggtacgccgtgtaatttaacgtgtcgttcgctatcgtatccggatgaagaatgtaatgaagcgtgtctagaaggttgtttttgtccgccgggtttatatatggatgaacgtggtgattgtgtaccgaaagcgcaatgtccgtgttattatgatggtgaaatatttcaaccggaagatatattttcggatcatcatacgatgtgttattgtgaagatggttttatgcattgtacgatgtcgggtgttccgggttcgttattaccggatgcggtactatcgtcgccgctatcgcatcgatcgaaacgttcgctatcgtgtcgaccgccgatggtaaaactagtttgtccggcggataatttacgagcggaaggtttagaatgtacgaaaacgtgtcaaaattatgatttagaatgtatgtcgatgggttgtgtttcgggttgtttatgtccgccgggtatggttcgtcatgaaaatcgatgtgtagcgttagaacgatgtccgtgttttcatcaaggtaaagaatatgcgccgggtgaaacggtaaaaataggttgtaatacgtgtgtttgtcaagatcgaaaatggaattgtacggatcatgtatgtgatgcgacgtgttcgacgataggtatggcgcattatctaacgtttgatggtctaaaatatctatttccgggtgaatgtcaatatgtattagtacaagattattgtggttcgaatccgggtacgtttcgaatactagttggtaataaaggttgttcgcatccgtcggttaaatgtaaaaaacgtgttacgatattagtagaaggtggtgaaatagaattatttgatggtgaagtaaatgtaaaacgaccgatgaaagatgaaacgcattttgaagtagttgaatcgggtcgttatataatattattattaggtaaagcgctatcggtagtatgggatcgacatttatcgatatcggttgttctaaaacaaacgtatcaagaaaaagtatgtggtttatgtggtaattttgatggtatacaaaataatgatttaacgtcgtcgaatttacaagtagaagaagatccggtagattttggtaattcgtggaaagtttcgtcgcaatgtgcggatacgcgaaaagtaccgctagattcgtcgccggcgacgtgtcataataatataatgaaacaaacgatggtagattcgtcgtgtcgtatactaacgtcggatgtttttcaagattgtaataaattagtagatccggaaccgtatctagatgtatgtatatatgatacgtgttcgtgtgaatcgataggtgattgtgcgtgtttttgtgatacgatagcggcgtatgcgcatgtttgtgcgcaacatggtaaagtagttacgtggcgtacggcgacgctatgtccgcaatcgtgtgaagaacgtaatttacgagaaaatggttatgaatgtgaatggcgatataattcgtgtgcgccggcgtgtcaagttacgtgtcaacatccggaaccgttagcgtgtccggttcaatgtgtagaaggttgtcatgcgcattgtccgccgggtaaaatactagatgaactattacaaacgtgtgtagatccggaagattgtccggtatgtgaagttgcgggtcgtcgatttgcgtcgggtaaaaaagttacgttaaatccgtcggatccggaacattgtcaaatatgtcattgtgatgtagtaaatttaacgtgtgaagcgtgtcaagaaccgggtggtctagttgttccgccgacggatgcgccggtatcgccgacgacgctatatgtagaagatatatcggaaccgccgttacatgatttttattgttcgcgactactagatctagtttttttattagatggttcgtcgcgtttatcggaagcggaatttgaagtattaaaagcgtttgttgtagatatgatggaacgtctacgtatatcgcaaaaatgggttcgagttgcggtagttgaatatcatgatggttcgcatgcgtatataggtttaaaagatcgtaaacgaccgtcggaattacgacgaatagcgtcgcaagtaaaatatgcgggttcgcaagttgcgtcgacgtcggaagttttaaaatatacgttatttcaaatattttcgaaaatagatcgtccggaagcgtcgcgtataacgttactactaatggcgtcgcaagaaccgcaacgaatgtcgcgaaattttgtacgatatgtacaaggtttaaaaaaaaaaaaagtaatagtaataccggttggtataggtccgcatgcgaatttaaaacaaatacgtctaatagaaaaacaagcgccggaaaataaagcgtttgtactatcgtcggttgatgaattagaacaacaacgtgatgaaatagtatcgtatctatgtgatctagcgccggaagcgccgccgccgacgttaccgccggatatggcgcaagtaacggtaggtccgggtctattaggtgtatcgacgttaggtccgaaacgaaattcgatggttttagatgtagcgtttgttctagaaggttcggataaaataggtgaagcggattttaatcgttcgaaagaatttatggaagaagtaatacaacgtatggatgttggtcaagattcgatacatgtaacggttctacaatattcgtatatggttacggtagaatatccgttttcggaagcgcaatcgaaaggtgatatattacaacgtgtacgtgaaatacgatatcaaggtggtaatcgtacgaatacgggtctagcgttacgttatttatcggatcattcgtttctagtatcgcaaggtgatcgagaacaagcgccgaatttagtttatatggttacgggtaatccggcgtcggatgaaataaaacgattaccgggtgatatacaagtagtaccgataggtgtaggtccgaatgcgaatgtacaagaattagaacgaataggttggccgaatgcgccgatactaatacaagattttgaaacgctaccgcgagaagcgccggatctagttttacaacgttgttgttcgggtgaaggtctacaaataccgacgctatcgccggcgccggattgttcgcaaccgctagatgttatactattattagatggttcgtcgtcgtttccggcgtcgtattttgatgaaatgaaatcgtttgcgaaagcgtttatatcgaaagcgaatataggtccgcgactaacgcaagtatcggttctacaatatggttcgataacgacgatagatgttccgtggaatgttgtaccggaaaaagcgcatttactatcgttagtagatgtaatgcaacgtgaaggtggtccgtcgcaaataggtgatgcgctaggttttgcggtacgttatttaacgtcggaaatgcatggtgcgcgaccgggtgcgtcgaaagcggtagtaatattagtaacggatgtatcggtagattcggtagatgcggcggcggatgcggcgcgttcgaatcgagtaacggtatttccgataggtataggtgatcgatatgatgcggcgcaactacgtatactagcgggtccggcgggtgattcgaatgtagtaaaactacaacgaatagaagatttaccgacgatggtaacgctaggtaattcgtttttacataaattatgttcgggttttgtacgtatatgtatggatgaagatggtaatgaaaaacgtccgggtgatgtatggacgttaccggatcaatgtcatacggttacgtgtcaaccggatggtcaaacgttattaaaatcgcatcgagtaaattgtgatcgtggtctacgtccgtcgtgtccgaattcgcaatcgccggttaaagtagaagaaacgtgtggttgtcgttggacgtgtccgtgtgtatgtacgggttcgtcgacgcgacatatagttacgtttgatggtcaaaattttaaattaacgggttcgtgttcgtatgtactatttcaaaataaagaacaagatttagaagttatattacataatggtgcgtgttcgccgggtgcgcgtcaaggttgtatgaaatcgatagaagttaaacattcggcgttatcggtagaattacattcggatatggaagtaacggttaatggtcgtttagtatcggttccgtatgttggtggtaatatggaagttaatgtttatggtgcgataatgcatgaagtacgttttaatcatctaggtcatatatttacgtttacgccgcaaaataatgaatttcaactacaattatcgccgaaaacgtttgcgtcgaaaacgtatggtttatgtggtatatgtgatgaaaatggtgcgaatgattttatgttacgagatggtacggttacgacggattggaaaacgttagtacaagaatggacggtacaacgtccgggtcaaacgtgtcaaccgatactagaagaacaatgtctagtaccggattcgtcgcattgtcaagttctattattaccgctatttgcggaatgtcataaagtactagcgccggcgacgttttatgcgatatgtcaacaagattcgtgtcatcaagaacaagtttgtgaagttatagcgtcgtatgcgcatttatgtcgtacgaatggtgtttgtgttgattggcgaacgccggatttttgtgcgatgtcgtgtccgccgtcgttagtatataatcattgtgaacatggttgtccgcgtcattgtgatggtaatgtatcgtcgtgtggtgatcatccgtcggaaggttgtttttgtccgccggataaagtaatgttagaaggttcgtgtgttccggaagaagcgtgtacgcaatgtataggtgaagatggtgtacaacatcaatttttagaagcgtgggtaccggatcatcaaccgtgtcaaatatgtacgtgtctatcgggtcgtaaagtaaattgtacgacgcaaccgtgtccgacggcgaaagcgccgacgtgtggtctatgtgaagttgcgcgtctacgtcaaaatgcggatcaatgttgtccggaatatgaatgtgtatgtgatccggtttcgtgtgatctaccgccggttccgcattgtgaacgtggtttacaaccgacgctaacgaatccgggtgaatgtcgtccgaattttacgtgtgcgtgtcgtaaagaagaatgtaaacgagtatcgccgccgtcgtgtccgccgcatcgtctaccgacgttacgtaaaacgcaatgttgtgatgaatatgaatgtgcgtgtaattgtgttaattcgacggtttcgtgtccgttaggttatctagcgtcgacggcgacgaatgattgtggttgtacgacgacgacgtgtttaccggataaagtatgtgtacatcgatcgacgatatatccggtaggtcaattttgggaagaaggttgtgatgtatgtacgtgtacggatatggaagatgcggttatgggtctacgagttgcgcaatgttcgcaaaaaccgtgtgaagattcgtgtcgttcgggttttacgtatgtattacatgaaggtgaatgttgtggtcgatgtttaccgtcggcgtgtgaagtagtaacgggttcgccgcgtggtgattcgcaatcgtcgtggaaatcggtaggttcgcaatgggcgtcgccggaaaatccgtgtctaataaatgaatgtgttcgtgtaaaagaagaagtatttatacaacaacgtaatgtatcgtgtccgcaattagaagtaccggtttgtccgtcgggttttcaattatcgtgtaaaacgtcggcgtgttgtccgtcgtgtcgatgtgaacgaatggaagcgtgtatgttaaatggtacggtaataggtccgggtaaaacggtaatgatagatgtatgtacgacgtgtcgttgtatggttcaagtaggtgtaatatcgggttttaaactagaatgtcgtaaaacgacgtgtaatccgtgtccgttaggttataaagaagaaaataatacgggtgaatgttgtggtcgatgtttaccgacggcgtgtacgatacaattacgaggtggtcaaataatgacgctaaaacgtgatgaaacgttacaagatggttgtgatacgcatttttgtaaagttaatgaacgaggtgaatatttttgggaaaaacgtgtaacgggttgtccgccgtttgatgaacataaatgtttagcggaaggtggtaaaataatgaaaataccgggtacgtgttgtgatacgtgtgaagaaccggaatgtaatgatataacggcgcgattacaatatgttaaagtaggttcgtgtaaatcggaagtagaagttgatatacattattgtcaaggtaaatgtgcgtcgaaagcgatgtattcgatagatataaatgatgtacaagatcaatgttcgtgttgttcgccgacgcgtacggaaccgatgcaagttgcgttacattgtacgaatggttcggtagtttatcatgaagtattaaatgcgatggaatgtaaatgttcgccgcgtaaatgttcgaaa

SEQ ID NO: 12577 - DNA, 8439 bp, Artificial Sequence
  derived and/or modified sequence
atgattcccgcacgtttcgctggtgttttgctagccctcgctctgattcttcctggcaccctttgcgcagaagggacgagggggcggagcagtacagccaggtgtagcctgtttggatcagatttcgttaacaccttcgacggcagtatgtattcgtttgccggctactgttcgtacctccttgctggtggatgtcagaagcggtcctttagtatcatcggcgactttcaaaatgggaaacgcgtgagtttgtccgtctacttaggcgagttttttgacattcatttgtttgtgaatggtacagtaactcagggggaccaaagggtcagtatgccctatgcatcaaaaggtttgtatctggagacagaggcagggtattacaaattatcaggcgaagcgtacggattcgtcgcacgaattgacggttctggcaattttcaagtgctgctcagcgaccgatactttaacaaaacatgcggcctgtgcggaaatttcaatatctttgccgaggacgatttcatgactcaagagggaacactaaccagtgacccctatgacttcgctaacagctgggccctctcatctggtgaacagtggtgcgagagagcaagtccaccatcttcttcctgtaacatctcctccggagaaatgcagaagggactgtgggaacagtgtcagctccttaaatctaccagcgtctttgcgcggtgtcaccccttggtggatcccgagcccttcgtggcactttgtgagaaaaccctgtgtgaatgtgctggtggactggagtgtgcctgtcccgccctgttagagtatgcgcgcacctgcgcccaggagggcatggtgctgtacgggtggacagatcacagcgcttgcagtccagtatgtccagccgggatggaatataggcaatgcgtgagcccctgtgccaggacctgccagagcctgcacatcaacgagatgtgtcaggagaggtgcgtggatggttgctcatgccctgagggccaacttctcgatgagggattgtgtgtggagagcacagagtgtccatgtgtgcactccggaaaacgctacccccccggaacttcactctctcgcgattgcaatacatgcatctgtaggaactctcagtggatttgttctaacgaagaatgtccaggtgaatgcctggtgaccggacaatcccactttaagagcttcgacaatcgctacttcaccttcagtggaatttgtcagtatctgctagcccgggattgccaggaccactcttttagcatcgtgattgagacagtgcagtgcgcggacgatagggacgcagtatgtaccaggagcgtaactgtccgcctgccagggctgcacaacagtttggttaagttgaaacatggcgcaggcgtcgcaatggacggtcaggacgtgcagttgcctctgttgaagggcgacctgcggatacaacataccgtgactgcgtctgttaggctgagttatggagaagacctgcaaatggattgggacggcaggggaaggttgctcgtcaaattgagtcctgtctatgccggcaagacatgtggtctctgtgggaattataatggtaaccagggggacgacttcctgacgccctcaggcctcgccgagcccagagttgaggactttgggaacgcatggaaactgcatggagattgccaggatcttcagaagcagcatagtgatccttgcgcgttgaatcccagaatgaccaggttctctgaagaagcttgcgcggtgctcacaagcccaactttcgaggcatgtcatcgcgctgtcagtcctctgccttatctgcggaactgcagatacgacgtgtgctcttgtagcgatggcagggagtgcctttgcggtgctctggccagttatgctgcggcatgcgccgggagaggtgtcagagttgcttggcgtgaacctggccggtgcgagctgaattgcccgaaaggacaagtgtatctgcagtgcggtacaccttgtaacctgacatgtcgcagcctttcatatccagatgaggaatgtaacgaggcatgtctcgaaggatgtttctgccctccagggctgtacatggacgagcgcggcgattgcgtgcccaaggcccagtgcccatgctactatgacggcgagatctttcaaccagaggacatattctctgaccatcatacaatgtgctactgcgaggatggcttcatgcactgtactatgtctggcgttcctggctcactgctgccggatgccgttttatcttcccccttatcacacaggagtaagaggagcctctcctgtagaccacctatggtgaaacttgtctgtcctgccgataacctcagggccgaaggcctggagtgtactaaaacatgtcagaactacgacctggaatgcatgtcgatggggtgcgtcagtggatgtctctgtccacctgggatggtgaggcacgaaaataggtgtgtcgctctggagcggtgcccttgtttccatcaggggaaggagtatgctcctggcgagacagtcaagattggctgcaatacttgcgtgtgtcaggataggaagtggaactgcacagatcatgtgtgtgacgctacatgctcgacaattggcatggcgcattatctgacttttgatggtctcaagtatctgttccccggcgagtgccagtacgtgctcgtgcaggattattgtgggtcaaatcctgggacgtttcgcatccttgtggggaacaaaggttgttctcaccctagcgtgaaatgcaaaaagagagtaaccatactcgtggaaggaggcgaaattgagctctttgatggcgaagtaaatgtgaaacgtccgatgaaggacgaaacccacttcgaggtggtcgaatccggaaggtacattattttgttgcttggtaaagctcttagcgtggtgtgggacaggcacctgtcgatcagtgtggtgctcaaacaaacgtatcaggagaaagtgtgtggcctctgcggaaattttgatggtatccagaataatgacctgacctctagcaatctgcaggtcgaggaagaccctgtggactttggtaattcatggaaggtatcttcacagtgtgcagatacacgaaaagtgcctctagatagctctcctgcaacctgccataataatattatgaaacaaacaatggttgatagctcttgcaggattctgactagtgacgtgttccaggattgcaacaaattagtcgacccagagccatatttagatgtctgcatctacgacacctgtagttgtgaaagcatcggggactgtgcctgcttctgcgatactattgcagcatatgcccacgtgtgtgctcagcatgggaaggttgtgacctggcggacggctacactgtgtccccagtcttgtgaagagagaaacctgagggagaacgggtacgagtgcgagtggagatacaattcttgtgcaccggcgtgtcaggtaacctgtcagcatcccgagcccctggcctgccccgtgcagtgtgttgaggggtgtcacgcgcattgcccccccggaaaaattctggacgaacttctccaaacttgcgtagatccggaggattgtcccgtctgtgaggtggcaggccgccgattcgcctctggtaagaaggtcacactgaatccttccgatcccgagcattgtcagatttgccactgtgacgtggttaacctgacctgtgaggcatgtcaagagcctgggggcctggtcgtcccaccaacagacgcccctgtttcacccacgaccctctatgtggaggacatttccgaacctcctctccacgacttctactgctctcgactacttgacctcgtgtttctgctggatggaagtagcaggctcagtgaggccgagttcgaggtcttgaaggccttcgtggtcgacatgatggagcggctgcgaatcagccagaagtgggttcgcgtcgcagttgtagagtatcatgatgggagccacgcatacatcggcctgaaagaccgaaagaggccatcagaactgaggcggatagcctcccaggttaagtatgccggctcacaggtcgcaagtacgtctgaagttctcaagtataccctgttccagattttcagtaaaatcgacaggcctgaggcctctcgaatcaccctgttattgatggcgtctcaggagccccagcgaatgagccgtaacttcgtccggtatgtgcaggggcttaaaaagaagaaggtcatcgtcatccccgttggtatcggcccgcacgcgaacctcaagcaaatccgcttgatcgaaaagcaggccccagagaataaggccttcgtcctatctagtgttgacgagctggagcagcagcgggacgaaatcgtgtcctatctctgtgatctcgcaccagaggcaccccctcccaccctgccacctgatatggcccaggtcaccgtgggcccagggctcttgggggtcagcacactgggacccaagcgcaactcaatggtcttggacgtggctttcgtgctggagggcagtgacaagatcggcgaggcggactttaacaggtccaaggaattcatggaagaagttatacagagaatggacgtagggcaggacagtattcacgtcacagtgctgcaatacagttatatggtgaccgtcgagtacccattttccgaagcacagagcaagggggatattctgcagagagtacgtgagattaggtaccagggcggcaaccgcactaacacaggccttgcactgcgttatttgtcggaccactctttccttgtgtcccagggagacagagagcaggcccctaatctcgtgtatatggtgactgggaaccctgcaagcgatgagataaagcggttgccaggggatatccaagttgtacccattggggtggggcctaatgctaacgttcaggagcttgagcggattggatggcccaatgcacctattctgatacaggattttgagaccttacctagagaggctcctgacctggttctacagcgatgctgtagtggtgagggcctccagattcctacccttagcccggcgccagattgctctcaacctctggatgtcatcttgctcctcgatgggtcctcaagctttcccgcgtcttatttcgatgagatgaagagttttgcaaaagcgtttatatccaaggccaatatcgggcccagactgacgcaggtatctgtcctgcagtacggatccatcactacaatcgacgtgccatggaatgtggtgcccgagaaagctcatctgttgtctctggtcgacgtgatgcagagggagggcggtccaagccagatcggggacgctctgggcttcgcggtccggtacctcacaagcgaaatgcacggcgcccgccccggggctagcaaagccgtggttatcctggttacagacgtgagcgttgactccgtggatgctgcagcagatgccgcccgatccaatcgtgtgaccgtattccctatcggtatcggagatagatacgacgctgcacagctccggatcctggccggacctgctggagacagcaacgttgtgaaattacagcggatcgaagacctcccaaccatggtaactttagggaatagttttttgcataagctgtgcagcggtttcgtcaggatctgtatggatgaggatgggaacgaaaaacggcccggtgatgtctggactctgcccgatcagtgtcatactgtaacttgtcagcccgatggacaaacactcctgaaaagccatagagttaattgcgacagggggctgcggccctcctgccccaatagccagagtccagtgaaagtcgaggaaacttgtggatgcagatggacatgtccctgcgtctgcactggcagttcaactaggcacatcgtcactttcgacggtcaaaattttaagctgactgggtcctgctcctacgtcttatttcagaacaaagaacaggatctggaggtgattctgcacaatggcgcatgcagtcctggggcgaggcagggatgtatgaagtctatcgaggttaagcactccgccctttcggtggagctgcattccgacatggaagtgactgtgaatggaagattggtctccgtcccctatgtgggtggaaacatggaagttaacgtgtacggcgcaattatgcacgaagtacggtttaaccacctgggccacatttttaccttcaccccacagaacaatgagtttcagctgcagctctcccctaagacctttgccagtaagacatacggcttgtgcggtatatgcgacgaaaacggcgcgaacgacttcatgctgagggacggcacggtgaccaccgattggaaaacactggtgcaggaatggacagtccagcggccaggccagacatgtcagcctattcttgaagagcagtgtctggtccccgattcctcccattgccaggtgctgcttctgcctctgttcgcagagtgccacaaagtgcttgccccggccacattctatgccatttgccaacaagattcctgccatcaagagcaggtgtgcgaggtgatagcctcatacgcccacctgtgccggacaaatggggtgtgcgtagattggagaacaccagacttctgtgcgatgtcctgcccgcctagcctggtttacaaccactgcgagcacgggtgcccccgccactgtgacggcaacgtgtctagttgcggagaccacccctcagaaggctgtttctgtccacctgacaaggttatgctggagggttcctgtgtgcctgaagaggcatgtacacagtgcattggagaggatggggtccaacatcagttcctggaggcttgggtgccagaccatcagccatgccaaatatgcacctgtctgtctggccgcaaggttaactgtacgactcagccatgtcccactgccaaagctccaacctgcggattgtgcgaggtagctcggctcagacagaacgcagatcagtgctgtccagaatacgagtgcgtctgtgaccctgtgtcatgtgatttaccacccgtgcctcactgcgaaagggggctgcagccgacccttactaatcccggggagtgccggcctaatttcacgtgtgcatgtagaaaagaagaatgtaaacgcgtctccccgccatcctgtccgccgcaccgtctgcctactcttaggaaaactcagtgttgcgacgagtatgaatgcgcctgtaactgtgtgaacagtactgtatcttgcccattggggtaccttgcatctaccgctaccaacgattgtggatgtaccacgaccacctgcctcccggacaaagtgtgcgtgcaccgaagcactatctatcccgtagggcagttctgggaggagggctgtgacgtctgcacatgcactgacatggaggatgccgtgatggggctacgggtagcgcagtgctcccaaaagccctgcgaggattcttgtcgttccgggtttacatacgtgctgcatgagggggagtgttgtggacgatgcctcccatccgcatgtgaggtggtgacagggagtccgcgtggggatagtcagtcctcgtggaaaagtgttggatcccagtgggcaagcccggagaatccatgcctgatcaacgaatgcgttcgggtcaaggaagaggtcttcatccagcagaggaatgtgtcctgcccccagctcgaagtccctgtgtgtccgtccgggttccagcttagctgtaagacgtccgcctgttgtccaagttgcaggtgcgagcgcatggaagcctgtatgctgaatggaacagtgattggccctggaaagacagtgatgatcgacgtttgcacaacttgtaggtgtatggtccaggtgggcgtaatcagcggcttcaagctggagtgcagaaaaaccacttgtaatccttgtccattagggtacaaagaagagaataataccggcgagtgctgtggtaggtgcctcccaacagcatgtactatccagctgaggggaggacaaatcatgacgcttaaaagagatgagactctccaggacggctgtgatacccatttctgcaaggtaaatgagagaggagagtacttctgggaaaagcgtgtgactgggtgtcctccctttgatgagcacaaatgtttggcggaagggggcaagattatgaagattccgggcacatgctgcgatacctgtgaagagcccgaatgtaacgacattactgctagactccagtacgtgaaagttggcagttgtaagtctgaggtcgaagtggatattcactattgtcagggcaaatgcgcctccaaggctatgtattcgatagacatcaacgacgttcaggaccagtgttcatgttgttctcctacgcgcacagaacctatgcaggtggcgctgcactgcacaaatggttcggtcgtgtatcatgaggtgctcaacgccatggaatgcaagtgttccccacgcaaatgctccaag

SEQ ID NO: 12578 - DNA, 8439 bp, Artificial Sequence
  derived and/or modified sequence
atgatcccagcccgtttcgcgggagttctgttagctctggccctgattctgcctggcaccctgtgtgccgaagggacaagggggcgatcttccacagctagatgtagtctgtttggctccgacttcgtaaacaccttcgacggtagcatgtactcatttgctggctactgttcctatttgctcgcgggaggctgtcaaaaaaggtcattctccattattggtgattttcagaatgggaaaagggtctccttgtcagtttatctgggagaattttttgacatacacttgtttgtgaacggcacagtgacccagggcgaccaacgggtctccatgccatacgctagcaagggcctatatctggagacagaagcagggtattacaagctatctggggaagcatacggcttcgtggcacgcatcgacgggtcaggaaattttcaggtattgctgagtgacagatatttcaataagacctgcggcctctgcggcaattttaatatattcgcagaagatgattttatgacccaggaagggacactcacctcggatccctacgattttgctaattcctgggccttgagctcaggcgagcagtggtgtgaaagggctagccccccctcaagttcatgcaatatttctagcggcgagatgcagaaagggctttgggaacagtgccagctgctgaaaagcacaagcgttttcgctaggtgccatcctctggtggatcctgagccttttgttgctctgtgcgagaagaccctctgcgagtgtgcgggcgggctggagtgtgcttgccctgctctgttggaatacgcgcgcacgtgtgctcaggaaggaatggtcctttatgggtggaccgatcattctgcatgctcccctgtgtgtccggccggtatggagtatcgacaatgcgtttccccgtgtgccagaacgtgtcagagcctgcacatcaacgagatgtgtcaggaaaggtgcgtggacggatgttcttgccccgagggccagcttctcgacgaaggcttgtgtgtagagtctactgaatgtccttgtgtccatagcggtaagcggtacccacctgggaccagcctatccagggactgtaatacctgcatctgcaggaactctcaatggatttgtagcaacgaggaatgccctggtgagtgtctggtgactggccagtcccatttcaaatcattcgacaatcgttatttcaccttctctggcatttgtcagtatctgctagcacgcgactgccaagatcattcgttcagcatcgtgatcgagactgttcaatgtgctgatgatcgcgacgcggtgtgtactcgcagtgtcactgtgagattgcccgggctccacaactccctcgttaagctaaagcacggcgccggcgtggctatggacggacaggatgtacaactcccccttctcaaaggagacttgaggattcagcatacagtgactgctagcgtgcggctaagttacggcgaagatctgcagatggactgggatgggagggggcgactcttagtcaaactttcacctgtgtatgccggcaagacctgtggattgtgtggaaattataatggaaaccagggagatgatttccttactccgtctggactggccgaaccacgcgtcgaggatttcggaaatgcttggaagctgcacggagattgtcaggaccttcagaagcagcattccgatccatgtgcacttaacccaagaatgacaagattctctgaggaggcttgcgccgtgttaacttcacccacctttgaagcctgtcatcgggcagtgtctcctttgccttacttgcgaaattgccggtacgatgtttgttcttgttcagacggccgcgagtgtctctgcggtgcgctggcatcttatgcggctgcatgcgcgggaaggggcgtcagggtggcttggcgtgagccggggagatgcgagctaaactgccctaaaggacaggtgtacctgcagtgtggcaccccctgcaatctgacctgcaggtcattgagttatcccgacgaggagtgtaacgaagcgtgcctggagggatgcttttgccctcccggactgtatatggacgaacgcggcgattgcgtgcccaaagctcagtgtccgtgttactacgatggcgaaatattccagcctgaggacatcttttccgaccatcacacaatgtgctactgtgaagatggtttcatgcactgtacaatgtctggggtgcctgggagcctactgccggacgctgtgctgagtagccccctgagtcacaggtctaagcggagtctgtcatgtaggccaccgatggtcaagctcgtctgtcccgctgataatctgcgcgcggagggccttgagtgtaccaaaacttgccagaattacgacctagagtgcatgtcgatgggatgcgtctcgggttgcctctgcccaccaggcatggtgcgacacgagaaccgatgcgtggctctggaacggtgcccctgtttccatcaaggaaaagaatacgcccccggtgagaccgtgaagataggatgtaacacatgtgtgtgccaggatagaaagtggaactgcacagaccacgtgtgcgacgctacatgttcgacgattggtatggctcactacttgacatttgacgggttaaaatatttgttccctggcgaatgtcagtatgtacttgtgcaagactactgcggaagcaatccaggaacgttccgaatcctagtagggaacaagggatgtagccatcctagcgtgaagtgtaagaagagagtaaccatcttggtggagggaggagaaatcgagctctttgatggagaggtgaacgtgaagcggcctatgaaggatgagacccatttcgaggtggtagaaagcggcagatacatcatcctcttactgggaaaagcattgtccgtcgtttgggataggcacctgagcatcagcgtggttctgaagcagacttaccaggagaaggtctgcggactttgcggcaatttcgacggcatccaaaacaacgatctgacctcttccaatctgcaggtagaggaagatccagtcgactttggcaattcctggaaagtctcctctcagtgcgctgatacgcgcaaggttccacttgactcatctcccgccacctgtcataacaacattatgaagcagaccatggtagattccagctgccgcatcctcacaagcgacgtgtttcaggactgcaataagctagtggatccagaaccctatctggacgtatgcatctacgatacgtgcagttgcgagtccattggcgactgcgcttgcttctgcgatacaatcgctgcctacgcccacgtgtgtgctcagcacgggaaggtagtaacctggcggacagctaccctgtgcccccagtcctgtgaagaacgcaatctgagggagaacggatatgagtgcgaatggagatataattcttgtgcaccggcctgtcaagtcacttgccaacacccagagcccttagcctgccccgtgcagtgcgtggagggctgccatgcacactgcccgcccggcaaaatactggacgagctacttcaaacctgtgtcgatccggaggattgtcccgtttgtgaggttgccggacgaagattcgcttccgggaaaaaggtgaccttgaacccaagcgacccagagcactgccaaatctgccactgtgacgtagtaaaccttacctgcgaagcctgccaggagcctggaggcttggtagtgccgcctacagatgcacctgtatcccccacaaccctctatgtagaagacatatctgagccgcccttgcatgacttctactgttctaggctgctcgaccttgtgtttctactggatggctccagtcgcttaagcgaggctgagtttgaagttctcaaggcattcgtcgtcgacatgatggaacggttgcggataagccagaaatgggtgcgcgtggctgtggtggagtatcacgacggtagccacgcttacataggcctaaaagataggaagaggccaagtgaactccgtcggatcgccagtcaagttaagtacgctggcagtcaggtcgcttctacatctgaagtcctgaaatacaccctgtttcagatcttctccaagattgacaggccggaggcatcgcggattactctcttgctcatggcatctcaagagccccagcgcatgtctcgtaattttgtgaggtatgtgcagggcctaaagaaaaaaaaagtgatagttattcctgtcggaataggtcctcacgccaacctgaagcagattcgattgatcgaaaagcaggctcctgagaataaagcatttgtcctctcgtcagtcgacgagctcgagcagcagagagatgagatcgtgtcatatttgtgtgaccttgcccccgaagctcccccgccaaccctgccccctgacatggcccaggtaacggtgggtccaggactactgggtgtttcgactctgggacccaagagaaactcaatggttctggacgtcgcattcgtgctggagggcagcgataaaatcggagaggcagattttaaccgcagcaaagagttcatggaggaggtcattcagcggatggacgtaggacaggatagcatccatgtaactgttcttcaatactcgtatatggtgaccgttgagtatccttttagcgaggcccaatccaagggggatattttgcagcgggttcgggagattaggtatcaggggggcaataggacaaataccggtctggccttgagatatcttagcgaccatagcttcctggtcagccagggagatcgggagcaagcccccaacctcgtgtatatggtgactggaaacccagcaagcgacgagattaaaagactgcctggggatatccaagtggtgcccatcggagtgggccctaacgctaatgtgcaggagctggaaagaatcggctggcccaacgctcctatactgatccaggattttgagacactgcctcgggaagctccggacctggtgctccagcgctgctgcagcggcgaaggcctacagataccaactctgagcccagccccggattgctctcagccgctggatgtcatactgcttttagacggctcatcctcttttccggcctcttattttgacgagatgaagtcgttcgctaaggcctttataagtaaggctaacattgggcctcggctcacgcaggtgagtgtgctccagtacggtagcatcactactatcgacgttccttggaatgtcgtgccagagaaggctcacctgttgtcccttgtagatgtgatgcagcgcgagggagggcctagccagatcggcgacgccctaggattcgccgttaggtatctgacaagtgagatgcacggagcacggcccggagcaagcaaagccgtggttatcctagtgactgatgtctccgtcgatagtgtcgacgcagctgccgatgccgcccggtcaaaccgcgttacggtgttcccgattgggattggtgacagatacgacgctgcgcagctcaggatcttggccgggcctgccggggactctaacgttgttaagctgcaacggattgaggacctgccaactatggtgactctaggtaattcattcctgcataaactttgttctggcttcgtgcgcatctgtatggatgaggacggaaatgagaagaggcccggcgacgtttggacactaccagaccagtgtcacacggtgacctgccagccagatggtcagaccctattgaagagccatagagtaaactgcgacaggggactgagaccgagctgtccaaacagccaatctccagtgaaggtagaggaaacctgcggatgtcggtggacctgtccatgtgtatgtacgggaagctcaacaaggcatatcgtcactttcgatggccagaacttcaagctcacgggctcttgttcatatgtgctcttccagaataaggagcaggatctggaggtgatactccacaacggggcttgctcgccaggcgcccggcaggggtgtatgaagtctatcgaagtgaaacactctgccctctctgtcgaactacatagtgacatggaggtgaccgtaaacggacgtctcgtgtctgttccttatgtgggcggtaatatggaagtgaatgtgtacggtgccattatgcatgaagtccggtttaaccatctgggacacatatttaccttcacaccgcaaaacaatgagttccagctgcaactctcccccaaaacttttgcgtcgaagacatacgggctatgcgggatttgcgatgagaacggagcgaatgacttcatgttgagggatggcaccgtgacaactgactggaagacactggtgcaggagtggactgtgcagcgccctggccagacctgccagcctatcctggaggagcagtgtttggttccagatagcagccactgtcaagttcttctcctgcctctgttcgccgagtgccataaagtccttgcgcccgccacgttttatgctatttgccaacaggacagttgtcaccaggagcaggtgtgtgaggtgatagcaagttacgcacacctctgtagaactaatggagtgtgcgttgactggaggactcctgacttctgcgccatgtcatgcccaccttcccttgtttacaatcactgtgagcatggttgcccccgccactgtgatgggaacgtctcttcttgtggggatcatcccagtgaggggtgcttctgcccaccagacaaggtgatgctggaggggtcatgtgtgcccgaagaggcttgcacccagtgcattggtgaggacggtgttcagcatcagttcttggaggcgtgggtgccagatcaccagccctgtcagatctgtacatgcctgtccggcaggaaagttaactgcacaacccaaccctgccccaccgccaaagctcctacctgtgggctgtgcgaggtcgctaggttaagacagaacgccgatcaatgctgcccggagtacgaatgtgtatgtgacccagtctcttgcgacctcccccccgtgcctcactgcgaacgggggctgcagcctacactcaccaaccctggcgagtgtcgccctaactttacctgtgcctgccggaaggaagaatgcaaacgggtgtccccaccctcatgtccaccccaccggcttcctactttgcggaagactcagtgttgcgacgaatatgagtgtgcttgcaactgtgtgaatagcactgtgagttgccctcttggataccttgcttcaacagctacgaatgactgcgggtgtactactactacgtgtctacctgataaagtatgcgtccacaggagcacaatctacccagtagggcagttttgggaagaaggctgcgatgtttgcacctgtaccgatatggaggacgctgtgatgggcctcagggttgcccaatgttcgcagaagccatgcgaagattcctgtaggagtggctttacctatgtgctgcatgagggtgagtgctgtggccgctgcctgccgagcgcctgcgaggttgtgaccggctctccaaggggcgattcacagtcttcctggaagagtgtgggatcccaatgggcctccccagagaatccttgcttgataaacgagtgcgtgagagtgaaggaggaagtcttcattcagcagcgcaacgtgtcctgtcctcaactggaagtgcccgtgtgcccaagtgggttccaactgagctgtaagacaagtgcatgctgtccctcatgtagatgtgagcgaatggaagcatgtatgctcaatgggacagtgatcggtccaggcaagactgtgatgattgacgtctgcaccacatgccgatgcatggtccaagtcggcgtgataagtggatttaaactggaatgtcggaagactacatgtaatccctgtccgctggggtacaaagaagaaaacaataccggagagtgctgcggacgctgcttgcctaccgcgtgcacaatccaactcaggggcggacagatcatgacattgaaaagagatgagaccctccaggatggctgtgatacccacttttgtaaggtcaacgagaggggagagtacttctgggagaaacgcgtcacgggctgtcccccatttgacgaacataaatgtctggccgaaggggggaaaatcatgaagattccgggaacctgttgtgatacctgcgaagagccagaatgcaacgatatcaccgctcggctccagtacgtgaaagtgggctcctgtaagtctgaggttgaagtggatatacactattgtcagggcaagtgcgcctctaaggctatgtactctattgatattaacgacgtgcaggaccagtgtagctgttgttcgcccacacgaacggagcccatgcaggtcgccctgcattgtaccaacgggtctgtagtgtaccacgaggtcttgaatgcgatggaatgtaagtgctccccacggaagtgttctaaa

SEQ ID NO: 12579 - DNA, 8439 bp, Artificial Sequence
  derived and/or modified sequence
atgataccagcccgcttcgcaggcgttcttcttgccctggccctgattttgcccggcaccctctgcgccgagggcacaaggggtagatcttcaaccgctagatgctccctgttcggctcagatttcgtaaacaccttcgatggaagtatgtactctttcgccggttactgcagctaccttttggctggcggttgccagaagagaagcttttctataatcggagatttccagaacggaaaaagagtgtctctttcagtgtacctgggagagtttttcgatattcatctgttcgtcaacggtaccgtgacccagggtgaccagcgcgtctccatgccatacgcatctaaaggcctttacctcgagacagaggccggctactacaaattgtctggcgaagcttatggatttgtagctagaattgacggcagcggaaacttccaggtcctgctctctgatagatacttcaacaagacttgcggcctctgcggtaatttcaatatctttgccgaagatgacttcatgacccaggagggtactctgaccagcgacccttatgactttgcaaactcttgggctctttcttcaggtgagcagtggtgcgagcgtgcaagcccaccttcaagctcatgcaatataagcagcggagaaatgcaaaagggactgtgggagcaatgccaactcttgaagtctactagcgtttttgcccgttgccaccctctggtggatccagaacctttcgtcgcactctgtgaaaagacactctgcgagtgcgctggtggtcttgagtgcgcctgcccagccctgctggaatatgcaagaacatgcgctcaggaaggtatggtcctgtacggttggacagatcattcagcatgctcaccagtgtgcccagccggcatggagtatcgccaatgcgtgtcaccttgcgcacgtacatgccagtccttgcacatcaatgagatgtgtcaggagaggtgcgtggatggttgctcctgccccgaaggacagctcctcgatgagggactttgcgtcgagtctacagaatgcccctgtgtacactccggtaaaaggtatccaccaggtacttccttgtcaagagactgcaacacatgcatctgcaggaactcacagtggatatgttccaatgaggaatgtccaggtgagtgcctggtcaccggccaatcccactttaagagtttcgataaccgctacttcacattcagtggtatttgtcaatatctgctcgccagggactgccaagatcattcctttagcatcgtgatcgaaacagtacagtgcgccgacgaccgcgatgcagtatgcacccgctcagtgaccgtgcgtctgcccggtttgcataactctttggttaaactgaaacacggagctggcgtggctatggacggtcaggatgtgcagctgcccttgctgaagggtgaccttaggatccagcataccgtgactgcaagcgttaggctgagctatggagaagacctgcagatggactgggacggtagaggaaggcttttggtaaagctcagtccagtttacgccggcaagacctgcggcctctgcggaaattacaacggcaaccagggagacgacttcctcacccctagtggcctggccgagccaagggtcgaagatttcggaaacgcttggaagcttcacggtgactgccaagatttgcaaaagcaacactcagatccatgcgcactgaacccacgcatgacccgtttttcagaagaggcctgtgccgttctgacctcacccacatttgaggcttgccacagggctgtctcacctctgccatacctcaggaactgtcgttacgatgtctgctcctgcagtgacggccgtgaatgtctctgcggcgccctggcttcttatgctgccgcatgtgctggtaggggcgtccgcgtggcctggagggagcccggcaggtgtgaacttaactgtcctaaaggccaggtgtacctgcagtgtggaactccttgcaatttgacttgtaggagcctgagctatccagatgaagaatgcaacgaagcctgcctggaaggatgcttctgtcctccaggtttgtatatggacgagaggggtgattgcgtgccaaaggctcagtgtccatgctactacgacggagagatcttccaaccagaagatatcttcagtgatcatcacacaatgtgttactgcgaggacggtttcatgcactgtactatgtcaggagtgcccggttcccttctcccagacgcagttcttagcagccccctgtcacataggtccaagcgtagtctgtcttgcagaccaccaatggttaagttggtgtgccctgctgacaaccttagagccgagggattggagtgtacaaaaacatgccaaaattacgacctggaatgcatgtcaatgggatgtgtgagtggttgtctttgtccacccggtatggttaggcacgagaatcgttgcgtggcactggagaggtgtccctgcttccaccaaggtaaagaatatgctccaggagagaccgtgaagatcggttgcaatacttgtgtctgccaggaccgcaagtggaactgcaccgaccacgtttgtgatgctacctgctctaccatcggcatggcccactacctgacctttgacggcctgaagtacctgttccctggagaatgtcagtacgtgctggttcaggattattgcggcagcaacccaggcaccttcaggattcttgttggaaacaagggatgttctcatcctagcgtgaaatgtaagaagcgcgttacaatcttggtcgagggtggtgagatcgagctgttcgatggagaggtgaacgttaaacgtccaatgaaggatgagactcacttcgaggtggtggaatcaggaagatacatcatcctgctgttgggcaaggccttgtctgtagtgtgggaccgccatctcagcatctctgtggttcttaagcagacctatcaggagaaagtctgcggcctctgcggaaacttcgacggcatccagaacaacgatttgacctcttcaaacttgcaggtggaagaggacccagtggattttggtaacagctggaaggtgtcctctcaatgcgccgacactagaaaagtacccctggattcatctcccgcaacatgccataacaacatcatgaagcagacaatggtggatagcagctgcaggatcctgacctctgacgtatttcaggattgcaataagctggtagatccagagccatacctggacgtgtgtatttacgacacctgttcctgcgagtctatcggtgattgcgcttgcttttgcgatacaatcgccgcctacgcccatgtgtgtgcccagcatggtaaggtcgtcacttggagaacagccactctttgcccacagagctgcgaggagcgtaacttgcgcgaaaatggctacgaatgcgaatggaggtataactcttgtgctcccgcctgtcaggttacatgtcaacatccagagcctttggcttgcccagttcaatgtgtggaaggttgccacgctcactgccccccaggtaagatcctcgacgaattgctgcagacttgcgtggaccctgaggattgtccagtgtgcgaagtagctggtagacgcttcgcttccggcaaaaaggttaccctcaacccaagcgaccccgagcactgccagatttgccactgcgacgtggtaaacctgacctgcgaagcctgccaggaacctggtggcttggtggtgccacccactgacgccccagtttctccaactactctttacgtggaggatatttccgagcccccactgcacgacttctactgcagccgtttgctggacctcgtgtttctgctggacggtagcagtagactgagcgaggccgagtttgaggttctgaaggctttcgttgtcgatatgatggaacgtctccgcatttcccaaaaatgggtaagggtcgccgtcgtggaataccacgacggtagccatgcctatattggcctgaaggacaggaagcgccctagcgagctcagaagaatcgctagtcaggtcaagtacgccggttcacaggttgcctctacctctgaggtgttgaagtataccctgttccaaatcttttccaaaatcgaccgtcccgaagcctctcgtatcacactcttgctcatggcctctcaggaacctcagcgtatgagcaggaacttcgtgcgctacgtgcagggcttgaaaaagaagaaggttatcgtgatcccagtgggcattggtccccatgccaatctgaagcagatacgcctcatcgagaaacaggcacccgagaataaggcttttgttcttagctctgttgacgaactggagcagcaaagggacgagatcgtctcctatctctgtgatctcgcacctgaagcacctcctccaactcttccccccgatatggcccaagtcacagtgggacctggactgctgggagtgtcaaccctgggtcccaaacgcaactccatggttctggatgtggcttttgtgctcgagggctctgacaagattggagaggcagacttcaatagatcaaaggaattcatggaggaagtcattcaaagaatggacgtgggtcaggattctattcatgtgacagtgctccaatactcctatatggtcaccgtggagtaccctttctccgaagctcaatccaagggtgacatactccagagagttagagagatccgctaccagggtggcaataggaccaacaccggtttggctctgcgctacctgtccgaccactcatttctcgtgtcccagggagatagagagcaagctcccaatctggtctatatggtgacaggaaaccccgcttctgatgaaattaagagactgccaggcgatatacaggtagtgcctattggcgtaggaccaaacgccaatgttcaggaattggaaagaattggctggcccaacgctccaatcctcattcaggactttgaaacactccctagagaggctcctgaccttgtgcttcagagatgttgctccggagagggactgcagataccaacattgagccctgctcctgattgcagccaacctctggatgttatcctgttgctcgatggctcatcttcatttcctgcttcttattttgatgaaatgaaaagtttcgctaaagcttttatttcaaaagcaaatataggacctcgcctcacacaggtatcagtgttgcaatatggatccatcaccaccatcgacgtgccatggaatgtagtccctgagaaagctcacctgctgtcactggtggacgttatgcagagggaaggaggaccaagccaaatcggtgatgctctgggatttgctgtgcgttaccttacatccgaaatgcatggagccaggcccggcgcctccaaggctgtcgtaattctcgtcacagatgtttccgtggacagtgttgacgctgcagcagatgctgctaggtctaaccgcgtgaccgtattccctattggtataggagatagatatgacgccgctcaactgagaatactcgctggccctgccggcgattcaaacgtcgtcaagttgcagcgcattgaggaccttcccacaatggttaccctcggaaactcattcctgcataaattgtgtagcggatttgtacgcatctgcatggacgaggatggcaatgagaagcgtcctggtgacgtttggacccttcccgatcagtgccatacagtcacctgtcagcccgacggccagacacttttgaagagtcatcgcgttaattgtgaccgtggcctgaggcctagctgccctaactctcaaagcccagtgaaggttgaggagacatgcggttgccgctggacatgcccttgtgtctgcactggatcttctaccagacacattgtgacctttgatggacaaaactttaagcttaccggttcatgctcatacgtcttgttccaaaacaaggagcaagaccttgaagtgatactccataatggagcttgctcccctggtgctagacaaggttgtatgaagtccatcgaagtgaaacattccgccctgtccgtggaattgcactctgatatggaagttactgttaatggcagactggtgtccgtcccttatgtgggtggtaacatggaggtgaatgtctacggagctattatgcatgaggtgagattcaaccacctgggccacatttttactttcacaccacagaacaatgagttccagctccagctgagccctaagaccttcgcctccaagacctatggtttgtgcggtatctgcgatgaaaatggagccaatgactttatgctgcgcgatggtacagtcactaccgactggaagaccctcgtgcaagagtggacagtgcagcgtcccggacagacatgccagcccatactggaagaacagtgcctggtgcccgatagttcccactgtcaagtgctgttgctccctctctttgccgagtgtcacaaagtcctcgctcctgctacattctatgccatctgtcagcaagattcttgccatcaggagcaagtctgcgaggttatcgcctcatatgcacacctttgccgcacaaacggagtttgcgtggactggcgcacccccgacttctgtgctatgtcctgcccacctagcctggtttataaccattgcgaacacggctgccctcgtcactgcgacggtaatgtgtccagctgtggtgatcacccctcagagggttgcttttgcccaccagataaggttatgttggaaggctcttgtgtccctgaggaggcttgcacacagtgcataggcgaggatggtgtacagcatcagttcttggaggcatgggtgcctgaccaccagccttgtcagatttgcacctgcttgtccggcaggaaggtgaactgtactactcagccttgccctaccgctaaggcacccacttgtggcttgtgcgaagtcgcacgtctcagacaaaacgcagatcaatgctgtccagagtacgagtgcgtgtgcgaccctgtttcatgcgatctgccccccgtgccccattgtgagaggggactgcagcctactctgactaaccctggcgagtgccgtccaaactttacctgcgcctgcaggaaggaagagtgcaagcgtgtgtctcccccttcctgtccaccccatcgcttgcctactctgaggaagacccaatgttgcgacgagtatgaatgcgcctgcaactgcgtcaattctaccgtatcttgtcctctcggatacttggcttccactgcaactaatgactgcggctgtaccaccacaacttgtctgcccgacaaggtgtgcgtacatagaagcaccatataccccgtcggccaattctgggaggagggttgcgacgtgtgtacttgcacagatatggaggacgccgtgatgggactgagagtggctcagtgctctcagaagccttgcgaggacagttgccgctctggttttacttacgtgcttcacgaaggcgagtgttgcggcaggtgccttcccagtgcatgcgaagtggtcaccggctcaccccgcggagactctcagtcctcctggaaatccgtgggttcccaatgggccagccccgagaatccctgtctgatcaatgagtgtgtgagagtgaaggaggaggtgttcatccagcagaggaatgtgtcctgcccccagctggaggtgcctgtgtgtccctctggttttcagctctcctgtaaaacttcagcttgctgccctagctgcaggtgtgagcgtatggaagcttgtatgctcaacggtactgtcatcggaccaggaaaaaccgtgatgatcgacgtgtgcaccacttgccgttgtatggtgcaggttggtgtcatttccggctttaagttggagtgtcgcaagaccacatgcaatccctgccccctcggatacaaggaagaaaacaataccggtgagtgttgtggccgctgcctgcccacagcctgtactatacagttgaggggtggccagattatgacacttaagcgcgatgagactcttcaagacggctgcgacacccacttttgtaaagtgaatgagagaggtgaatacttttgggagaaacgcgtaaccggttgccccccattcgacgaacacaagtgtctcgccgaaggcggtaagataatgaaaatccccggtacttgttgcgatacttgcgaggagccagagtgtaatgacatcactgcacgcctccagtatgtcaaggtgggttcttgtaagagtgaggtggaggttgatatccactactgtcagggcaagtgtgccagtaaggctatgtatagcatcgatatcaatgatgtccaggatcagtgctcttgctgctctccaacacgtactgagccaatgcaggtggcactgcactgtaccaacggaagcgtcgtgtatcacgaggtgttgaatgctatggagtgcaaatgctcccctaggaaatgcagcaag

SEQ ID NO: 12580 - DNA, 8439 bp, Artificial Sequence
  derived and/or modified sequence
atgatccccgcacgctttgctggagtgctccttgccctggccttgatccttcccggcacactatgcgctgaaggaacaagaggcagaagctctaccgctaggtgcagcctgttcggctccgacttcgtcaatacgtttgacgggagcatgtatagttttgctggatattgcagttacctgctggctggagggtgtcagaagaggagcttcagcattatcggagacttccaaaacggaaagcgcgtgagcctttctgtttacctgggagaattttttgacatccatctgtttgttaacgggaccgtgacccagggggatcagcgggtgagtatgccttacgcaagtaagggtctctatctggaaacagaggcaggttactacaaactttcaggagaagcttatggatttgtcgctcgcatcgacggaagtggcaacttccaggttctcttaagcgaccgctattttaacaagacctgcggcctgtgcggaaactttaatattttcgccgaagatgacttcatgacccaggagggcaccctaacttccgacccctacgattttgcaaacagctgggctctgagctccggggaacagtggtgcgaaagagcctccccacccagctcctcctgcaacatctcatcaggcgaaatgcagaaagggctctgggagcaatgtcaactcttgaaatccacatctgtattcgctaggtgtcacccccttgtcgaccctgaacccttcgtcgctctctgtgaaaaaaccctgtgtgagtgtgccggggggctcgagtgcgcctgccctgcattgcttgaatatgctagaacgtgcgctcaggagggcatggtactgtatggctggaccgatcactcggcatgtagtccagtttgtcctgcagggatggaataccgccagtgtgtttcaccttgcgcacgcacctgccagagcctgcatattaatgaaatgtgtcaagaaagatgtgtcgatggatgctcatgcccagagggccagttacttgacgaggggctgtgcgttgagtctaccgaatgcccatgcgtgcattcgggcaaaagatacccaccaggcacctccttgtcaagagattgcaacacttgcatatgcagaaactcccagtggatctgctcaaacgaggaatgcccaggagagtgcctcgtcacgggccaatcacactttaagtcattcgacaataggtacttcacattcagcggcatctgtcaatacttgctcgcacgcgattgccaagaccactcgtttagtatcgtgatcgaaacagtccaatgcgccgatgatagggacgccgtttgcactaggtctgtgactgtgcgcctaccaggcctccataatagccttgtcaaactcaagcacggcgcaggcgttgcaatggatggacaggatgttcaactgcccctcctcaaaggcgatctgagaattcagcatacagtcacagcgagcgtgcgtctcagctacggagaggacctgcagatggattgggacggccgcggaagactcctggtgaagctgagccctgtttacgcaggtaagacctgcggactttgcggcaactacaacggcaaccagggagacgatttcctgaccccttccggactcgcggagccaagagtagaagatttcggaaacgcctggaaattgcacggcgactgtcaggatttacaaaaacagcacagcgacccatgcgctcttaaccctcgaatgaccagattctccgaggaagcctgcgccgttctgacatcaccaacatttgaagcttgccatcgcgccgtttcaccgctgccatatctgagaaactgcaggtacgatgtctgttcttgctctgatgggagggagtgtctgtgcggcgccctcgccagctatgccgccgcttgcgctggcaggggcgtgcgagtagcctggcgtgaacccggcagatgtgaactgaactgtcctaaaggccaggtctacctccagtgtggtaccccctgcaacctcacatgtaggagcctgagttatcccgatgaagagtgtaacgaggcttgcctcgaaggctgtttctgtccaccaggcctgtacatggacgagcggggcgattgcgtccccaaagctcaatgtccgtgttactatgatggagaaatcttccaaccagaggatatattctccgaccatcatacaatgtgttattgcgaagacggctttatgcactgcactatgtccggagtccccggctccctgctgcccgacgccgttctaagttctccactcagtcatcgctctaagagaagcctgtcttgtaggcctcccatggtcaagctggtgtgtccagctgacaaccttcgggctgaaggcctagagtgcaccaagacctgtcaaaactacgatttggagtgtatgagcatgggatgcgtatctggttgtttatgcccgccgggcatggtaaggcacgagaatcgatgcgtggctctggaaaggtgtccttgctttcaccagggaaaagagtacgcacccggggaaacagtcaagatcggttgcaatacatgcgtatgtcaagatagaaagtggaactgcacagatcacgtgtgcgacgccacatgttctaccattggaatggcccattatctgacgtttgatggcttgaagtacctcttcccaggggaatgccagtatgtgttggtccaggactactgcggctctaaccctggtacttttaggatcctcgttggcaacaagggttgttctcatccatccgttaaatgcaaaaagagagttacaatcctggtcgagggaggagaaatcgagctgtttgacggagaagtgaacgtgaagagaccgatgaaagatgagacacatttcgaagtcgtggagtctgggcgctatattatactgctgctggggaaggcattgagcgtggtctgggacaggcacctctctatctcggtcgtgcttaaacagacataccaggagaaggtctgcggactctgcggtaacttcgatggaattcaaaataatgatctgacctcaagcaacctgcaggtggaagaggatccagtggactttggaaacagctggaaggtttcttcacagtgcgcagatacacggaaggtccctttggattcaagccctgcaacttgccataacaacatcatgaagcagacaatggtggactccagctgtcgaatcctgacctccgatgtctttcaagactgcaacaaactggtcgatcctgagccctacttagatgtttgcatttacgatacttgtagctgtgaatccatcggggattgtgcttgcttctgcgatacgatcgctgcttacgcacatgtgtgcgctcaacatggtaaagtcgtgacctggaggactgcaacactgtgcccccaatcttgcgaagagcgtaacctgagggagaatggttatgaatgcgaatggagatataactcttgcgcaccagcctgccaggtgacctgtcaacacccagagccattagcctgtcccgtgcaatgcgtggagggatgtcacgctcattgccccccaggaaagatcttggacgagctgctgcagacctgcgtggatcccgaggattgtccggtttgtgaggttgctggcaggcggtttgcaagcggcaagaaagtaaccctcaacccatccgatccggagcactgtcagatttgtcattgcgatgtggtcaacctgacttgcgaggcttgtcaagaacccggcggcttggtagtgcctcctacagacgcaccggtgagtccgaccactctctacgtcgaagacattagcgagcctccactccacgatttctattgtagtcggctgctggacttggtgtttttactcgatggaagcagccgtctatctgaggcagaattcgaggtgctcaaggcctttgtcgtcgacatgatggagcgattgaggatctcgcaaaagtgggtgcgagttgccgtcgtggaataccacgacgggtctcatgcctatatcggcctgaaggacagaaaacgaccatccgagctgcggagaatcgcaagccaagtgaagtacgccggttcccaggtagcctcaaccagtgaagtcctgaagtacacccttttccagatcttctcaaaaattgaccgaccagaggcttccaggattaccctgttgctgatggctagccaagaaccccagagaatgagccgtaattttgttcgttatgtacagggcctgaaaaaaaagaaggtaatcgtgatccctgtcggcatcggaccccatgctaatttgaagcagataagactcatagagaaacaggcaccagagaataaggcctttgttctgtcatcagttgatgaactggaacagcaaagagacgagatcgtgtcatacctttgtgacctggcaccagaggcaccaccacctactctgccaccggacatggctcaagtgaccgtgggtcctggtctcctcggcgtgagcactctcgggccaaagaggaactcaatggtccttgatgtcgcctttgtactggaagggagcgacaagattggagaggccgactttaaccgaagcaaggaattcatggaggaagtgattcagagaatggacgtcggacaggattcaattcatgtgaccgtgcttcagtattcttatatggtaacagttgagtatccattttcagaagcccaatctaagggagacatacttcagagagtgcgcgaaatacgttatcagggagggaatcgcacaaataccggcctggcgttgaggtacctgtcagatcattcttttctggtcagccaaggcgaccgcgagcaagctcctaatctcgtgtacatggtaacaggtaacccagctagtgacgagatcaaaagactgcccggagatattcaggtggtcccaatcggcgttggaccaaatgccaacgtgcaggaactggagcgtatcggctggcctaacgcgccgatattgatccaggacttcgagacactgcctagagaagctccagatctggttttgcaacggtgctgcagtggcgaaggactgcagattcctactctgtcacccgcgcccgactgttcacaaccactggacgtcattctgctgcttgatgggtcatcttcttttcctgcatcttatttcgatgaaatgaagtccttcgccaaagcatttattagtaaagccaatattggtcccagattgactcaggtaagcgtgctgcaatatggaagtattacaacaatcgatgtgccatggaatgtcgttccggaaaaggcccacctgctgagtctggtcgacgtgatgcagcgggaaggcggcccgtcccagattggagacgcattgggttttgctgtccgctaccttaccagtgagatgcatggggcccggccaggagcttcgaaagctgtagtcatcctcgtgactgatgtcagcgtagattccgtcgatgctgctgcagatgcagcaaggtctaacagggtgaccgttttcccaatcggaatcggagatcggtatgacgcagctcaacttaggattctggctggacctgctggcgactctaacgtggtgaagctccagaggattgaggacttaccaactatggtaacgctgggcaacagcttccttcacaaactttgctccggttttgtgcgcatttgtatggacgaggatggcaacgaaaagcggcccggagatgtgtggactttgcccgatcaatgtcatactgtgacttgccagcccgatggtcaaacattgctgaaatcccacagagtgaactgtgataggggcctaaggccctcttgccctaacagccaaagtcccgtcaaagtcgaagagacttgcggatgtagatggacctgtccctgcgtgtgtacaggctctagcacaagacatatcgtgaccttcgacggccagaactttaaacttaccggctcctgctcttacgttctgttccagaacaaagagcaggacctggaggtgattctgcataacggggcatgctcccctggagcaaggcagggttgtatgaaatcaattgaagtgaagcacagcgcactgtctgtggaacttcacagtgatatggaagtcaccgtaaatggcaggctggtctctgtgccatacgtcgggggaaacatggaggttaacgtctatggggccataatgcacgaagtgaggtttaaccatctaggacatatcttcacttttactccacagaataatgagttccagctgcaactgtccccaaagaccttcgcgagcaaaacgtacgggctttgcggcatctgcgatgaaaacggcgccaatgacttcatgttacgggatggaacagtaactactgactggaagacgctagttcaggaatggaccgtccagaggcctggacaaacctgccaaccgatactcgaagaacagtgcctcgtaccagatagcagtcactgccaggtgctccttctgcccctgtttgcagagtgccacaaggtgctcgcgcccgccaccttctacgcaatctgccagcaagattcttgccaccaagaacaggtttgcgaagtcatcgcttcatatgcccacctctgcagaaccaatggcgtgtgcgttgattggcggacccccgacttctgtgccatgagttgcccaccaagcctagtgtataaccattgtgagcatggatgtccaaggcactgcgacggcaacgtttcatcctgtggagatcacccctccgaaggatgtttttgtcctcccgataaagtgatgctggaaggctcctgcgtgcctgaagaggcatgcacccagtgcatcggcgaagacggcgtccagcatcagttcctggaggcttgggtcccagaccaccagccatgccagatctgtacctgcctgtcaggaagaaaggtcaactgcacgactcagccatgccccactgccaaggcccccacctgcggtctctgcgaggtggcaagactgcgccaaaatgcagatcaatgctgccctgaatacgagtgcgtctgcgacccggttagctgcgatcttcctcccgtgccccactgcgagagaggactgcagccaacactaaccaatcctggagaatgccgcccaaatttcacttgcgcctgcagaaaggaagaatgtaaacgcgttagtccacctagttgtcctccgcaccgtctgccaaccctgaggaaaacccagtgttgcgacgagtacgagtgcgcttgcaattgtgtgaacagtacagtgagctgcccgctggggtatcttgcttctacggctactaatgattgcggctgcacaactaccacctgcctcccagataaggtttgtgttcacagatccacaatttaccccgtcggacagttttgggaggagggatgtgatgtctgtacatgtacggacatggaagatgctgtcatgggccttcgcgtggctcaatgctcacagaaaccctgcgaagactcttgcaggagcggatttacttatgtcctgcacgagggcgaatgctgcggcaggtgcctcccaagcgcttgtgaggtggtcaccggaagccccagaggggactcacagtcaagctggaaatcagttggcagtcaatgggcttccccggagaatccgtgtctgatcaacgaatgtgtgcgggtgaaagaggaggtgtttatccagcaacgtaatgtaagttgccctcaactggaagtacccgtgtgccccagcggatttcagctgtcgtgtaagacctcagcatgctgtccttcatgtagatgtgagagaatggaggcttgtatgttaaacggaacagtgataggccctggcaagacagtgatgatcgatgtgtgcacaacttgtagatgcatggtccaagtgggcgttattagcggcttcaagctggagtgtcggaagaccacttgcaatccgtgcccattgggatataaggaggagaataacacaggggagtgttgtgggcgctgcctgccaactgcttgtaccatccaactgaggggagggcaaatcatgactctgaaaagagatgagactttgcaggacgggtgtgacacccacttctgtaaagtcaatgagaggggtgagtacttttgggaaaagagagtgacggggtgcccgccctttgacgaacataagtgccttgcggagggcggcaaaatcatgaaaatcccaggaacatgttgcgacacctgtgaagaaccagagtgcaacgatatcacagcaaggctgcaatacgtcaaagttgggagctgtaagtccgaggtcgaggttgacattcattactgccagggaaagtgtgcttctaaagccatgtattccattgacatcaacgatgtgcaagaccaatgttcctgctgtagccccactcggaccgagcctatgcaagtcgcactgcactgcaccaatggatctgtggtataccacgaggtgcttaatgccatggagtgtaaatgcagcccgaggaagtgctctaag

SEQ ID NO: 12581 - DNA, 8439 bp, Artificial Sequence
  derived and/or modified sequence
atgattcccgcccgtttcgctggtgttctgctggcactggcacttatcctcccaggtaccctctgtgctgagggtactcgtggccgctcaagcaccgctcgctgctctttgtttggctccgactttgtaaacacattcgatggcagcatgtactcgttcgctgggtactgctcttacctcctcgctggcggatgccaaaagcgctccttctcgatcattggtgactttcaaaacggtaagcgtgtctctctttccgtgtacctgggcgagttctttgatatccacttgttcgtgaacggtacggtcactcagggggatcaacgggtctccatgccttatgcctccaagggtctctatctagagacagaggcgggctactataaactgagtggtgaggcctatggcttcgtcgcgagaatcgacggatccggtaacttccaggtgcttctctccgaccgttactttaataaaacgtgtggtctctgtggaaatttcaacatcttcgcagaagatgatttcatgactcaggagggtaccctgaccagcgacccatacgacttcgctaactcttgggccctctcttccggggagcaatggtgtgagcgagcctcgcccccctccagcagctgtaacatttcgagtggagagatgcaaaaaggactctgggagcagtgccagctgctcaagagcacttctgttttcgctcgatgtcatcctctcgtcgacccggagccattcgtcgcgctctgcgagaagaccctctgcgagtgcgcgggcggcttagaatgcgcctgcccagctctgttggaatacgccaggacctgcgcacaggaaggcatggtcctctatggatggaccgaccattcagcctgcagtcccgtctgccccgccgggatggagtaccgtcagtgcgtctcaccttgcgcccgtacctgccagagcctccatataaatgagatgtgtcaagagcgctgtgtggacgggtgttcctgccctgagggtcagctcttggatgagggtttgtgtgtcgagtccactgaatgcccttgtgtccattctggcaagcgttatccccccggcacctccctgtctcgggattgtaacacctgtatctgccgcaattcgcaatggatctgctccaacgaggagtgtcctggtgagtgtctggtaaccggtcagagccacttcaagtctttcgataaccgttacttcaccttcagcgggatctgtcagtacctcctcgccagagactgtcaggaccattccttttcgatcgttattgaaacggttcaatgtgcggacgaccgtgatgccgtgtgcactcgcagcgtcaccgttcgcctgccaggtttgcataacagtttggttaagctgaagcatggcgctggtgttgccatggatggtcaggatgttcagctccccctcttgaagggcgatctacgcatccagcatacggtcaccgctagcgttcgcctttcctacggcgaggaccttcagatggactgggacggtagaggacgactgttggtcaagctttcccccgtgtacgctggaaagacgtgtggcctctgtggtaactacaacggcaaccagggcgacgacttcctcaccccttcgggactggccgaacccagggtcgaggacttcggaaacgcctggaagcttcacggagactgtcaagatctgcagaagcagcactccgatccctgcgctttgaacccacgcatgacacggttctccgaggaagcttgcgccgttctgacctctcccacgttcgaggcctgccaccgcgccgtgtcaccgttaccctacctacgtaactgtaggtacgatgtctgttcgtgctcggatggtcgtgagtgtctgtgcggtgccctcgccagctacgccgccgcttgtgcaggccggggtgttcgagtcgcctggcgcgaacccgggcgttgcgaacttaactgtcccaagggacaggtgtacttgcagtgcggtaccccttgcaaccttacttgccgtagtctctcgtacccagacgaggagtgcaacgaggcgtgcctggaaggctgtttctgtccccccggtttgtacatggatgagcgcggtgactgcgtgcccaaggcccagtgcccgtgctactacgatggtgaaatcttccagcctgaagacatcttcagcgatcaccatacaatgtgttactgtgaggatggattcatgcattgtaccatgtctggagtgcccggcagcctgcttccggacgcggtgctatctagtccgctgtctcataggtccaaacgtagcctctcttgtcggcccccgatggtcaagctcgtttgcccggcagataatctgcgtgcggaaggcctggagtgcaccaagacttgccagaactacgacctcgaatgcatgtcgatggggtgcgtctctggctgcttatgtcctccaggtatggtgcgtcatgaaaaccgttgcgtcgcgctcgagaggtgcccctgtttccaccagggaaaggagtatgcccccggtgagacggtcaagataggttgcaacacgtgcgtgtgccaggaccgcaagtggaactgcacggaccatgtctgcgatgccacgtgcagcacaatcggaatggcacactatcttacgttcgatggtctcaagtatcttttccccggtgagtgccagtacgtcctagttcaggactattgcggctccaacccggggaccttccggatactcgtcgggaacaagggttgttcgcacccctccgtcaagtgcaagaagagagtgaccattcttgtggaggggggtgagatcgagctgttcgatggtgaggtcaacgtcaagagaccaatgaaggacgaaacccactttgaggtcgttgagtccggcaggtacattatccttctgctggggaaggctctgagtgttgtctgggaccgccacctctcgatatctgtggtcctcaagcagacttaccaagagaaagtgtgcggtctctgcggcaactttgacggcatccaaaataatgacctgaccagttctaacctacaagtggaagaggatccggttgatttcggcaatagttggaaggtgagctcccagtgcgctgatacgcgcaaagtgcccctggattcctccccggcgacctgccacaacaatatcatgaagcaaaccatggttgacagctcctgccgaatcctgacttccgatgtgttccaggattgcaacaaattggttgatccggagccctatctggacgtctgcatctatgacacctgttcgtgtgaatcgattggcgactgcgcatgcttctgtgacaccatagctgcctacgcacacgtctgtgcgcagcacggcaaagttgtgacctggaggaccgcaactctgtgcccgcagtcgtgcgaggagcgaaacttgcgtgagaacgggtacgagtgcgagtggcgctacaattcatgcgcccctgcttgccaggttacctgccaacacccggagcctcttgcctgtccggtccagtgcgtcgagggctgccacgctcactgccctccaggaaagatcctcgacgagctgctgcagacctgcgtcgaccccgaggactgtcccgtctgcgaggtcgcaggccgtcgtttcgcgtctgggaaaaaggtgactctcaatccatctgatcccgagcactgccagatttgccactgcgatgtcgtgaacctaacctgtgaggcgtgccaggagcccggtggactagtggtcccccccaccgacgctcccgtctcgcccactacgctctacgtcgaagacatatcagagcccccccttcacgacttctactgcagtcgtctgcttgatctggtcttcctgcttgatggctcgagccgtctgtcggaggctgagttcgaggtcctcaaggccttcgtcgtcgacatgatggagcgccttcgcatatcgcaaaaatgggtccgcgtggctgtggtcgagtaccacgatggctcgcatgcctacattggcctgaaggaccgcaagagaccgtcggagctacggcgtattgcttcgcaagttaaatatgccgggtcgcaagtcgcctcgacctccgaggtccttaagtacacgctgttccagatcttctccaagatcgaccgacccgaggcctcccgcatcacgctgctgctgatggcctcgcaggagccccagcgcatgtcaaggaacttcgtccggtacgtccagggattgaagaagaaaaaggtgatcgtcatccccgttggaatcggcccacacgcaaacctcaaacagattagactgattgagaaacaagcgccggagaacaaagccttcgttttgtcctccgtggacgagcttgaacaacagcgcgacgagatcgtgagttacctgtgcgacctcgcccctgaggcgccgcccccaacgttgccacccgatatggcccaagtcacggttggtcccggtttactcggcgtttctaccctcggacctaaacggaactccatggtcctcgatgtcgcgttcgttctggagggatctgataaaatcggtgaggcggatttcaatcgctccaaggagttcatggaggaagtcatccagcgtatggatgtcggccaggatagcatccacgtcaccgtcctccaatattcctacatggttaccgtcgagtaccctttctccgaggcccagtccaagggtgatatcttgcagcgggtccgcgaaatccgatatcagggagggaatcgaactaacacgggtctggctctccggtatctgtcggaccactctttcctcgtctctcagggggatcgtgaacaggctcctaacttggtgtatatggtcaccggcaaccccgcctccgacgaaatcaagagactccccggtgacatccaggtcgtgcccatcggcgttggcccaaacgccaacgtgcaggagctcgaacgtattggttggcccaacgccccgatcctcatccaggatttcgagactctgcctagagaggcccccgatctggtcttgcagaggtgctgctccggagagggcctccaaatcccgacgctgagtcctgccccagactgctcacaacctcttgacgtgatccttctcttggatggttccagctcgttccccgcgtcgtatttcgacgagatgaagtcattcgcaaaggccttcatctctaaggcaaatatcggcccccgcctgacacaagtgtcagttctgcaatacggcagcatcaccactattgacgtgccgtggaatgtcgtccccgagaaggcccacctgctttcgctggtggatgtcatgcagcgtgaaggaggaccaagccagataggtgacgctctgggcttcgctgtgcgctacctgacctccgaaatgcatggcgccagaccgggcgcgtcgaaggcggtggtaatccttgtcaccgatgtctcggtcgacagcgtcgacgcggccgccgacgcggctcggtccaatagagtgaccgtcttccccatcggaattggtgaccgttatgacgccgcgcagcttcgaatactagcggggcccgctggtgacagtaacgtcgtcaaactacagcgtatcgaggatctgcccaccatggtcacgttgggtaactcgttccttcacaagctttgcagtggcttcgtgcgcatttgtatggatgaggatggaaacgagaagcggcctggagatgtctggacgcttcctgaccagtgtcataccgtcacttgccaaccggacggacagaccctcctgaagtcgcatcgcgttaattgtgaccgtggcttgcggccttcttgcccaaactcccagtctcccgtgaaggttgaggagacctgcggttgtcgctggacttgcccctgcgtgtgtacgggctcttcgacccgccacattgtaaccttcgatggtcagaacttcaagctcacaggttcttgcagctacgtcctgtttcagaacaaggagcaggaccttgaagtcatccttcacaacggcgcctgctcacccggtgcgcgccagggctgtatgaagtctattgaggttaagcacagtgccttgtcggttgagctgcactccgatatggaggttacggtcaacggtagacttgtctccgtcccgtacgtaggaggtaacatggaggtaaacgtatacggtgcgataatgcatgaggttcgcttcaaccacctgggccatattttcaccttcacaccccagaacaacgagtttcagctgcaactcagccccaagaccttcgcttccaaaacgtacggtttgtgcggcatctgtgacgaaaatggagctaacgatttcatgctccgtgatggcacagtgaccacagactggaagaccctggtccaggagtggactgtccaacgccccgggcagacctgtcagccaattcttgaggagcaatgccttgtgcccgactcgtcccactgccaggtgctcctgctgccccttttcgccgagtgccataaggtcctggcgcctgcaacgttctacgctatttgccagcaggactcttgtcatcaggaacaagtttgtgaggttatcgcatcctacgcccatctgtgccggacgaatggcgtctgtgttgattggcgcacccccgacttctgcgctatgtcctgtcccccatccttggtttataaccactgtgagcacggatgccctcgccactgtgatggcaacgtttcgtcctgtggagatcatcccagcgaagggtgcttctgccctccggataaggtcatgctcgagggttcttgcgtccctgaagaggcctgcacccagtgtatcggtgaggacggcgtccaacaccagttcctggaggcctgggtccccgaccaccagccatgccaaatttgcacctgtcttagcgggcggaaggtgaattgcaccacgcagccttgtccgacggctaaggccccgacctgcgggctctgtgaggtcgccagactcaggcagaacgccgatcagtgttgccccgagtatgagtgtgtttgcgacccggtgtcgtgcgacttgccccccgtcccgcattgcgagcggggcctgcagccgaccctgaccaatcccggggagtgcagaccgaacttcacttgtgcctgtcgtaaggaagaatgcaagcgcgtatcgcctcctagctgtcccccgcacaggctccccaccttgaggaagacccagtgctgcgatgaatacgaatgtgcatgcaactgcgtcaactcgaccgtctcttgcccactcggttacctcgcatccaccgccacgaacgattgtggatgcacgactaccacctgcctgcccgataaggtttgcgtccatcgctcaacgatctacccagtcggtcaattctgggaagaaggctgcgatgtctgtacctgcacagacatggaggacgcggtcatgggtctacgcgtcgcgcaatgtagccaaaagccttgcgaggatagctgccggtccggatttacctacgtgctccacgagggcgagtgctgcggccggtgcttaccttctgcctgcgaggtcgtgaccgggtcgccgcgcggtgattcgcagtcctcgtggaagtctgttggttcccagtgggccagtcccgagaacccttgcttgatcaacgagtgtgttcgtgtgaaggaggaagtctttatccagcagcgcaatgtgtcttgccctcaactcgaggtgcccgtgtgccctagcggcttccagctgtcctgtaagacgagtgcctgttgtccttcctgccgttgcgagcgtatggaggcttgtatgctgaacggtaccgttatcggtccaggtaagacagtcatgattgatgtttgcaccacctgtcgttgcatggttcaagtgggcgttatctccggattcaagcttgagtgtcgcaaaactacctgcaatccgtgccccttgggttataaggaggagaataacaccggagaatgctgcggacgttgtctgccaacggcctgtacgattcagttgcgcggtggtcaaattatgacattgaagcgggacgagactctgcaggatggttgtgacacccacttctgcaaggtcaacgagagaggagagtatttttgggagaagcgcgttaccggttgtcctccattcgatgagcacaagtgcctcgcggaaggcggcaagattatgaagatccctggcacctgttgtgacacctgtgaagagcccgagtgtaacgatatcaccgcccggttgcagtacgttaaagtcggcagctgcaaatctgaggtcgaagtcgacatccactactgtcagggaaagtgcgcttccaaggcgatgtacagcatcgatatcaatgatgttcaggatcaatgttcgtgttgcagccctacccggacggagcccatgcaggttgctctccactgcacgaacggaagcgtagtctaccatgaggttctcaacgctatggagtgcaagtgcagcccgcgcaagtgcagcaag

SEQ ID NO: 12582 - DNA, 8442 bp, Artificial Sequence
  derived and/or modified sequence
atgatccccgccagattcgccggcgtgctgctggccctggccctgatcctgcccggcaccctgtgcgccgagggcaccagaggcagaagcagcaccgccagatgcagcctgttcggcagcgacttcgtgaacaccttcgacggcagcatgtacagcttcgccggctactgcagctacctgctggccggcggctgccagaagagaagcttcagcatcatcggcgacttccagaacggcaagagagtgagcctgagcgtgtacctgggcgagttcttcgacatccacctgttcgtgaacggcaccgtgacccagggcgaccagagagtgagcatgccctacgccagcaagggcctgtacctggagaccgaggccggctactacaagctgagcggcgaggcctacggcttcgtggccagaatcgacggcagcggcaacttccaggtgctgctgagcgacagatacttcaacaagacctgcggcctgtgcggcaacttcaacatcttcgccgaggacgacttcatgacccaggagggcaccctgaccagcgacccctacgacttcgccaacagctgggccctgagcagcggcgagcagtggtgcgagagagccagcccccccagcagcagctgcaacatcagcagcggcgagatgcagaagggcctgtgggagcagtgccagctgctgaagagcaccagcgtgttcgccagatgccaccccctggtggaccccgagcccttcgtggccctgtgcgagaagaccctgtgcgagtgcgccggcggcctggagtgcgcctgccccgccctgctggagtacgccagaacctgcgcccaggagggcatggtgctgtacggctggaccgaccacagcgcctgcagccccgtgtgccccgccggcatggagtacagacagtgcgtgagcccctgcgccagaacctgccagagcctgcacatcaacgagatgtgccaggagagatgcgtggacggctgcagctgccccgagggccagctgctggacgagggcctgtgcgtggagagcaccgagtgcccctgcgtgcacagcggcaagagatacccccccggcaccagcctgagcagagactgcaacacctgcatctgcagaaacagccagtggatctgcagcaacgaggagtgccccggcgagtgcctggtgaccggccagagccacttcaagagcttcgacaacagatacttcaccttcagcggcatctgccagtacctgctggccagagactgccaggaccacagcttcagcatcgtgatcgagaccgtgcagtgcgccgacgacagagacgccgtgtgcaccagaagcgtgaccgtgagactgcccggcctgcacaacagcctggtgaagctgaagcacggcgccggcgtggccatggacggccaggacgtgcagctgcccctgctgaagggcgacctgagaatccagcacaccgtgaccgccagcgtgagactgagctacggcgaggacctgcagatggactgggacggcagaggcagactgctggtgaagctgagccccgtgtacgccggcaagacctgcggcctgtgcggcaactacaacggcaaccagggcgacgacttcctgacccccagcggcctggccgagcccagagtggaggacttcggcaacgcctggaagctgcacggcgactgccaggacctgcagaagcagcacagcgacccctgcgccctgaaccccagaatgaccagattcagcgaggaggcctgcgccgtgctgaccagccccaccttcgaggcctgccacagagccgtgagccccctgccctacctgagaaactgcagatacgacgtgtgcagctgcagcgacggcagagagtgcctgtgcggcgccctggccagctacgccgccgcctgcgccggcagaggcgtgagagtggcctggagagagcccggcagatgcgagctgaactgccccaagggccaggtgtacctgcagtgcggcaccccctgcaacctgacctgcagaagcctgagctaccccgacgaggagtgcaacgaggcctgcctggagggctgcttctgcccccccggcctgtacatggacgagagaggcgactgcgtgcccaaggcccagtgcccctgctactacgacggcgagatcttccagcccgaggacatcttcagcgaccaccacaccatgtgctactgcgaggacggcttcatgcactgcaccatgagcggcgtgcccggcagcctgctgcccgacgccgtgctgagcagccccctgagccacagaagcaagagaagcctgagctgcagaccccccatggtgaagctggtgtgccccgccgacaacctgagagccgagggcctggagtgcaccaagacctgccagaactacgacctggagtgcatgagcatgggctgcgtgagcggctgcctgtgcccccccggcatggtgagacacgagaacagatgcgtggccctggagagatgcccctgcttccaccagggcaaggagtacgcccccggcgagaccgtgaagatcggctgcaacacctgcgtgtgccaggacagaaagtggaactgcaccgaccacgtgtgcgacgccacctgcagcaccatcggcatggcccactacctgaccttcgacggcctgaagtacctgttccccggcgagtgccagtacgtgctggtgcaggactactgcggcagcaaccccggcaccttcagaatcctggtgggcaacaagggctgcagccaccccagcgtgaagtgcaagaagagagtgaccatcctggtggagggcggcgagatcgagctgttcgacggcgaggtgaacgtgaagagacccatgaaggacgagacccacttcgaggtggtggagagcggcagatacatcatcctgctgctgggcaaggccctgagcgtggtgtgggacagacacctgagcatcagcgtggtgctgaagcagacctaccaggagaaggtgtgcggcctgtgcggcaacttcgacggcatccagaacaacgacctgaccagcagcaacctgcaggtggaggaggaccccgtggacttcggcaacagctggaaggtgagcagccagtgcgccgacaccagaaaggtgcccctggacagcagccccgccacctgccacaacaacatcatgaagcagaccatggtggacagcagctgcagaatcctgaccagcgacgtgttccaggactgcaacaagctggtggaccccgagccctacctggacgtgtgcatctacgacacctgcagctgcgagagcatcggcgactgcgcctgcttctgcgacaccatcgccgcctacgcccacgtgtgcgcccagcacggcaaggtggtgacctggagaaccgccaccctgtgcccccagagctgcgaggagagaaacctgagagagaacggctacgagtgcgagtggagatacaacagctgcgcccccgcctgccaggtgacctgccagcaccccgagcccctggcctgccccgtgcagtgcgtggagggctgccacgcccactgcccccccggcaagatcctggacgagctgctgcagacctgcgtggaccccgaggactgccccgtgtgcgaggtggccggcagaagattcgccagcggcaagaaggtgaccctgaaccccagcgaccccgagcactgccagatctgccactgcgacgtggtgaacctgacctgcgaggcctgccaggagcccggcggcctggtggtgccccccaccgacgcccccgtgagccccaccaccctgtacgtggaggacatcagcgagccccccctgcacgacttctactgcagcagactgctggacctggtgttcctgctggacggcagcagcagactgagcgaggccgagttcgaggtgctgaaggccttcgtggtggacatgatggagagactgagaatcagccagaagtgggtgagagtggccgtggtggagtaccacgacggcagccacgcctacatcggcctgaaggacagaaagagacccagcgagctgagaagaatcgccagccaggtgaagtacgccggcagccaggtggccagcaccagcgaggtgctgaagtacaccctgttccagatcttcagcaagatcgacagacccgaggccagcagaatcaccctgctgctgatggccagccaggagccccagagaatgagcagaaacttcgtgagatacgtgcagggcctgaagaagaagaaggtgatcgtgatccccgtgggcatcggcccccacgccaacctgaagcagatcagactgatcgagaagcaggcccccgagaacaaggccttcgtgctgagcagcgtggacgagctggagcagcagagagacgagatcgtgagctacctgtgcgacctggcccccgaggcccccccccccaccctgccccccgacatggcccaggtgaccgtgggccccggcctgctgggcgtgagcaccctgggccccaagagaaacagcatggtgctggacgtggccttcgtgctggagggcagcgacaagatcggcgaggccgacttcaacagaagcaaggagttcatggaggaggtgatccagagaatggacgtgggccaggacagcatccacgtgaccgtgctgcagtacagctacatggtgaccgtggagtaccccttcagcgaggcccagagcaagggcgacatcctgcagagagtgagagagatcagataccagggcggcaacagaaccaacaccggcctggccctgagatacctgagcgaccacagcttcctggtgagccagggcgacagagagcaggcccccaacctggtgtacatggtgaccggcaaccccgccagcgacgagatcaagagactgcccggcgacatccaggtggtgcccatcggcgtgggccccaacgccaacgtgcaggagctggagagaatcggctggcccaacgcccccatcctgatccaggacttcgagaccctgcccagagaggcccccgacctggtgctgcagagatgctgcagcggcgagggcctgcagatccccaccctgagccccgcccccgactgcagccagcccctggacgtgatcctgctgctggacggcagcagcagcttccccgccagctacttcgacgagatgaagagcttcgccaaggccttcatcagcaaggccaacatcggccccagactgacccaggtgagcgtgctgcagtacggcagcatcaccaccatcgacgtgccctggaacgtggtgcccgagaaggcccacctgctgagcctggtggacgtgatgcagagagagggcggccccagccagatcggcgacgccctgggcttcgccgtgagatacctgaccagcgagatgcacggcgccagacccggcgccagcaaggccgtggtgatcctggtgaccgacgtgagcgtggacagcgtggacgccgccgccgacgccgccagaagcaacagagtgaccgtgttccccatcggcatcggcgacagatacgacgccgcccagctgagaatcctggccggccccgccggcgacagcaacgtggtgaagctgcagagaatcgaggacctgcccaccatggtgaccctgggcaacagcttcctgcacaagctgtgcagcggcttcgtgagaatctgcatggacgaggacggcaacgagaagagacccggcgacgtgtggaccctgcccgaccagtgccacaccgtgacctgccagcccgacggccagaccctgctgaagagccacagagtgaactgcgacagaggcctgagacccagctgccccaacagccagagccccgtgaaggtggaggagacctgcggctgcagatggacctgcccctgcgtgtgcaccggcagcagcaccagacacatcgtgaccttcgacggccagaacttcaagctgaccggcagctgcagctacgtgctgttccagaacaaggagcaggacctggaggtgatcctgcacaacggcgcctgcagccccggcgccagacagggctgcatgaagagcatcgaggtgaagcacagcgccctgagcgtggagctgcacagcgacatggaggtgaccgtgaacggcagactggtgagcgtgccctacgtgggcggcaacatggaggtgaacgtgtacggcgccatcatgcacgaggtgagattcaaccacctgggccacatcttcaccttcaccccccagaacaacgagttccagctgcagctgagccccaagaccttcgccagcaagacctacggcctgtgcggcatctgcgacgagaacggcgccaacgacttcatgctgagagacggcaccgtgaccaccgactggaagaccctggtgcaggagtggaccgtgcagagacccggccagacctgccagcccatcctggaggagcagtgcctggtgcccgacagcagccactgccaggtgctgctgctgcccctgttcgccgagtgccacaaggtgctggcccccgccaccttctacgccatctgccagcaggacagctgccaccaggagcaggtgtgcgaggtgatcgccagctacgcccacctgtgcagaaccaacggcgtgtgcgtggactggagaacccccgacttctgcgccatgagctgcccccccagcctggtgtacaaccactgcgagcacggctgccccagacactgcgacggcaacgtgagcagctgcggcgaccaccccagcgagggctgcttctgcccccccgacaaggtgatgctggagggcagctgcgtgcccgaggaggcctgcacccagtgcatcggcgaggacggcgtgcagcaccagttcctggaggcctgggtgcccgaccaccagccctgccagatctgcacctgcctgagcggcagaaaggtgaactgcaccacccagccctgccccaccgccaaggcccccacctgcggcctgtgcgaggtggccagactgagacagaacgccgaccagtgctgccccgagtacgagtgcgtgtgcgaccccgtgagctgcgacctgccccccgtgccccactgcgagagaggcctgcagcccaccctgaccaaccccggcgagtgcagacccaacttcacctgcgcctgcagaaaggaggagtgcaagagagtgagcccccccagctgccccccccacagactgcccaccctgagaaagacccagtgctgcgacgagtacgagtgcgcctgcaactgcgtgaacagcaccgtgagctgccccctgggctacctggccagcaccgccaccaacgactgcggctgcaccaccaccacctgcctgcccgacaaggtgtgcgtgcacagaagcaccatctaccccgtgggccagttctgggaggagggctgcgacgtgtgcacctgcaccgacatggaggacgccgtgatgggcctgagagtggcccagtgcagccagaagccctgcgaggacagctgcagaagcggcttcacctacgtgctgcacgagggcgagtgctgcggcagatgcctgcccagcgcctgcgaggtggtgaccggcagccccagaggcgacagccagagcagctggaagagcgtgggcagccagtgggccagccccgagaacccctgcctgatcaacgagtgcgtgagagtgaaggaggaggtgttcatccagcagagaaacgtgagctgcccccagctggaggtgcccgtgtgccccagcggcttccagctgagctgcaagaccagcgcctgctgccccagctgcagatgcgagagaatggaggcctgcatgctgaacggcaccgtgatcggccccggcaagaccgtgatgatcgacgtgtgcaccacctgcagatgcatggtgcaggtgggcgtgatcagcggcttcaagctggagtgcagaaagaccacctgcaacccctgccccctgggctacaaggaggagaacaacaccggcgagtgctgcggcagatgcctgcccaccgcctgcaccatccagctgagaggcggccagatcatgaccctgaagagagacgagaccctgcaggacggctgcgacacccacttctgcaaggtgaacgagagaggcgagtacttctgggagaagagagtgaccggctgcccccccttcgacgagcacaagtgcctggccgagggcggcaagatcatgaagatccccggcacctgctgcgacacctgcgaggagcccgagtgcaacgacatcaccgccagactgcagtacgtgaaggtgggcagctgcaagagcgaggtggaggtggacatccactactgccagggcaagtgcgccagcaaggccatgtacagcatcgacatcaacgacgtgcaggaccagtgcagctgctgcagccccaccagaaccgagcccatgcaggtggccctgcactgcaccaacggcagcgtggtgtaccacgaggtgctgaacgccatggagtgcaagtgcagccccagaaagtgcagcaagtag

SEQ ID NO: 12583 - DNA, 8442 bp, Artificial Sequence
  derived and/or modified sequence
atgatcccagcacggtttgccggcgtgcttctggcattagctctgatcctgcctggcaccctttgtgctgagggcactagaggccgctcaagcaccgctagatgttctcttttcggatccgattttgtcaataccttcgacggtagcatgtattctttcgctggatattgctcatacctgctcgctggaggctgccagaagaggtcattctctataattggcgatttccaaaacggaaaacgggtgagtctttcagtgtacttgggcgaatttttcgacatccatctgtttgtaaacgggaccgtcacacagggggaccagagagtcagtatgccctatgcttcgaaagggctgtacctggagacagaggcaggctattacaaattaagcggcgaggcatacgggttcgtagccagaatcgatgggagcgggaactttcaggttttactgtcagatcgctattttaacaaaacttgcggtctgtgcggtaactttaacatattcgcagaggacgactttatgactcaggagggaaccttaacctctgatccttatgacttcgctaattcatgggcactcagcagcggtgagcaatggtgcgaacgggcgagcccgcccagctctagctgcaacatatccagcggtgagatgcagaaagggttgtgggagcagtgtcagctccttaaatccacgagcgtttttgcccggtgccatcctctggtggaccctgaacccttcgtggccctgtgtgaaaaaacactgtgcgagtgcgcaggcggccttgaatgcgcctgtcctgccctactggaatacgccaggacttgtgctcaggaagggatggtgctgtacggctggaccgaccacagcgcctgtagccccgtgtgccccgccggtatggagtaccgtcagtgcgtgtctccttgcgcaagaacttgtcaatctttacacattaacgagatgtgccaggagcggtgtgtcgacgggtgtagttgcccagaaggccaactgctggatgaaggactgtgcgttgagagcactgaatgtccatgcgtccattccggtaagagatatccccccgggacatccctgtccagagattgcaacacttgcatctgcaggaattcccagtggatttgcagtaatgaggaatgccccggcgaatgtctggtgacaggacagtcacattttaagagttttgacaatagatactttacattctcaggcatatgtcagtatctcttagccagagattgccaggatcattccttttccatcgtcatcgaaaccgtccagtgcgccgatgacagggacgcagtctgcaccaggtcagtgactgtacgcctgcccggtctgcacaacagccttgtgaaactaaaacacggagccggagtggctatggacggtcaagacgtgcagctccccctgctaaaaggcgacttacgcatccaacacaccgtcacagcaagcgtgagactgtcttatggtgaggatctccagatggactgggacggccggggcaggcttctcgtgaagctgtcccctgtgtacgccggaaagacctgtgggctctgcggcaattacaatggtaaccagggagatgacttcctcacccctagcggtctggcagaaccgagggtggaggactttgggaacgcatggaaactccacggagactgtcaagacctccagaaacagcactccgacccctgtgccctgaacccgaggatgacacgcttttccgaggaagcctgtgctgtgctgactagcccgacattcgaggcctgccacagggccgtgtcccctctgccatacctgagaaattgccgttacgatgtgtgttcgtgctccgacggccgggagtgcctgtgtggagctctggcttcatacgcggccgcgtgtgccggtcgcggcgtccgtgtggcttggcgcgagcccgggagatgtgagttgaactgccccaaagggcaggtatacttgcaatgcggcacgccatgtaatttgacctgcagatctctcagctacccagatgaagagtgcaatgaggcatgcttagaggggtgtttttgcccccccggcctctatatggatgaaagaggagattgtgttccgaaggcgcagtgcccctgttactacgacggggaaatcttccagcccgaagacatcttctcagaccatcacacaatgtgctattgcgaggatggattcatgcattgtacaatgtccggcgtacctgggagtctgctgcctgatgccgtcctgtcgtccccactgtcacacagatctaagcggtctcttagctgcagacccccaatggtcaagcttgtatgtcccgccgataacctgagagctgaaggactggaatgtactaagacgtgtcagaactacgacctggagtgcatgagcatgggctgtgtgtccgggtgcttatgccctcctgggatggtcagacacgagaatcggtgcgttgccttggaacggtgtccctgctttcaccagggtaaggagtatgcgcctggggagactgtgaaaataggatgtaatacatgtgtctgtcaagatcggaaatggaattgcacggaccacgtgtgcgacgccacttgcagtaccattggtatggctcattatctgacgttcgacggtctaaaatacttgttccccggtgagtgtcagtacgtgctcgtccaagattattgcggctcgaaccctggtaccttcagaattctggtcggaaataaagggtgttcccatccaagcgtgaagtgcaagaaacgcgtgaccatcctcgtggagggaggtgaaattgagctcttcgatggagaggttaatgtgaaaaggccaatgaaggacgaaacccacttcgaggtggttgaatccgggcgatacattatcctcctgctgggtaaagcactctcagtggtttgggaccgacatctcagtatcagtgtcgtgctcaagcaaacataccaagagaaggtgtgcgggctctgcggcaattttgacgggattcaaaataacgacctgacaagtagtaatctccaggtggaggaagatcctgtggatttcggaaactcatggaaggtgtcttcccagtgtgccgacactagaaaagtgcccctcgactcttcccctgctacctgtcacaataacattatgaagcagactatggttgattcaagctgtaggatactgacatccgacgtgtttcaggactgtaataaactggtggacccagagccgtacttggacgtctgcatctacgacacctgttcttgcgagtcgatcggtgattgtgcgtgtttttgtgatactatcgcagcttacgcgcatgtgtgtgctcagcatgggaaagtggtcacctggcgaaccgccacactgtgcccacagtcatgcgaggaacgcaatctgagggaaaatggatatgaatgcgagtggaggtacaatagctgcgccccagcctgccaggtcacttgtcagcaccctgaaccgctggcctgcccggtgcagtgcgtggaaggctgccacgcccactgcccgcctggcaaaatccttgacgaactactccagacttgtgtggaccccgaagattgccctgtttgtgaagtggccggccgaaggtttgcaagcggtaaaaaggtgactctcaacccatcagatcctgagcattgtcagatctgccattgcgacgtcgttaacttgacatgcgaggcttgccaggaacctggcgggctcgtagtcccgcctaccgacgctccagtctctcccactaccctatacgtcgaggacataagcgaacctcctctgcatgatttctactgctcacggctgctggatctggtttttttgttggacggctcctcccgtctgagtgaggcagagtttgaggttttaaaagcttttgtcgttgacatgatggagagattacgtatatcccagaaatgggtcagggttgctgtggtggagtatcatgacggtagtcatgcgtacattggcctgaaagatcgtaaacggccgtcggaattaaggcgaatagcaagtcaggtgaagtatgctggctcccaggtcgcgtccaccagcgaggtcttgaagtacaccctgttccagatctttagcaaaatcgatagacccgaagcgagccgcatcaccctgctcttaatggcctcacaggaaccccagcgaatgtctcggaacttcgtacggtatgtccaggggctcaagaaaaagaaagtgatcgtcatacccgtgggcataggacctcatgctaaccttaagcagatccgcttaatcgaaaagcaggccccggagaataaggcgtttgtcttaagtagtgttgatgagttagagcagcagagggacgagattgtgtcctatctttgcgacctcgcgcccgaggctccacctcctacacttcctccagacatggcccaggtgacggtcggtcccggactgctgggcgtgagtaccctgggacctaaacgcaacagcatggtccttgacgtcgcctttgtgctggaaggctctgacaaaataggcgaggctgacttcaatcggtctaaggaatttatggaagaagtgattcagcgaatggacgtgggccaggattccattcacgttacagttttacagtacagttacatggttaccgtggagtaccccttcagtgaagcacaaagcaagggcgatatcctgcagcgtgtgagagaaatccgttatcagggagggaatagaactaacaccggcctggcactccggtatctatccgaccatagtttcctagtgtcccaaggcgaccgggagcaagcaccaaacctcgtgtacatggtcaccggaaacccagccagcgacgaaatcaaaaggctcccgggggacatccaggtagtcccaatcggcgttggacccaacgccaatgttcaagagctggagaggatcggatggcccaatgcccccatactgatacaggacttcgaaactctgcccagagaggctccagatctggttcttcagagatgctgctccggcgagggcctgcagattcctaccctgtcccccgcccccgactgtagccagcctctggacgtaattctgctcctggacgggtcgtccagctttcccgcgtcctacttcgatgaaatgaaatcgttcgcaaaagcattcatcagcaaggctaatataggcccgcgtctgacacaagtcagtgtgcttcagtatggctcaattactaccattgatgtcccctggaatgtggttcccgaaaaagcccatctgctctcattggtggatgtcatgcagcgggaggggggtccttcccaaataggcgatgctctgggattcgccgtccgatatctgacaagcgagatgcatggggcacgccctggagcttccaaggccgttgtgattctagtaaccgacgtgtcagtggacagcgtcgatgcagctgctgatgccgcccggtctaacagagtgaccgtgttccctattggcattggggaccggtatgacgcggctcagcttcgcattcttgccggtccagcaggcgattccaatgtcgtgaaactgcaaagaatcgaagacctgccaacaatggtgaccctcggaaattcattcctgcacaaactgtgttcagggttcgtacgaatctgcatggacgaagatggtaacgagaagagacctggtgatgtgtggactctgcccgatcagtgtcacaccgtgacttgtcagcccgatggtcagaccttgttaaaaagtcatcgggtgaattgcgatcgtggcctgcggccatcatgcccgaactcccagtcaccggtgaaagttgaggaaacttgcggctgcagatggacatgcccatgtgtctgcacaggctctagcactcggcatatcgtgacatttgacggccagaacttcaagctgacaggtagttgctcctatgtcctgtttcagaataaggaacaagatctcgaagtgatcctgcacaatggcgcctgctctccaggtgcccggcagggctgcatgaagtcaatcgaagtgaagcattcggcccttagtgttgagctccacagcgacatggaagtgacagtcaatggcagattggtctccgtcccttacgtgggaggaaatatggaggttaacgtgtacggggcgatcatgcatgaggttcggtttaatcacttgggtcatatcttcacttttacccctcagaacaacgaattccagctccaactcagtccgaagaccttcgcctccaaaacatacggtctgtgcggaatatgcgacgagaacggagcaaacgactttatgctgagagatggaaccgtcacaaccgactggaagacgctggtacaggaatggaccgttcaaagacctggccagacctgtcaaccgatcttggaggagcagtgcctagtgcctgacagcagccattgccaggtcttgctgctgcctttgttcgctgaatgccacaaggttctagcaccagcaactttctacgctatttgtcaacaagatagttgccaccaggaacaggtctgtgaggttatcgcatcttatgcgcatttgtgtcgaacgaacggagtatgcgtggattggcgcacacccgacttctgcgcaatgagctgcccaccttctcttgtctataaccactgtgagcacggctgtcctcggcactgtgacgggaacgtcagcagttgcggcgatcatccgtccgagggctgtttctgcccacccgacaaggtgatgttggaaggttcatgcgttcctgaagaggcatgcacacagtgcattggcgaggatggcgtgcagcatcaattcctagaggcttgggtgccagatcatcagccatgccagatatgtacctgcttgagtggccgaaaggtcaactgcacaactcagccatgcccgaccgcgaaggccccgacatgcggtctgtgcgaggttgccaggttgagacagaatgccgaccaatgttgccccgagtatgagtgcgtctgcgacccagtgtcttgtgatctccccccggtcccccactgcgaaaggggactgcaacccaccttgacgaacccaggcgagtgcaggcccaacttcacctgtgcatgtcgcaaggaggagtgtaaacgagtgtcccctcccagctgccctccacaccggcttccgactcttcgtaagactcaatgctgtgatgaatacgagtgcgcctgcaactgtgttaactccacggtgtcatgtccactggggtatctggcctccactgcaacaaatgactgtggctgtacgactactacgtgcctgcctgacaaggtttgcgttcacagaagcaccatttaccccgtgggacagttttgggaagagggttgtgacgtgtgtacatgtaccgacatggaagatgcagtgatggggttacgcgtggcccagtgtagtcagaaaccatgtgaggatagctgtcgctcgggcttcacgtatgttctccacgaaggggaatgttgtgggagatgtctcccaagtgcatgtgaagtcgtgacggggtccccgcgcggagacagccagagctcatggaaatcggttggcagtcaatgggcaagccctgagaatccctgcttaatcaacgagtgtgtgcgcgtgaaggaggaagtgttcatccagcaacggaatgtgtcttgtccccagctggaggtgcccgtttgcccctctggtttccaactctcctgtaaaaccagcgcttgttgtccctcctgtcgctgtgagcggatggaggcatgcatgctcaatggcactgtaatcggacctgggaagaccgtgatgattgacgtttgcaccacatgccgctgcatggtgcaggtcggggttattagcgggttcaagctcgagtgtcgaaaaactacctgcaatccgtgcccccttggatacaaggaggagaacaacacgggtgagtgctgtggacggtgtctgcccaccgcctgcactattcagctgagaggtggccagatcatgaccttgaagcgggacgagactctgcaggatggctgcgatacacatttctgtaaggttaacgaacggggagagtatttttgggagaagagagtgaccgggtgtccacccttcgatgagcacaagtgtctggccgaagggggaaaaattatgaagatccctggtacttgttgtgatacctgcgaggaacctgaatgcaacgacattacggctcggctgcagtatgtgaaggtcggaagttgtaagagtgaggtggaagtggacatccattattgtcaaggaaagtgcgccagcaaggccatgtactcaattgacataaacgacgtacaagatcaatgcagctgctgcagccctactagaaccgagccaatgcaggtggctctgcattgtactaatggatctgtggtgtatcatgaagtcctgaacgccatggagtgtaagtgtagcccaagaaagtgcagcaaatag

SEQ ID NO: 12584 - DNA, 8442 bp, Artificial Sequence
  derived and/or modified sequence
atgatcccagccaggtttgctggggtgctgctggccctggccctgatcctgcccggcaccctgtgtgccgagggcacccggggccgcagcagcacagcccgctgcagcctgtttggaagtgactttgtgaacacctttgatggctccatgtacagctttgctggctactgcagctacctgctggccggcggctgccagaagaggagcttcagcatcattggagacttccagaatggcaagagggtgtccctgtctgtgtacctgggggagttctttgacatccacctgtttgtgaatggaacagtgacccagggcgaccagagggtgtccatgccctatgccagcaagggcctgtacctggagacagaggccggctactacaagctgagcggggaggcctacggctttgtggccagaattgatggcagcggcaacttccaggtgctgctgagtgaccgctacttcaacaagacctgtggcctgtgtggcaacttcaacatctttgctgaagatgacttcatgacccaggagggcaccctgaccagtgacccctatgactttgccaacagctgggccctgagcagtggagagcagtggtgtgagcgggccagcccccccagcagcagctgcaacatcagcagcggggagatgcagaagggcctgtgggagcagtgccagctgctgaagagcacctctgtgtttgcccgctgccaccccctggtggaccctgagccctttgtggccctgtgtgagaagaccctgtgtgaatgtgccggcggcctggagtgtgcctgcccagccctgctggagtatgcccggacctgtgcccaggagggcatggtgctgtatggctggacagaccacagcgcctgcagccctgtgtgcccagctggcatggagtaccggcagtgtgtgagcccctgtgcccggacctgccagagcctgcacatcaatgagatgtgccaggagcgctgtgtggatggctgcagctgcccagagggccagctgctggatgagggcctgtgtgtggagagcacagaatgtccctgtgtgcacagcggcaagcgctacccacctggcaccagcctgagccgggactgcaacacctgcatctgcaggaacagccagtggatctgcagcaatgaagaatgtcctggagaatgtctggtgacaggccagagccacttcaagagctttgacaaccgctacttcaccttcagcggcatctgccagtacctgctggcccgggactgccaggaccacagcttcagcatcgtgattgaaacagtgcagtgtgctgatgacagagatgctgtgtgcaccaggtctgtgacagtgcggctgcccggcctgcacaacagcctggtgaagctgaagcacggggccggcgtggccatggatggccaggatgtgcagctgcccctgctgaagggggacctgcgcatccagcacacagtgacagcctctgtgcggctgtcctatggagaggacctgcagatggactgggatggccggggccgcctgctggtgaagctgagccctgtgtatgccggcaagacctgtggcctgtgtggcaactacaacggcaaccagggagatgacttcctgaccccatctggcctggccgagccccgggtggaggactttggaaatgcctggaagctgcacggggactgccaggacctgcagaagcagcacagcgacccctgtgccctgaaccccaggatgacccgcttcagcgaggaggcctgtgctgtgctgaccagccccacctttgaggcctgccacagagctgtgagccccctgccctacctgaggaactgccgctatgatgtgtgcagctgcagtgatggccgggagtgcctgtgtggggccctggccagctatgctgctgcctgtgccggccggggcgtgcgggtggcctggagggagcccggccgctgtgagctgaactgccccaagggccaggtgtacctgcagtgtggcaccccctgcaacctgacctgccgcagcctgagctacccagatgaggagtgcaatgaggcctgcctggagggctgcttctgccccccaggcctgtacatggatgagcggggggactgtgtgcccaaggcccagtgcccctgctactatgatggagagatcttccagcctgaggacatcttcagtgaccaccacaccatgtgctactgtgaagatggcttcatgcactgcaccatgtctggagtgcccggcagcctgctgcctgatgctgtgctgagcagccccctgagccacaggagcaagaggagcctgagctgcaggcctcccatggtgaagctggtgtgcccagctgacaacctgcgggcagagggcctggagtgcaccaagacctgccagaactatgacctggagtgcatgtccatgggctgtgtgtctggctgcctgtgccccccaggcatggtgagacatgagaacagatgtgtggccctggagcgctgcccctgcttccaccagggcaaggagtatgcccctggagaaacagtgaagattggctgcaacacctgtgtgtgccaggacaggaagtggaactgcacagaccacgtgtgtgatgccacctgcagcaccatcggcatggcccactacctgacctttgatggcctgaagtacctgtttcctggagagtgccagtatgtgctggtgcaggactactgcggcagcaaccctggcaccttccgcatcctggtgggcaacaagggctgcagccaccccagcgtgaagtgcaagaagagggtgaccatcctggtggagggcggggagattgagctgtttgatggagaggtgaatgtgaagaggcccatgaaggatgagacccactttgaggtggtggagagcggccgctacatcatcctgctgctgggcaaggccctgtctgtggtgtgggacagacacctgagcatctctgtggtgctgaagcagacctaccaggagaaggtgtgtggcctgtgtggcaactttgatggcatccagaacaatgacctgaccagcagcaacctgcaggtggaggaggaccctgtggactttggaaacagctggaaggtgagcagccagtgtgccgacaccaggaaggtgcccctggacagcagccctgccacctgccacaacaacatcatgaagcagaccatggtggacagcagctgccgcatcctgaccagtgatgtgttccaggactgcaacaagctggtggaccctgagccctacctggatgtgtgcatctatgacacctgcagctgtgagagcatcggggactgtgcctgcttctgtgacaccatcgccgcctatgcccacgtgtgtgcccagcacggcaaggtggtgacctggaggacagccaccctgtgcccccagagctgtgaggagaggaacctgagagaaaatggctatgaatgtgagtggagatacaacagctgtgccccagcctgccaggtgacctgccagcaccctgagcccctggcctgccctgtgcagtgtgtggagggctgccacgcccactgccccccaggcaagatcctggatgagctgctgcagacctgtgtggaccctgaggactgccctgtgtgtgaggtggccggccgccgctttgccagcggcaagaaggtgaccctgaaccccagcgaccctgagcactgccagatctgccactgtgatgtggtgaacctgacctgtgaggcctgccaggagcccggcggcctggtggtgcccccaacagatgcccctgtgagccccaccaccctgtatgtggaggacatcagcgagccccccctgcatgacttctactgcagccggctgctggacctggtgttcctgctggatggcagcagccggctgtctgaggccgagtttgaggtgctgaaggcctttgtggtggacatgatggagcggctgcgcatcagccagaagtgggtgcgggtggccgtggtggagtaccatgatggcagccacgcctacatcggcctgaaggacaggaagaggcccagcgagctgcggagaattgccagccaggtgaagtatgccggcagccaggtggccagcaccagcgaggtgctgaagtacaccctcttccagatcttcagcaagattgacaggcctgaggccagccgcatcaccctgctgctgatggccagccaggagccccagaggatgagcaggaactttgtgcgctacgtgcagggcctgaagaagaagaaggtgattgtcatccctgtgggcatcggcccccacgccaacctgaagcagatccgcctcatcgagaagcaggcccctgagaacaaggcctttgtgctgagctctgtggatgagctggagcagcagagagatgaaattgtgtcctacctgtgtgacctggcccctgaggcccccccacccaccctgcccccagacatggcccaggtgacagtgggccctggcctgctgggcgtgtccaccctgggccccaagaggaacagcatggtgctggatgtggcctttgtgctggagggcagtgacaagattggagaggccgacttcaacagaagcaaggagttcatggaggaggtgatccagaggatggatgtgggccaggacagcatccacgtgacagtgctgcagtacagctacatggtgacagtggagtaccccttcagcgaggcccagagcaagggggacatcctgcagagggtgcgggagatccgctaccagggcggcaacagaaccaacacaggcctggccctgcgctacctgagtgaccacagcttcctggtgtcccagggcgaccgggagcaggcccccaacctggtgtacatggtgacaggcaacccagccagtgatgagatcaagaggctgcccggggacatccaggtggtgcccatcggcgtgggccccaatgccaacgtgcaggagctggagcgcatcggctggcccaatgcccccatcctgatccaggactttgagaccctgccccgggaggccccagacctggtgctgcagcgctgctgcagcggggagggcctgcagatccccaccctgagccctgccccagactgcagccagcccctggatgtgatcctgctgctggatggcagcagcagcttccctgccagctactttgatgagatgaagagctttgccaaggccttcatcagcaaggccaacatcggcccccggctgacccaggtgtctgtgctgcagtatggcagcatcaccaccattgatgtgccctggaatgtggtgcctgagaaggcccacctgctgagcctggtggatgtgatgcagcgggagggcggccccagccagattggagatgccctgggctttgctgtgcgctacctgaccagcgagatgcacggggcccggcctggggccagcaaggctgtggtgatcctggtgacagatgtgtctgtggacagcgtggatgctgctgctgatgctgcccggagcaacagagtgacagtgttccccatcggcattggagacagatatgatgctgcccagctgcgcatcctggccggccctgctggggacagcaatgtggtgaagctgcagagaattgaggacctgcccaccatggtgaccctgggcaacagcttcctgcacaagctgtgcagcggctttgtgcgcatctgcatggatgaagatggaaatgagaagaggcctggagatgtgtggaccctgcctgaccagtgccacacagtgacctgccagccagatggccagaccctgctgaagagccaccgggtgaactgtgaccggggcctgcggcccagctgccccaacagccagagccctgtgaaggtggaggagacctgtggctgccgctggacctgcccctgtgtgtgcaccggcagcagcaccaggcacatcgtgacctttgatggccagaacttcaagctgaccggcagctgcagctatgtgctcttccagaacaaggagcaggacctggaggtgatcctgcacaacggggcctgcagccctggggcccggcagggctgcatgaagagcattgaggtgaagcacagcgccctgtctgtggagctgcacagcgacatggaggtgacagtgaatggccgcctggtgtctgtgccctacgtgggcggcaacatggaggtgaatgtgtatggagccatcatgcatgaggtgcgcttcaaccacctgggccacatcttcaccttcaccccccagaacaatgagttccagctgcagctgagccccaagacctttgccagcaagacctacggcctgtgtggcatctgtgatgaaaatggagccaatgacttcatgctgagagatggcaccgtgaccacagactggaagaccctggtgcaggagtggacagtgcagaggcctggccagacctgccagcccatcctggaggagcagtgcctggtgcctgacagcagccactgccaggtgctgctgctgcccctgtttgctgagtgccacaaggtgctggccccagccaccttctacgccatctgccagcaggacagctgccaccaggagcaggtgtgtgaggtgattgccagctatgcccacctgtgcaggaccaatggagtgtgtgtggactggaggaccccagacttctgtgccatgagctgcccccccagcctggtgtacaaccactgtgagcacggctgccccaggcactgtgatggaaatgtgagcagctgtggggaccaccccagcgagggctgcttctgccccccagacaaggtgatgctggagggcagctgtgtgcctgaggaggcctgcacccagtgcatcggggaggatggagtgcagcaccagttcctggaggcctgggtgcctgaccaccagccctgccagatctgcacctgcctgagcggcaggaaggtgaactgcaccacccagccctgccccacagccaaggcccccacctgtggcctgtgtgaggtggcccggctgcggcagaatgctgaccagtgctgcccagaatatgaatgtgtgtgtgaccctgtgtcctgtgacctgccccctgtgccccactgtgagcggggcctgcagcccaccctgaccaaccctggagaatgtcggcccaacttcacctgtgcctgcaggaaggaggagtgcaagagggtgagcccccccagctgccccccccaccggctgcccaccctgaggaagacccagtgctgtgatgaatatgaatgtgcctgcaactgtgtgaacagcacagtgtcctgccccctgggctacctggccagcacagccaccaatgactgtggctgcaccaccaccacctgcctgcctgacaaggtgtgtgtgcacaggagcaccatctaccctgtgggccagttctgggaggagggctgtgatgtgtgcacctgcacagacatggaggatgctgtgatgggcctgcgggtggcccagtgcagccagaagccctgtgaggacagctgccgcagcggcttcacctacgtgctgcacgagggggagtgctgcggccgctgcctgcccagcgcctgtgaggtggtgacaggcagccccaggggggacagccagagctcctggaagtctgtgggcagccagtgggccagccctgagaacccctgcctgatcaatgaatgtgtgcgggtgaaggaggaggtgttcatccagcagagaaatgtgtcctgcccccagctggaggtgcctgtgtgccccagcggcttccagctgagctgcaagaccagcgcctgctgccccagctgccgctgtgagaggatggaggcctgcatgctgaatggaacagtgattggccctgggaagacagtgatgattgatgtgtgcaccacctgccgctgcatggtgcaggtgggcgtcatcagcggcttcaagctggagtgcaggaagaccacctgcaacccctgccccctgggctacaaggaggagaacaacacaggagagtgctgcggccgctgcctgcccacagcctgcaccatccagctgcggggcggccagatcatgaccctgaagagagatgagaccctgcaggacggctgtgacacccacttctgcaaggtgaatgaaagaggagagtacttctgggagaagagggtgacaggctgccccccatttgatgagcacaagtgcctggccgagggcggcaagatcatgaagatccctggcacctgctgtgacacctgtgaggagccagaatgtaatgacatcacagcccggctgcagtatgtgaaggtgggcagctgcaagtctgaggtggaggtggacatccactactgccagggcaaatgtgccagcaaggccatgtacagcattgacatcaatgatgtgcaggaccagtgcagctgctgcagccccaccaggacagagcccatgcaggtggccctgcactgcaccaacggctctgtggtgtaccacgaggtgctgaatgccatggagtgcaagtgcagccccaggaagtgcagcaagtag

SEQ ID NO: 12585 - DNA, 8442 bp, Artificial Sequence
  derived and/or modified sequence
atgatccccgcccggttcgccggcgtgctgctggccctggccctgatactgcctgggaccttgtgcgccgaggggacacgggggcggagctcaaccgcacgctgcagccttttcggctcagacttcgtcaataccttcgacggcagcatgtatagcttcgctggctattgctcttacttgttggctggcggctgtcagaagcgttccttctccatcatcggagactttcagaacgggaaacgggtcagtttgtctgtgtaccttggcgagttctttgacattcatttatttgtgaacgggaccgttacacaaggagaccaacgtgtgtcgatgccgtacgcaagcaagggtctgtacctcgagacagaggcaggatattataaactcagcggagaggcatacggcttcgtagctcgcatagatggttcgggtaacttccaggttctgctatccgacaggtattttaataagacttgtggattgtgtggaaatttcaatatcttcgcggaggatgactttatgacgcaagagggcaccctgacctctgacccctacgactttgccaattcgtgggctttatcctctggtgagcagtggtgtgaacgcgccagccccccttctagctcatgtaacattagctctggagagatgcagaagggattgtgggaacagtgtcagctgttaaagtctacgtccgtctttgcaaggtgtcacccactcgtggatcccgaacctttcgtggctctgtgtgaaaaaaccctgtgcgagtgcgccgggggacttgaatgcgcctgcccagctctgctggagtacgcaaggacttgcgcccaagagggaatggtcttgtatggttggaccgatcattccgcctgttcccctgtgtgcccagctggcatggagtacaggcaatgtgtgagcccgtgtgcacgaacttgccagagtctgcacatcaacgaaatgtgtcaagagaggtgtgtcgacgggtgttcttgcccagaggggcaactccttgatgagggcctttgtgtagagagtactgagtgcccttgcgttcatagcgggaaacgctatccccctggtacttccctctcaagggactgcaacacatgcatatgtcggaactcacagtggatttgtagtaatgaggagtgccctggagaatgtctggtgacagggcagtcccactttaagagtttcgacaaccggtacttcacattctctggcatatgccagtatttactggctcgcgattgccaggaccatagtttcagtatcgtgatagaaaccgtgcaatgcgccgacgaccgggatgcggtgtgtactaggtcggttacagtcagattgcctggcctgcacaattctctggtgaaattaaagcacggtgctggggttgccatggatgggcaggacgtgcagttgcccctgctgaaaggggacctcaggatccagcacacagtgaccgcttctgtcaggctctcctatggagaggacctgcagatggactgggatggccgggggcggcttcttgttaagctttctccagtgtatgctggcaagacgtgtgggctgtgtggtaactacaatggaaaccaaggggatgacttcttaactccttcaggtttggccgagcctcgagtggaagacttcggcaacgcttggaaactgcatggagactgtcaagaccttcagaagcagcactcagatccatgcgcattgaacccgcggatgacacgcttctctgaggaggcctgtgccgtcctaaccagtcccacgtttgaggcttgccatcgggctgtcagcccgctgccttacttgcggaactgcaggtatgacgtatgctcatgcagcgatggacgagagtgcctgtgcggcgcactcgcaagttatgcagcagcttgtgcaggccggggcgtgagagtcgcctggcgcgagcctggaaggtgtgaactaaactgcccaaagggccaagtgtacctgcaatgcggaaccccctgtaatctcacttgtcggtcactctcatacccagatgaagagtgcaacgaagcctgtctggaaggatgtttctgccctcctggactgtacatggatgagcgtggcgactgcgtgcctaaagcacagtgtccctgctattacgacggtgaaattttccaacccgaggacatcttttcggaccaccataccatgtgttattgcgaagatgggttcatgcattgcacaatgtccggagtgcccggcagccttctccccgacgccgtgctttcgtcacctctcagccacagatctaagagatccctgtcctgcagacctcccatggttaagttggtatgcccggccgataacctgcgggcggaaggactcgagtgcacaaaaacttgccaaaactacgatttggaatgcatgtcaatgggatgtgtgtctggatgcctgtgcccgcccggaatggtccgccacgaaaaccgttgcgtggcactcgagcgatgcccgtgtttccaccaagggaaagagtatgcccctggtgaaacagttaagataggctgtaacacttgtgtttgtcaggatcgtaagtggaactgtacagaccatgtttgcgatgccacctgttccacgatcggtatggcccattatctcactttcgatgggctcaagtatctgtttccaggggagtgtcaatatgtgttggtccaggattattgcggatcaaaccccgggaccttccgcatattagtagggaataaggggtgcagccatccaagcgtaaagtgtaagaaacgagttaccatacttgtggaaggtggagaaatagagctcttcgacggcgaggtaaacgtaaagcggcctatgaaggatgagacacatttcgaagtggtggagagcggccgttacattattctcctgctgggaaaggccttgtccgtagtgtgggacagacatttgtctataagtgtcgttctgaagcagacctaccaggagaaggtgtgcggactgtgcggcaacttcgatgggatacagaataacgatctaacctcgtccaatctccaggtggaggaagatcccgtggattttggcaatagttggaaagtttcatcccagtgcgcagatacccgtaaagtgcctctggacagcagtcctgccacctgccataataacataatgaagcagacaatggtggacagcagctgtcgtattcttacttccgacgtgtttcaggactgtaataagcttgtggatcctgagccgtacttagatgtttgtatctacgacacatgttcttgcgagagcattggtgactgcgcctgcttttgcgacacaatcgccgcctacgcccacgtgtgtgcccaacatggtaaggtggttacctggcgtacggctacactgtgtccccagagctgcgaggagcgcaaccttagggaaaacgggtatgagtgtgaatggcgctataattcctgcgccccagcttgtcaggttacatgtcagcatcccgaacctttagcatgtcctgtgcagtgcgtggagggctgccacgcacactgcccacctggtaaaattctggacgaactcctccagacctgcgtggacccggaggactgccctgtatgtgaagtggccggaagaagattcgccagtggtaaaaaagtcactctgaatcccagcgatccagaacattgccaaatctgtcattgcgacgttgtaaatctcacttgtgaagcgtgtcaggaacctgggggcctcgtggtgccacctaccgacgctcctgtgtcgcccaccacactctatgtagaggacatctcagaaccacccctgcacgacttctactgctcccgcctactggatctggtctttctcctggacggcagtagccggcttagcgaggcagaatttgaagtactaaaggcattcgtggtcgatatgatggaacgtctcaggatctctcaaaaatgggtgcgggtggcggtcgttgagtaccatgatgggtctcacgcttatataggcttaaaagaccgaaagcgccccagtgaactgcggcgaatagcttctcaggttaagtacgctggctcccaagtagcaagtacatccgaggtgctaaagtacacgctattccagatcttctccaaaatcgatagacccgaggcaagccgaattacacttctgctcatggcttcccaggaaccccagcgcatgtccagaaactttgtgcgctatgtgcagggcttaaaaaagaagaaagtgattgtaatccctgtggggatcgggcctcacgccaacctgaaacagatccgcttgattgaaaagcaagcccctgagaataaggcatttgtgctctcatccgtggacgagctggagcagcaacgggacgaaattgtgagctacctctgcgacctggccccagaggctccaccgcctacactccccccagatatggcccaggttactgtggggcctgggcttctgggggtatctacgctgggacctaagcgaaatagcatggtcttggacgtggccttcgttctagaagggtcggacaagatcggagaggccgattttaatcgcagtaaggaatttatggaggaagttatacaacgaatggacgttgggcaggattcgattcatgtgacagtattacagtatagttacatggttaccgtagagtatccatttagtgaagctcagtcaaagggggacattctgcagcgggtaagggagatccggtaccagggaggaaataggactaatactggactggctttgcgttatctgtccgatcacagcttcctggtaagccagggagatcgcgaacaggcacctaatctggtatatatggttaccgggaatcccgcctccgacgagatcaaacgtctcccgggcgacatccaggtggtccctataggtgtcgggccaaacgcgaatgtacaagagctggagcggatcggttggcctaacgccccgattctcatccaggacttcgagacactgccacgggaagcacctgatcttgtcctccagcgctgctgtagtggcgaaggcctgcagatacctactctgtcacctgccccagattgctcccaacccctggacgtaattcttctcctggacggaagctcctccttccccgccagttacttcgatgaaatgaagtcctttgcaaaggcatttatttctaaagccaacattggcccgaggttaacccaggtgagcgtccttcaatacggatccattaccacaatcgacgtcccttggaatgtggtgccagaaaaagcgcatctgctctctctcgtcgatgtaatgcagagggagggcggcccctctcagattggcgacgctctgggatttgctgtgaggtacctgacatctgagatgcatggagccaggcccggcgcttctaaggccgtcgtgatcctcgtgacagatgtaagtgttgactctgtggatgctgccgctgatgccgctcggagcaatagagtaacagtctttccgatcggtataggagatagatacgatgctgcccagctgagaattcttgcggggcccgccggggattctaatgtggttaagctgcagcgcatcgaggatctacccactatggtgaccctgggcaacagcttcttgcataagctgtgtagcggctttgtgcgcatatgcatggacgaggatggcaacgagaagcgccctggcgatgtctggacgctgccggatcagtgccacaccgtcacatgtcaaccagacggtcaaacacttctgaaatcacatcgggtgaactgtgaccgaggactgcgtccctcctgccctaattcccagtcgccggtgaaggtggaggagacctgtggttgccgctggacatgtccctgcgtctgcaccggatcctcaactcggcatatcgtgacatttgatggtcagaacttcaaactgacagggagctgttcatacgtcctctttcaaaacaaagagcaggatctggaagtgattctccataacggtgcatgttcacctggggcccggcagggctgtatgaagagcattgaagtgaagcattccgctctatcagtcgagttgcactctgatatggaagttaccgttaacggtaggctcgtatctgtgccctacgtcggtggaaatatggaggtcaacgtttacggagctatcatgcacgaggtcaggttcaatcatctgggccacatcttcactttcactcctcaaaataacgaatttcagctacagcttagcccgaaaaccttcgcttccaaaacttatgggttgtgcgggatatgcgacgagaatggcgccaatgattttatgttgcgggatggaactgttacaaccgattggaaaacactggtccaggaatggacagtgcaaagacctggacagacttgccagcctatactggaagagcagtgcctggtgccagattcctcacattgccaggtgctgctattgcctcttttcgctgagtgtcacaaggttttggcccccgcgacgttttacgctatctgccaacaagacagttgccaccaagaacaagtctgtgaggtgatcgcctcttacgctcacctgtgtcgaacaaacggggtttgtgtggactggcgcacacctgatttctgcgctatgtcctgccctcccagcctcgtgtacaatcactgtgagcatggatgtccccgtcattgcgacggcaacgtctcatcatgtggagaccacccctcggagggatgcttttgtccgcctgacaaagtgatgctggaggggagttgtgtgccggaggaggcgtgcacccaatgtattggcgaggatggtgtgcagcaccagtttctggaggcctgggtgccagatcaccagccctgccagatctgcacatgtttgtcaggccgcaaggtcaattgcaccacccaaccctgtcccactgccaaagctcccacttgtgggctgtgcgaagtagcccggctccgccagaatgctgaccagtgctgtccagaatatgagtgcgtgtgcgatcctgtcagctgtgatctgccgccagtgcctcactgcgagaggggtctgcagcctaccctgaccaatccaggcgaatgcagaccgaactttacatgtgcctgtcgtaaggaggagtgtaaaagagtgagcccaccatcttgtccacctcatagattacccacattaaggaagacacagtgctgcgacgaatacgaatgcgcctgcaactgcgtgaacagcactgtcagctgtccactgggctacctggccagtactgcaacgaatgattgcggatgcaccacaactacttgcctccccgacaaggtgtgtgttcaccgatcaacgatctatcccgtcggacagttttgggaagaggggtgcgatgtgtgcacttgtaccgatatggaggacgccgtcatggggctcagggtagcccagtgtagccaaaaaccgtgtgaagactcttgtcggagtggattcacttacgtgcttcatgaaggcgaatgctgcggccgttgcttgccttccgcctgcgaagtggtcacgggttctcctcgtggcgattcacaatcttcttggaaaagcgtgggctcgcaatgggcctcaccggaaaacccgtgtttgattaatgaatgtgtaagagtgaaagaggaggtcttcattcaacaaaggaatgtttcctgcccccaactggaggtgcccgtgtgccctagtgggttccagctaagttgcaaaacgagtgcgtgctgcccaagctgtaggtgtgaacgcatggaggcatgtatgttgaatggaacagtgatcggccccggtaaaacagtgatgattgacgtttgcaccacctgccggtgtatggtgcaggtaggcgtgatatccggatttaagctggagtgccgtaagactacgtgcaatccttgcccgttgggatataaagaagaaaataacacaggcgagtgctgtggccgatgtctcccaacagcctgcacaatccagttaagggggggccaaattatgactttgaaacgagacgagaccctgcaagacggctgtgacacccacttctgtaaagttaatgaaagaggggagtacttttgggagaagcgtgtaacaggctgtccaccatttgatgagcacaaatgtcttgctgaaggtgggaaaataatgaagataccagggacctgttgcgacacctgcgaggagccggaatgtaatgacataaccgcgcgccttcagtatgtcaaagtgggctcttgtaaatccgaggtagaggtggatatccactattgtcagggcaaatgtgctagcaaggcgatgtacagcatcgatatcaatgatgtccaagatcagtgctcttgttgttcacccaccaggaccgagcccatgcaggtcgccctgcattgcacaaatggtagcgtcgtataccatgaggtgttaaacgctatggaatgtaagtgcagcccccgcaagtgctctaagtag

SEQ ID NO: 12586 - DNA, 8441 bp, Artificial Sequence
  derived and/or modified sequence
atgataccggcacgctttgccggtgttctgcttgcgctagcactgattctccccggtaccctttgtgctgaagggacacgcggacgcagctccactgctcggtgctccctgttcggttctgacttcgtgaacactttcgatgggagcatgtattcttttgcaggatattgctcctatctgctggccggtggatgtcagaaacgaagctttagtatcattggagacttccaaaacggtaagagagtgtcattgtctgtgtatcttggagagttctttgacattcacctctttgtcaatgggactgtcacgcaaggtgatcagcgcgtcagtatgccatatgcgtcaaaggggctataccttgaaactgaagccggttactacaagttaagcggcgaagcctatggttttgtggcccgtatcgatggaagcggaaatttccaagtgttactgtcagaccggtactttaacaagacgtgcggtctctgcggcaatttcaacatatttgctgaagatgattttatgacccaggaaggaaccctgacatccgacccctatgatttcgccaactcttgggctctgagttctggcgagcagtggtgtgagagggcgtctccaccttcaagctcctgtaatatttcttctggagagatgcagaaaggtctatgggaacagtgccagctgctcaagagcacatccgtcttcgcgaggtgccatcctttggtggatccagagcctttcgtagccctgtgcgagaagaccctgtgcgagtgtgccggtggcctcgagtgcgcatgtcctgcacttctcgaatatgccaggacatgtgctcaagagggcatggtactgtacggctggactgaccacagcgcgtgctcacccgtctgcccagctggtatggagtatcggcagtgcgtgtctccatgcgcacggacttgtcagtccctacacattaatgagatgtgtcaagagcggtgtgtggacgggtgttcctgccccgaaggccagctcttagacgagggtctgtgcgtcgagagtaccgagtgtccatgcgtccattcaggaaagaggtaccctccaggaactagcctttccagagattgcaacacttgcatttgccgcaatagtcagtggatttgctctaatgaagaatgcccgggagagtgcttggttacgggccagtctcacttcaagagctttgataacagatacttcacattcagtggtatctgtcagtacctgctcgcgagagattgtcaggaccattccttctccatcgttattgagacagtgcagtgtgcagatgaccgtgatgctgtgtgcacgagaagcgtgactgttcgcctgcctggcctacacaactcgctcgtgaagctcaaacacggggctggtgtggccatggatgggcaggacgttcagctgcctttgctgaaaggcgacctacgcatacagcataccgttaccgcctccgtgcggttaagctacggcgaggacttgcagatggattgggacggcagagggagacttctggtgaaactgtcacctgtgtacgcaggcaaaacctgtggcctgtgcggcaattataacggtaaccagggtgatgatttcttgaccccgagcgggctcgcggagcccagggttgaagattttggtaatgcatggaaacttcatggtgactgccaagacctgcaaaaacaacattctgacccctgcgccctgaatccacgcatgaccagattctcagaagaggcttgcgccgtgctgacctcacctacatttgaagcatgccatagggccgtctccccacttccatacttgcgcaactgtcggtacgacgtatgttcttgctctgacggacgcgaatgtctgtgcggggcactggcctcctatgctgccgcttgcgccggacgaggcgttagagtagcttggcgggagccaggcaggtgcgagcttaactgccctaaggggcaggtgtatcttcaatgcggcactccttgtaatttaacgtgccgaagcttgagctaccccgatgaagagtgtaacgaagcctgtctggaaggctgcttctgccccccaggtctgtacatggacgaaagaggcgattgcgttcctaaagcccagtgcccttgttattatgacggcgagatatttcagcctgaagatattttctcggatcaccacaccatgtgctattgcgaagacgggttcatgcattgtacaatgagcggggttcctggaagcctgcttccagatgctgttctaagttcccctctgtcccacagatccaagcggtctttgtcttgtaggccaccaatggtgaaactagtctgccctgccgacaacctgcgcgctgaggggcttgaatgtaccaagacatgccagaattacgatctcgaatgtatgagcatgggctgcgtcagcggatgtctttgcccgccaggcatggtccgtcatgagaaccggtgtgtcgccttggagagatgtccctgcttccaccagggcaaagagtatgctcccggtgagacagttaagattggctgcaacacctgtgtttgtcaggatcgaaaatggaactgtacggaccacgtgtgtgatgccacctgttcaaccatagggatggctcactacctcacattcgacgggttgaaatacttatttccaggcgaatgtcaatatgtcctagttcaggactactgcgggtccaatcctggcacttttaggatcctggtaggtaataagggatgttcccatccttccgttaagtgtaagaagcgcgtgaccatactggtagaggggggagaaatcgaactgttcgacggtgaggtgaatgttaaacgccctatgaaggatgaaacacatttcgaggtggtcgagagcggcagatatattattcttctgctcggcaaagccctgagtgtggtttgggatcgtcatctctcaatcagtgttgtgctgaagcagacatatcaggagaaggtgtgcgggttgtgcggcaattttgatggcatccagaataatgacctaacctcctcaaatctgcaggtcgaggaggacccagtcgattttggaaactcatggaaagtttcgtcacagtgcgccgacacccggaaagtgcctttggactctagccccgctacctgccacaacaacatcatgaagcagaccatggtagatagttcttgtagaattttaaccagcgacgtttttcaggactgcaacaaactggtggaccctgagccttacctggatgtgtgcatatacgacacatgcagctgcgagtctataggcgattgcgcatgtttctgtgacaccattgcagcctacgctcatgtgtgtgcccagcacggaaaggtcgtcacctggagaacggcgaccctctgcccgcaatcatgcgaggagcgtaatttgcgtgaaaatggatacgaatgcgagtggaggtacaacagttgcgcccctgcttgtcaagtgacttgtcaacaccctgaacctctggcctgccccgtccagtgtgttgaggggtgccacgcgcactgtccgcctggcaaaatcctagacgaattgctgcagacttgtgtggaccccgaggattgtccagtgtgcgaggtggccggacggaggtttgcatctgggaagaaggtgaccttgaacccctctgatcccgaacattgtcaaatctgtcattgcgacgttgtgaacctaacatgtgaggcctgccaggagcccggaggcttagttgtgccacctactgatgcccctgtctcccctactactctttatgtggaggatatctcagagccccctctccatgatttctattgttccaggctcttggacctggtgtttctcctcgatggtagcagcagactctctgaagcagaatttgaggtgttgaaggcctttgttgttgatatgatggaaaggttgaggatctcccagaagtgggtgcgagtcgccgttgtggagtatcacgacggaagccatgcatacatcggcctgaaggacagaaagaggcccagcgaactaaggcgcatcgcatcacaggtgaagtacgctggttctcaggtggctagcacaagtgaggtgctaaagtacactctctttcagatattttcaaagatcgatcgaccagaggcatcccggattacccttttgctgatggcctcgcaggagccacagagaatgtccaggaacttcgtgcggtatgtgcaggggctaaaaaagaaaaaggtaatcgtcatacccgttggcattggccctcacgctaatctgaaacagatccgtttgattgaaaagcaggctcctgagaacaaggcctttgtcctatcctccgtggatgaactggaacaacagcgcgacgaaattgtgtcttatttatgtgacttagcaccagaagcccctccaccaacgctgcccccagatatggcccaggtaactgttggcccaggactcctaggcgtcagcacgttaggccctaagaggaactctatggtcctggacgtcgccttcgtacttgagggatcagacaagatcggggaagctgactttaatagaagtaaagaattcatggaagaggtgattcagcgaatggatgttgggcaggacagtatccacgtcacagtgctgcagtactcgtatatggtcacagtggagtacccgttctccgaggcccagtcgaagggcgatatcctgcagagggtgcgggaaattcgttatcaggggggtaaccggactaataccggcttggcgctacgctacctgagcgatcactcctttctggtgtcacagggcgatagggaacaggcgccaaaccttgtttatatggttaccgggaatccagcatctgatgagatcaagcgactgccaggcgatattcaggtcgtgcctattggcgtcggtcctaatgcgaatgtccaagaattggaaaggattggctggccaaatgcaccaattttgatccaggactttgaaacactacctcgcgaagcgcctgatcttgtgcttcagcgctgttgctcaggagaaggacttcagattcccaccctgtctccagcacctgactgtagtcagccgctagatgtgatcctgctgctggacggtagctcaagtttccccgctagctactttgacgaaatgaagagcttcgcaaaagcattcatctccaaggcaaacatcggccctcgcctgacacaggtctctgtgctacagtatggctccatcaccacaatcgatgtgccgtggaacgtcgtgccagagaaggcccacctcctctccttggtcgatgtgatgcagagagaaggtggtccgagccagatcggcgatgccctgggattcgcggtgcgatacttgactagcgagatgcatggtgcgagacccggagctagtaaagccgttgtgattctcgtgaccgacgtgtcggttgactcagtagacgcagcagccgatgccgcaagatctaatcgagtgactgtttttccaattgggataggtgataggtatgacgccgcacagttgagaatcctggctgggcctgctggcgactcaaacgttgtcaaactgcagagaatcgaagacctgcccaccatggtgacccttggtaactcctttttacataaattatgttccgggttcgtgcggatttgcatggatgaggatgggaacgagaaaaggcctggcgacgtctggaccctccccgatcagtgtcacactgtcacctgtcagccagatggtcagacgctcctgaaatcccatcgcgttaactgtgaccgcggattacgaccttcttgcccgaactcccagagccctgttaaggtggaagaaacctgcggatgcaggtggacatgtccctgcgtatgtaccgggagctccaccagacatattgtcaccttcgacggacagaatttcaaacttacggggtcgtgttcatatgtgctgtttcagaataaagagcaggacctagaggtcatcttacataatggagcttgtagcccgggtgcacggcagggttgcatgaagtcgattgaagtgaagcattcagctctctcagtggagttgcatagcgatatggaagtgacagtcaacggtcgactcgtgtctgtgccctacgtcggtggcaacatggaggtgaacgtctatggcgctataatgcacgaagttcggttcaatcatctggggcacatctttaccttcactccgcaaaataatgagtttcaattgcaactgagccctaagacctttgctagtaaaacttacggcctctgtgggatctgtgacgaaaatggtgcaaatgacttcatgctcagggatggaaccgtgactaccgactggaagaccctggtgcaggagtggaccgtgcagcgcccaggacagacatgccagcctatcctagaagaacaatgcctggtgcctgattcttctcattgccaggtgctcctcctgcctctatttgccgagtgtcacaaagttttagccccagcgacattctacgccatttgccaacaggattcttgccaccaggaacaggtttgcgaggtgatcgcctcttacgcacacctgtgtcggacgaacggagtgtgcgtagactggcggacgcccgacttctgtgccatgagctgtccgccaagtttggtgtacaaccactgcgagcacggatgtccgagacactgcgatggaaacgtgtcatcatgtggtgaccatcctagtgagggttgcttctgccccccagataaggtgatgctcgagggatcttgcgttcccgaagaggcttgcacccaatgtatcggagaggacggcgtacagcaccagtttcttgaagcctgggttcctgaccaccaaccttgccagatttgtacctgcctaagtggcagaaaggtgaactgtaccacccagccctgcccaaccgccaaggcgcctacttgtggcctatgtgaagtcgcgaggctgcgccagaacgccgaccagtgttgtcccgaatatgagtgcgtatgtgatcctgtgagctgcgacctcccgcctgtccctcactgcgaacgtggattgcaacccaccctaacaaatcccggtgaatgccggccaaacttcacctgtgcatgcaggaaggaagagtgcaaaagagtgagccctccatcatgccctcctcaccggctccctaccctgaggaagacgcagtgttgcgacgagtacgagtgtgcctgtaattgtgtgaatagtaccgtgagctgccccctcgggtatctcgcttctactgctaccaacgactgcgggtgcacgacgactacatgtctgcctgacaaagtgtgtgtgcaccgctctaccatttaccccgtgggtcagttttgggaggaggggtgcgacgtttgcacctgtaccgatatggaagatgcagtcatgggcctgcgggtggcacagtgcagtcagaaaccctgtgaggacagttgccggagtggttttacttatgtgctccatgagggagaatgctgtgggagatgccttccttctgcttgtgaggtggtcaccgggtctccacgcggagactcccagtcttcttggaagtcagtcggaagccagtgggcaagccccgagaatccctgtctgatcaacgaatgtgtgcgggtgaaggaggaagttttcatccagcagaggaacgtaagctgtccacaattagaagtgcccgtgtgcccatccgggttccagttatcttgcaagacttcagcgtgttgccccagctgtcggtgcgagcgcatggaggcttgtatgttgaacggaactgttatcggtcccggtaaaacagtcatgatcgatgtgtgcactacatgcaggtgtatggtgcaagttggcgttatctctgggttcaagctggagtgtaggaaaaccacgtgcaatccatgcccgctgggttataaggaggaaaataataccggagaatgttgcggccgttgtcttccgaccgcttgcacgatccagttaaggggtggccagattatgacattaaaacgggacgagacactgcaagatggctgtgatacccacttctgcaaggtgaacgaacgcggagagtatttttgggaaaagcgggtcaccggttgtccacccttcgacgaacacaaatgtctggccgagggtggaaaaatcatgaaaattcctggcacatgctgcgatacatgcgaggagcctgagtgcaatgatataaccgcgaggctacagtacgtgaaagtgggctcctgtaagtccgaagtagaagtggacattcactactgccaggggaaatgcgcttctaaagcgatgtactctatagatatcaacgatgtccaggatcagtgctcatgctgctcacccacccgcacagagccaatgcaggtagccctgcactgcactaatggcagcgtggtgtatcacgaggtgctgaacgcaatggaatgcaagtgcagcccccgaaaatgctccaagta

SEQ ID NO: 12587 - DNA, 8838 bp, Artificial Sequence
  derived and/or modified sequence
gtggcagctcacagctattgtggtgggaaagggagggtggttggtggatgtcacagcttgggctttatctcccccagcagtggggactccacagcccctgggctacataacagcaagacagtccggagctgtagcagacctgattgagcctttgcagcagctgagagcatggcctagggtgggcggcaccattgtccagcagctgagtttcccagggaccttggagatagccgcagccctcatttgcaggggaagatgattcctgccagatttgccggggtgctgcttgctctggccctcattttgccagggaccctttgtgcagaaggaactcgcggcaggtcatccacggcccgatgcagccttttcggaagtgacttcgtcaacacctttgatgggagcatgtacagctttgcgggatactgcagttacctcctggcagggggctgccagaaacgctccttctcgattattggggacttccagaatggcaagagagtgagcctctccgtgtatcttggggaattttttgacatccatttgtttgtcaatggtaccgtgacacagggggaccaaagagtctccatgccctatgcctccaaagggctgtatctagaaactgaggctgggtactacaagctgtccggtgaggcctatggctttgtggccaggatcgatggcagcggcaactttcaagtcctgctgtcagacagatacttcaacaagacctgcgggctgtgtggcaactttaacatctttgctgaagatgactttatgacccaagaagggaccttgacctcggacccttatgactttgccaactcatgggctctgagcagtggagaacagtggtgtgaacgggcatctcctcccagcagctcatgcaacatctcctctggggaaatgcagaagggcctgtgggagcagtgccagcttctgaagagcacctcggtgtttgcccgctgccaccctctggtggaccccgagccttttgtggccctgtgtgagaagactttgtgtgagtgtgctggggggctggagtgcgcctgccctgccctcctggagtacgcccggacctgtgcccaggagggaatggtgctgtacggctggaccgaccacagcgcgtgcagcccagtgtgccctgctggtatggagtataggcagtgtgtgtccccttgcgccaggacctgccagagcctgcacatcaatgaaatgtgtcaggagcgatgcgtggatggctgcagctgccctgagggacagctcctggatgaaggcctctgcgtggagagcaccgagtgtccctgcgtgcattccggaaagcgctaccctcccggcacctccctctctcgagactgcaacacctgcatttgccgaaacagccagtggatctgcagcaatgaagaatgtccaggggagtgccttgtcacaggtcaatcacacttcaagagctttgacaacagatacttcaccttcagtgggatctgccagtacctgctggcccgggattgccaggaccactccttctccattgtcattgagactgtccagtgtgctgatgaccgcgacgctgtgtgcacccgctccgtcaccgtccggctgcctggcctgcacaacagccttgtgaaactgaagcatggggcaggagttgccatggatggccaggacgtccagctccccctcctgaaaggtgacctccgcatccagcatacagtgacggcctccgtgcgcctcagctacggggaggacctgcagatggactgggatggccgcgggaggctgctggtgaagctgtcccccgtctatgccgggaagacctgcggcctgtgtgggaattacaatggcaaccagggcgacgacttccttaccccctctgggctggcggagccccgggtggaggacttcgggaacgcctggaagctgcacggggactgccaggacctgcagaagcagcacagcgatccctgcgccctcaacccgcgcatgaccaggttctccgaggaggcgtgcgcggtcctgacgtcccccacattcgaggcctgccatcgtgccgtcagcccgctgccctacctgcggaactgccgctacgacgtgtgctcctgctcggacggccgcgagtgcctgtgcggcgccctggccagctatgccgcggcctgcgcggggagaggcgtgcgcgtcgcgtggcgcgagccaggccgctgtgagctgaactgcccgaaaggccaggtgtacctgcagtgcgggaccccctgcaacctgacctgccgctctctctcttacccggatgaggaatgcaatgaggcctgcctggagggctgcttctgccccccagggctctacatggatgagaggggggactgcgtgcccaaggcccagtgcccctgttactatgacggtgagatcttccagccagaagacatcttctcagaccatcacaccatgtgctactgtgaggatggcttcatgcactgtaccatgagtggagtccccggaagcttgctgcctgacgctgtcctcagcagtcccctgtctcatcgcagcaaaaggagcctatcctgtcggccccccatggtcaagctggtgtgtcccgctgacaacctgcgggctgaagggctcgagtgtaccaaaacgtgccagaactatgacctggagtgcatgagcatgggctgtgtctctggctgcctctgccccccgggcatggtccggcatgagaacagatgtgtggccctggaaaggtgtccctgcttccatcagggcaaggagtatgcccctggagaaacagtgaagattggctgcaacacttgtgtctgtcaggaccggaagtggaactgcacagaccatgtgtgtgatgccacgtgctccacgatcggcatggcccactacctcaccttcgacgggctcaaatacctgttccccggggagtgccagtacgttctggtgcaggattactgcggcagtaaccctgggacctttcggatcctagtggggaataagggatgcagccacccctcagtgaaatgcaagaaacgggtcaccatcctggtggagggaggagagattgagctgtttgacggggaggtgaatgtgaagaggcccatgaaggatgagactcactttgaggtggtggagtctggccggtacatcattctgctgctgggcaaagccctctccgtggtctgggaccgccacctgagcatctccgtggtcctgaagcagacataccaggagaaagtgtgtggcctgtgtgggaattttgatggcatccagaacaatgacctcaccagcagcaacctccaagtggaggaagaccctgtggactttgggaactcctggaaagtgagctcgcagtgtgctgacaccagaaaagtgcctctggactcatcccctgccacctgccataacaacatcatgaagcagacgatggtggattcctcctgtagaatccttaccagtgacgtcttccaggactgcaacaagctggtggaccccgagccatatctggatgtctgcatttacgacacctgctcctgtgagtccattggggactgcgcctgcttctgcgacaccattgctgcctatgcccacgtgtgtgcccagcatggcaaggtggtgacctggaggacggccacattgtgcccccagagctgcgaggagaggaatctccgggagaacgggtatgagtgtgagtggcgctataacagctgtgcacctgcctgtcaagtcacgtgtcagcaccctgagccactggcctgccctgtgcagtgtgtggagggctgccatgcccactgccctccagggaaaatcctggatgagcttttgcagacctgcgttgaccctgaagactgtccagtgtgtgaggtggctggccggcgttttgcctcaggaaagaaagtcaccttgaatcccagtgaccctgagcactgccagatttgccactgtgatgttgtcaacctcacctgtgaagcctgccaggagccgggaggcctggtggtgcctcccacagatgccccggtgagccccaccactctgtatgtggaggacatctcggaaccgccgttgcacgatttctactgcagcaggctactggacctggtcttcctgctggatggctcctccaggctgtccgaggctgagtttgaagtgctgaaggcctttgtggtggacatgatggagcggctgcgcatctcccagaagtgggtccgcgtggccgtggtggagtaccacgacggctcccacgcctacatcgggctcaaggaccggaagcgaccgtcagagctgcggcgcattgccagccaggtgaagtatgcgggcagccaggtggcctccaccagcgaggtcttgaaatacacactgttccaaatcttcagcaagatcgaccgccctgaagcctcccgcatcaccctgctcctgatggccagccaggagccccaacggatgtcccggaactttgtccgctacgtccagggcctgaagaagaagaaggtcattgtgatcccggtgggcattgggccccatgccaacctcaagcagatccgcctcatcgagaagcaggcccctgagaacaaggccttcgtgctgagcagtgtggatgagctggagcagcaaagggacgagatcgttagctacctctgtgaccttgcccctgaagcccctcctcctactctgccccccgacatggcacaagtcactgtgggcccggggctcttgggggtttcgaccctggggcccaagaggaactccatggttctggatgtggcgttcgtcctggaaggatcggacaaaattggtgaagccgacttcaacaggagcaaggagttcatggaggaggtgattcagcggatggatgtgggccaggacagcatccacgtcacggtgctgcagtactcctacatggtgactgtggagtaccccttcagcgaggcacagtccaaaggggacatcctgcagcgggtgcgagagatccgctaccagggcggcaacaggaccaacactgggctggccctgcggtacctctctgaccacagcttcttggtcagccagggtgaccgggagcaggcgcccaacctggtctacatggtcaccggaaatcctgcctctgatgagatcaagaggctgcctggagacatccaggtggtgcccattggagtgggccctaatgccaacgtgcaggagctggagaggattggctggcccaatgcccctatcctcatccaggactttgagacgctcccccgagaggctcctgacctggtgctgcagaggtgctgctccggagaggggctgcagatccccaccctctcccctgcacctgactgcagccagcccctggacgtgatccttctcctggatggctcctccagtttcccagcttcttattttgatgaaatgaagagtttcgccaaggctttcatttcaaaagccaatatagggcctcgtctcactcaggtgtcagtgctgcagtatggaagcatcaccaccattgacgtgccatggaacgtggtcccggagaaagcccatttgctgagccttgtggacgtcatgcagcgggagggaggccccagccaaatcggggatgccttgggctttgctgtgcgatacttgacttcagaaatgcatggtgccaggccgggagcctcaaaggcggtggtcatcctggtcacggacgtctctgtggattcagtggatgcagcagctgatgccgccaggtccaacagagtgacagtgttccctattggaattggagatcgctacgatgcagcccagctacggatcttggcaggcccagcaggcgactccaacgtggtgaagctccagcgaatcgaagacctccctaccatggtcaccttgggcaattccttcctccacaaactgtgctctggatttgttaggatttgcatggatgaggatgggaatgagaagaggcccggggacgtctggaccttgccagaccagtgccacaccgtgacttgccagccagatggccagaccttgctgaagagtcatcgggtcaactgtgaccgggggctgaggccttcgtgccctaacagccagtcccctgttaaagtggaagagacctgtggctgccgctggacctgcccctgcgtgtgcacaggcagctccactcggcacatcgtgacctttgatgggcagaatttcaagctgactggcagctgttcttatgtcctatttcaaaacaaggagcaggacctggaggtgattctccataatggtgcctgcagccctggagcaaggcagggctgcatgaaatccatcgaggtgaagcacagtgccctctccgtcgagctgcacagtgacatggaggtgacggtgaatgggagactggtctctgttccttacgtgggtgggaacatggaagtcaacgtttatggtgccatcatgcatgaggtcagattcaatcaccttggtcacatcttcacattcactccacaaaacaatgagttccaactgcagctcagccccaagacttttgcttcaaagacgtatggtctgtgtgggatctgtgatgagaacggagccaatgacttcatgctgagggatggcacagtcaccacagactggaaaacacttgttcaggaatggactgtgcagcggccagggcagacgtgccagcccatcctggaggagcagtgtcttgtccccgacagctcccactgccaggtcctcctcttaccactgtttgctgaatgccacaaggtcctggctccagccacattctatgccatctgccagcaggacagttgccaccaggagcaagtgtgtgaggtgatcgcctcttatgcccacctctgtcggaccaacggggtctgcgttgactggaggacacctgatttctgtgctatgtcatgcccaccatctctggtctacaaccactgtgagcatggctgtccccggcactgtgatggcaacgtgagctcctgtggggaccatccctccgaaggctgtttctgccctccagataaagtcatgttggaaggcagctgtgtccctgaagaggcctgcactcagtgcattggtgaggatggagtccagcaccagttcctggaagcctgggtcccggaccaccagccctgtcagatctgcacatgcctcagcgggcggaaggtcaactgcacaacgcagccctgccccacggccaaagctcccacgtgtggcctgtgtgaagtagcccgcctccgccagaatgcagaccagtgctgccccgagtatgagtgtgtgtgtgacccagtgagctgtgacctgcccccagtgcctcactgtgaacgtggcctccagcccacactgaccaaccctggcgagtgcagacccaacttcacctgcgcctgcaggaaggaggagtgcaaaagagtgtccccaccctcctgccccccgcaccgtttgcccacccttcggaagacccagtgctgtgatgagtatgagtgtgcctgcaactgtgtcaactccacagtgagctgtccccttgggtacttggcctcaactgccaccaatgactgtggctgtaccacaaccacctgccttcccgacaaggtgtgtgtccaccgaagcaccatctaccctgtgggccagttctgggaggagggctgcgatgtgtgcacctgcaccgacatggaggatgccgtgatgggcctccgcgtggcccagtgctcccagaagccctgtgaggacagctgtcggtcgggcttcacttacgttctgcatgaaggcgagtgctgtggaaggtgcctgccatctgcctgtgaggtggtgactggctcaccgcggggggactcccagtcttcctggaagagtgtcggctcccagtgggcctccccggagaacccctgcctcatcaatgagtgtgtccgagtgaaggaggaggtctttatacaacaaaggaacgtctcctgcccccagctggaggtccctgtctgcccctcgggctttcagctgagctgtaagacctcagcgtgctgcccaagctgtcgctgtgagcgcatggaggcctgcatgctcaatggcactgtcattgggcccgggaagactgtgatgatcgatgtgtgcacgacctgccgctgcatggtgcaggtgggggtcatctctggattcaagctggagtgcaggaagaccacctgcaacccctgccccctgggttacaaggaagaaaataacacaggtgaatgttgtgggagatgtttgcctacggcttgcaccattcagctaagaggaggacagatcatgacactgaagcgtgatgagacgctccaggatggctgtgatactcacttctgcaaggtcaatgagagaggagagtacttctgggagaagagggtcacaggctgcccaccctttgatgaacacaagtgtctggctgagggaggtaaaattatgaaaattccaggcacctgctgtgacacatgtgaggagcctgagtgcaacgacatcactgccaggctgcagtatgtcaaggtgggaagctgtaagtctgaagtagaggtggatatccactactgccagggcaaatgtgccagcaaagccatgtactccattgacatcaacgatgtgcaggaccagtgctcctgctgctctccgacacggacggagcccatgcaggtggccctgcactgcaccaatggctctgttgtgtaccatgaggttctcaatgccatggagtgcaaatgctcccccaggaagtgcagcaagtgaggctgctgcagctgcatgggtgcctgctgctgcctgccttggcctgatggccaggccagagtgctgccagtcctctgcatgttctgctcttgtgcccttctgagcccacaataaaggctgagctcttatcttgcaaaaggc

SEQ ID NO: 12588 - DNA, 222 bp, Artificial Sequence
  derived and/or modified sequence
atgcagttcgcagactggttgcatccctccgggtggactatcgagatcctgaatgcttatggcatgggagatagaaagcggacaaactctatgtcgaaggaggcctttaccccagaacagctgcatctggaaaaagaactgggagagatgaggcttaggccgacggtgctccactctcaaaccgaccatcagggctttaggccaattcccatgatgcagtag

SEQ ID NO: 12589 - protein, 1432 aa, Artificial Sequence
  derived and/or modified sequence
MSEKKLETTAQQRKCPEWMNVQNKRCAVEERKACVRKSVFEDDLPFLEFTGSIVYSYDASDCSFLSEDISMSLSDGDVVGFDMEWPPLYNRGKLGKVALIQLCVSESKCYLFHVSSMSVFPQGLKMLLENKAVKKAGVGIEGDQWKLLRDFDIKLKNFVELTDVANKKLKCTETWSLNSLVKHLLGKQLLKDKSIRCSNWSKFPLTEDQKLYAATDAYAGFIIYRNLEILDDTVQRFAINKEEEILLSDMNKQLTSISEEVMDLAKHLPHAFSKLENPRRVSILLKDISENLYSLRRMIIGSTNIETELRPSNNLNLLSFEDSTTGGVQQKQIREHEVLIHVEDETWDPTLDHLAKHDGEDVLGNKVERKEDGFEDGVEDNKLKENMERACLMSLDITEHELQILEQQSQEEYLSDIAYKSTEHLSPNDNENDTSYVIESDEDLEMEMLKHLSPNDNENDTSYVIESDEDLEMEMLKSLENLNSGTVEPTHSKCLKMERNLGLPTKEEEEDDENEANEGEEDDDKDFLWPAPNEEQVTCLKMYFGHSSFKPVQWKVIHSVLEERRDNVAVMATGYGKSLCFQYPPVYVGKIGLVISPLISLMEDQVLQLKMSNIPACFLGSAQSENVLTDIKLGKYRIVYVTPEYCSGNMGLLQQLEADIGITLIAVDEAHCISEWGHDFRDSFRKLGSLKTALPMVPIVALTATASSSIREDIVRCLNLRNPQITCTGFDRPNLYLEVRRKTGNILQDLQPFLVKTSSHWEFEGPTIIYCPSRKMTQQVTGELRKLNLSCGTYHAGMSFSTRKDIHHRFVRDEIQCVIATIAFGMGINKADIRQVIHYGAPKDMESYYQEIGRAGRDGLQSSCHVLWAPADINLNRHLLTEIRNEKFRLYKLKMMAKMEKYLHSSRCRRQIILSHFEDKQVQKASLGIMGTEKCCDNCRSRLDHCYSMDDSEDTSWDFGPQAFKLLSAVDILGEKFGIGLPILFLRGSNSQRLADQYRRHSLFGTGKDQTESWWKAFSRQLITEGFLVEVSRYNKFMKICALTKKGRNWLHKANTESQSLILQANEELCPKKLLLPSSKTVSSGTKEHCYNQVPVELSTEKKSNLEKLYSYKPCDKISSGSNISKKSIMVQSPEKAYSSSQPVISAQEQETQIVLYGKLVEARQKHANKMDVPPAILATNKILVDMAKMRPTTVENVKRIDGVSEGKAAMLAPLLEVIKHFCQTNSVQTDLFSSTKPQEEQKTSLVAKNKICTLSQSMAITYSLFQEKKMPLKSIAESRILPLMTIGMHLSQAVKAGCPLDLERAGLTPEVQKIIADVIRNPPVNSDMSKISLIRMLVPENIDTYLIHMAIEILKHGPDSGLQPSCDVNKRRCFPGSEEICSSSKRSKEEVGINTETSSAERKRRLPVWFAKGSDTSKKLMDKTKRGGLFS

SEQ ID NO: 12590 - DNA, 4299 bp, Artificial Sequence
  derived and/or modified sequence
atgagcgagaagaagctggagaccaccgcccagcagagaaagtgccccgagtggatgaacgtgcagaacaagagatgcgccgtggaggagagaaaggcctgcgtgagaaagagcgtgttcgaggacgacctgcccttcctggagttcaccggcagcatcgtgtacagctacgacgccagcgactgcagcttcctgagcgaggacatcagcatgagcctgagcgacggcgacgtggtgggcttcgacatggagtggccccccctgtacaacagaggcaagctgggcaaggtggccctgatccagctgtgcgtgagcgagagcaagtgctacctgttccacgtgagcagcatgagcgtgttcccccagggcctgaagatgctgctggagaacaaggccgtgaagaaggccggcgtgggcatcgagggcgaccagtggaagctgctgagagacttcgacatcaagctgaagaacttcgtggagctgaccgacgtggccaacaagaagctgaagtgcaccgagacctggagcctgaacagcctggtgaagcacctgctgggcaagcagctgctgaaggacaagagcatcagatgcagcaactggagcaagttccccctgaccgaggaccagaagctgtacgccgccaccgacgcctacgccggcttcatcatctacagaaacctggagatcctggacgacaccgtgcagagattcgccatcaacaaggaggaggagatcctgctgagcgacatgaacaagcagctgaccagcatcagcgaggaggtgatggacctggccaagcacctgccccacgccttcagcaagctggagaaccccagaagagtgagcatcctgctgaaggacatcagcgagaacctgtacagcctgagaagaatgatcatcggcagcaccaacatcgagaccgagctgagacccagcaacaacctgaacctgctgagcttcgaggacagcaccaccggcggcgtgcagcagaagcagatcagagagcacgaggtgctgatccacgtggaggacgagacctgggaccccaccctggaccacctggccaagcacgacggcgaggacgtgctgggcaacaaggtggagagaaaggaggacggcttcgaggacggcgtggaggacaacaagctgaaggagaacatggagagagcctgcctgatgagcctggacatcaccgagcacgagctgcagatcctggagcagcagagccaggaggagtacctgagcgacatcgcctacaagagcaccgagcacctgagccccaacgacaacgagaacgacaccagctacgtgatcgagagcgacgaggacctggagatggagatgctgaagcacctgagccccaacgacaacgagaacgacaccagctacgtgatcgagagcgacgaggacctggagatggagatgctgaagagcctggagaacctgaacagcggcaccgtggagcccacccacagcaagtgcctgaagatggagagaaacctgggcctgcccaccaaggaggaggaggaggacgacgagaacgaggccaacgagggcgaggaggacgacgacaaggacttcctgtggcccgcccccaacgaggagcaggtgacctgcctgaagatgtacttcggccacagcagcttcaagcccgtgcagtggaaggtgatccacagcgtgctggaggagagaagagacaacgtggccgtgatggccaccggctacggcaagagcctgtgcttccagtacccccccgtgtacgtgggcaagatcggcctggtgatcagccccctgatcagcctgatggaggaccaggtgctgcagctgaagatgagcaacatccccgcctgcttcctgggcagcgcccagagcgagaacgtgctgaccgacatcaagctgggcaagtacagaatcgtgtacgtgacccccgagtactgcagcggcaacatgggcctgctgcagcagctggaggccgacatcggcatcaccctgatcgccgtggacgaggcccactgcatcagcgagtggggccacgacttcagagacagcttcagaaagctgggcagcctgaagaccgccctgcccatggtgcccatcgtggccctgaccgccaccgccagcagcagcatcagagaggacatcgtgagatgcctgaacctgagaaacccccagatcacctgcaccggcttcgacagacccaacctgtacctggaggtgagaagaaagaccggcaacatcctgcaggacctgcagcccttcctggtgaagaccagcagccactgggagttcgagggccccaccatcatctactgccccagcagaaagatgacccagcaggtgaccggcgagctgagaaagctgaacctgagctgcggcacctaccacgccggcatgagcttcagcaccagaaaggacatccaccacagattcgtgagagacgagatccagtgcgtgatcgccaccatcgccttcggcatgggcatcaacaaggccgacatcagacaggtgatccactacggcgcccccaaggacatggagagctactaccaggagatcggcagagccggcagagacggcctgcagagcagctgccacgtgctgtgggcccccgccgacatcaacctgaacagacacctgctgaccgagatcagaaacgagaagttcagactgtacaagctgaagatgatggccaagatggagaagtacctgcacagcagcagatgcagaagacagatcatcctgagccacttcgaggacaagcaggtgcagaaggccagcctgggcatcatgggcaccgagaagtgctgcgacaactgcagaagcagactggaccactgctacagcatggacgacagcgaggacaccagctgggacttcggcccccaggccttcaagctgctgagcgccgtggacatcctgggcgagaagttcggcatcggcctgcccatcctgttcctgagaggcagcaacagccagagactggccgaccagtacagaagacacagcctgttcggcaccggcaaggaccagaccgagagctggtggaaggccttcagcagacagctgatcaccgagggcttcctggtggaggtgagcagatacaacaagttcatgaagatctgcgccctgaccaagaagggcagaaactggctgcacaaggccaacaccgagagccagagcctgatcctgcaggccaacgaggagctgtgccccaagaagctgctgctgcccagcagcaagaccgtgagcagcggcaccaaggagcactgctacaaccaggtgcccgtggagctgagcaccgagaagaagagcaacctggagaagctgtacagctacaagccctgcgacaagatcagcagcggcagcaacatcagcaagaagagcatcatggtgcagagccccgagaaggcctacagcagcagccagcccgtgatcagcgcccaggagcaggagacccagatcgtgctgtacggcaagctggtggaggccagacagaagcacgccaacaagatggacgtgccccccgccatcctggccaccaacaagatcctggtggacatggccaagatgagacccaccaccgtggagaacgtgaagagaatcgacggcgtgagcgagggcaaggccgccatgctggcccccctgctggaggtgatcaagcacttctgccagaccaacagcgtgcagaccgacctgttcagcagcaccaagccccaggaggagcagaagaccagcctggtggccaagaacaagatctgcaccctgagccagagcatggccatcacctacagcctgttccaggagaagaagatgcccctgaagagcatcgccgagagcagaatcctgcccctgatgaccatcggcatgcacctgagccaggccgtgaaggccggctgccccctggacctggagagagccggcctgacccccgaggtgcagaagatcatcgccgacgtgatcagaaacccccccgtgaacagcgacatgagcaagatcagcctgatcagaatgctggtgcccgagaacatcgacacctacctgatccacatggccatcgagatcctgaagcacggccccgacagcggcctgcagcccagctgcgacgtgaacaagagaagatgcttccccggcagcgaggagatctgcagcagcagcaagagaagcaaggaggaggtgggcatcaacaccgagaccagcagcgccgagagaaagagaagactgcccgtgtggttcgccaagggcagcgacaccagcaagaagctgatggacaagaccaagagaggcggcctgttcagctag

SEQ ID NO: 12591 - DNA, 4299 bp, Artificial Sequence
  derived and/or modified sequence
atgagcgaaaaaaagcttgaaactactgcgcagcagcggaagtgcccagagtggatgaatgtgcagaataaaaggtgtgctgtcgaggaaaggaaagcctgcgttcgcaaatctgtcttcgaagatgatctgccatttttagagttcaccgggagcatcgtttattcctacgacgccagcgattgctcattcctgagcgaggatatttctatgagcctctccgacggggacgtagtcggatttgatatggagtggccccctttatacaatagaggcaagctaggaaaggtggcgttaattcagctttgtgtaagtgaatctaagtgctacctgttccacgtttcttctatgtcagtgtttccgcagggtcttaagatgctgctggagaataaggccgtaaaaaaagctggagtggggatcgagggcgatcagtggaaactcctgagggacttcgacatcaagctcaagaattttgtggaacttactgacgtcgctaacaaaaagctgaagtgtactgagacctggtctcttaattcccttgtgaagcacctcttaggaaaacagctcctgaaggacaaaagcataaggtgcagcaattggagtaagttccccctgactgaggaccagaagctatacgcagccacggacgcttatgctggtttcataatatacaggaatcttgaaattctagatgacactgtgcaacgcttcgctatcaataaagaagaagagatactcctgtccgacatgaataaacaactgacatccataagcgaggaagttatggatcttgcgaaacacctgccccacgctttcagtaaacttgagaacccccggagagtgagcatactgctcaaagacatatccgagaacctgtactctctgaggagaatgataataggatccactaatatcgagaccgaactgcgaccttccaacaacctaaacctgctgtcctttgaggacagcaccactggcggtgtacaacagaagcagatcagggaacacgaagttttaattcacgtggaggacgaaacatgggaccccacgttggatcatttggcgaaacatgacggcgaggatgttcttgggaacaaggtagaaaggaaggaggatgggttcgaggacggagtggaagataacaagctgaaggagaacatggaacgcgcctgcctgatgagtcttgacatcactgagcatgagctacagattctagaacagcagtcgcaggaggaatacctgtccgacatcgcatataaatcgaccgagcaccttagtccaaacgacaatgagaacgacacaagctatgtgatcgagagcgacgaggatctcgagatggagatgcttaagcacctcagccctaacgacaatgaaaatgacacatcctacgtgatagagtctgatgaagacttggagatggagatgcttaagtcgctggaaaatctcaattccggcacagtggagcccacacatagtaagtgtctgaagatggagcgcaatttggggctgccaaccaaagaagaggaggaggatgatgagaacgaggctaacgagggtgaagaagacgatgacaaagacttcctgtggcccgctcccaatgaggagcaggttacatgcttgaaaatgtactttggacacagcagctttaaaccagtacagtggaaagtgattcattctgtccttgaagaacgacgcgacaacgttgctgtgatggctaccgggtatgggaagagcctatgttttcaatatcccccagtctatgtgggtaaaataggcctcgttatatctccactcatttcgttgatggaagatcaggtcctgcagctgaaaatgtcgaatatcccggcctgtttcctgggctcagcccaatctgagaatgtgttgactgatatcaagctcggtaaatatcgtatcgtctatgtgacccccgaatattgcagcggaaacatggggctgttgcagcagctggaagccgacatcggaattacattgattgccgttgacgaagcccattgcatatctgagtgggggcacgactttcgcgactcttttcgcaagttggggtcgctcaagactgcccttcctatggtacccatcgtggcactgacggccactgcctctagttccattcgggaagatatcgtgcggtgtctgaatctgcgcaatcctcagatcacttgtacaggcttcgaccggccgaacctatatctggaggtgcgacgcaagactgggaacattctacaggatctccagccattcctggttaaaacttcttcgcactgggaattcgagggaccaacgatcatttactgcccttcaaggaaaatgactcagcaggtgaccggagagctcaggaaactgaacctgtcctgcgggacataccatgctgggatgtcatttagcacccggaaggatattcaccaccgcttcgtacgcgacgaaattcaatgcgtcatagccaccatcgccttcggtatgggcatcaataaggctgatatacggcaagtcatacactacggggccccaaaggatatggagtcctactaccaagagattggcagagccggcagagacggacttcagagcagttgtcacgtgctgtgggcccccgctgacatcaatcttaatagacatctccttaccgagatacgaaacgaaaaatttaggttatacaagctgaaaatgatggcaaagatggaaaaatatcttcacagctcccgatgcaggcggcagattattctgagccatttcgaagataagcaggtgcagaaggcaagtctgggtattatggggaccgagaaatgctgcgacaactgccgaagcagactcgatcactgttattctatggacgatagcgaggacactagctgggactttgggcctcaggctttcaagctgctgtctgccgtagacatccttggggaaaagtttggtattggactccctatcctgtttctgcggggttcaaactcacaacggctggccgatcagtacaggaggcactctctgttcgggacgggcaaggatcagacagagtcctggtggaaggcatttagccgtcagctaatcactgaggggtttttagtggaagtttcacgctataacaagttcatgaaaatctgcgctctgacaaagaagggccgcaactggcttcataaggccaacacggagagccaatcattaattctccaggcaaacgaagagctctgtcccaagaagctgttgcttccatcttctaagacagtgtcttcggggactaaggagcactgttacaaccaagtgcctgtcgagctcagcactgagaaaaaatcaaaccttgagaaactttactcatataagccctgtgacaagatctcctctgggtcaaatattagtaaaaagtcgatcatggtgcagtcaccagagaaggcttactcctccagccagcccgtcataagtgctcaagagcaggagacacagatcgtgctatatggcaagctagtcgaggcaaggcagaaacatgccaacaagatggacgtgcctcctgccatcctggccacgaacaaaatcctagtcgatatggccaagatgaggcctactaccgttgaaaacgtgaagcggatagatggagtgagtgaaggtaaagcggctatgctggcccctctcctggaggttatcaaacacttctgccagacaaattccgtacaaacagatcttttctccagcacaaagcctcaggaggagcagaagaccagcctggtggccaagaataaaatctgtactctttcacagtcaatggcgatcacatattcacttttccaggaaaaaaaaatgcctttgaagagcattgccgaaagcaggatactgccacttatgacaattgggatgcatttatcccaggccgtgaaggccggatgccccctggacctcgaacgggcagggctgacaccagaggtccagaagatcatagccgatgtaattcggaatcccccagtcaacagcgacatgtccaagattagtttaatccgaatgttagttccagaaaatatagacacttacttgatccacatggctatcgagattctgaagcatgggccggactccggcctgcaaccctcatgcgacgtaaacaagagaaggtgctttccagggagcgaagaaatctgtagtagcagcaagcgctccaaagaagaagtgggaatcaatactgaaaccagttctgccgagaggaaaagacgcctgcctgtgtggttcgctaaaggcagtgacaccagcaaaaaattgatggataagaccaagcggggggggttgtttagctag

SEQ ID NO: 12592 - DNA, 4299 bp, Artificial Sequence
  derived and/or modified sequence
atgtctgagaagaagctggagaccacagcccagcagaggaagtgcccagagtggatgaatgtgcagaacaagagatgtgctgtggaggagaggaaggcctgtgtgaggaagtctgtgtttgaagatgacctgcccttcctggagttcaccggcagcatcgtgtacagctatgatgccagtgactgcagcttcctgtctgaggacatctccatgagcctgagtgatggagatgtggtgggctttgacatggagtggccacccctgtacaacagaggcaagctgggcaaggtggccctgatccagctgtgtgtgtctgagagcaagtgctacctgttccacgtgtcctccatgtctgtgttcccccagggcctgaagatgctgctggagaacaaggctgtgaagaaggccggcgtgggcatcgagggggaccagtggaagctgctgcgggactttgacatcaagctgaagaactttgtggagctgacagatgtggccaacaagaagctgaagtgcacagagacctggagcctgaacagcctggtgaagcacctgctgggcaagcagctgctgaaggacaagagcatccgctgcagcaactggagcaagttccccctgacagaggaccagaagctgtatgctgccacagatgcctatgccggcttcatcatctacagaaacctggagatcctggatgacacagtgcagagatttgccatcaacaaggaggaggagatcctgctgagtgacatgaacaagcagctgaccagcatcagcgaggaggtgatggacctggccaagcacctgccccacgccttcagcaagctggagaaccccaggagagtgtccatcctgctgaaggacatcagcgagaacctgtacagcctgcggaggatgatcatcggcagcaccaacattgaaacagagctgcggcccagcaacaacctgaacctgctgagctttgaggacagcaccactggaggagtgcagcagaagcagatccgggagcacgaggtgctgattcatgtggaggatgagacctgggaccccaccctggaccacctggccaagcatgatggagaagatgtgctgggcaacaaggtggagaggaaagaagatggctttgaagatggagtggaggacaacaagctgaaggagaacatggagcgggcctgcctgatgagcctggacatcacagagcacgagctgcagatcctggagcagcagagccaggaggagtacctgagtgacatcgcctacaagagcacagagcacctgagccccaatgacaatgaaaatgacaccagctatgtgattgaaagtgatgaggacctggagatggagatgctgaagcacctgagccccaatgacaatgaaaatgacaccagctatgtgattgaaagtgatgaggacctggagatggagatgctgaagagcctggagaacctgaacagcggcaccgtggagcccacccacagcaagtgcctgaagatggagaggaacctgggcctgcccaccaaggaggaggaggaggatgatgaaaatgaggccaatgaaggagaagaagatgatgacaaggacttcctgtggccagccccaaatgaggagcaggtgacctgcctgaagatgtacttcggccacagcagcttcaagcctgtgcagtggaaggtgatccacagcgtgctggaggagcggcgggacaacgtggccgtgatggccaccggctacggcaagagcctgtgcttccagtacccacctgtgtatgtgggcaagattggcctggtgatcagccccctcatcagcctgatggaggaccaggtgctgcagctgaagatgagcaacatcccagcctgcttcctgggcagcgcccagagtgaaaatgtgctgacagacatcaagctgggcaagtaccgcatcgtgtatgtgaccccagagtactgcagcggcaacatgggcctgctgcagcagctggaggccgacatcggcatcaccctgattgctgtggatgaggcccactgcatcagcgagtggggccatgacttccgggacagcttcaggaagctgggcagcctgaagacagccctgcccatggtgcccatcgtggccctgacagccacagccagcagcagcatccgggaggacatcgtgcgctgcctgaacctgaggaacccccagatcacctgcaccggctttgaccggcccaacctgtacctggaggtgcggaggaagacaggcaacatcctgcaggacctgcagcccttcctggtgaagaccagcagccactgggagtttgagggccccaccatcatctactgccccagcaggaagatgacccagcaggtgactggagagctgaggaagctgaacctgagctgtggcacctaccacgccggcatgtccttcagcaccaggaaggacatccaccacagatttgtgagagatgagatccagtgtgtgattgccaccatcgccttcggcatgggcatcaacaaggctgacatccggcaggtgatccactatggagcccccaaggacatggagagctactaccaggagatcggccgggccggcagagatggcctgcagagcagctgccacgtgctgtgggccccagctgacatcaacctgaacagacacctgctgacagagatcagaaatgagaagttccggctgtacaagctgaagatgatggccaagatggagaagtacctgcacagcagccgctgccggcggcagatcatcctgagccactttgaggacaagcaggtgcagaaggccagcctgggcatcatgggcacagagaagtgctgtgacaactgccgcagccggctggaccactgctacagcatggatgacagcgaggacacctcctgggactttggcccccaggccttcaagctgctgtctgctgtggacatcctgggggagaagtttggaattggcctgcccatcctcttcctgcggggcagcaacagccagaggctggccgaccagtacagaagacacagcctgtttggcaccgggaaggaccagacagagagctggtggaaggccttcagccggcagctgatcacagagggcttcctggtggaggtgagccgctacaacaagttcatgaagatctgtgccctgaccaagaagggcaggaactggctgcacaaggccaacacagagagccagagcctcatcctgcaggccaatgaggagctgtgccccaagaagctgctgctgcccagcagcaagacagtgagcagcggcaccaaggagcactgctacaaccaggtgcctgtggagctgagcacagagaagaagagcaacctggagaagctgtacagctacaagccctgtgacaagatcagcagcggcagcaacatcagcaagaagagcatcatggtgcagagccctgagaaggcctacagcagcagccagcctgtgatcagcgcccaggagcaggagacccagatcgtgctgtatggcaagctggtggaggcccggcagaagcacgccaacaagatggatgtgcccccagccatcctggccaccaacaagatcctggtggacatggccaagatgaggcccaccaccgtggagaatgtgaagagaattgatggagtgtctgagggcaaggccgccatgctggcccccctgctggaggtgatcaagcacttctgccagaccaacagcgtgcagacagacctcttcagcagcaccaagccccaggaggagcagaagaccagcctggtggccaagaacaagatctgcaccctgagccagagcatggccatcacctacagcctcttccaggagaagaagatgcccctgaagagcattgctgagagccgcatcctgcccctgatgaccatcggcatgcacctgagccaggccgtgaaggccggctgccccctggacctggagcgggccggcctgaccccagaggtgcagaagatcatcgcagatgtgatcagaaatcctcctgtgaacagcgacatgagcaagatcagcctcatccgcatgctggtgcctgaaaatattgacacctacctgatccacatggccatcgagatcctgaagcacggcccagattctggcctgcagcccagctgtgatgtgaacaagaggcgctgcttccctggcagcgaggagatctgcagcagcagcaagaggagcaaggaggaggtgggcatcaacacagagaccagcagcgctgagaggaagaggcggctgcctgtgtggtttgccaagggcagtgacaccagcaagaagctgatggacaagaccaagaggggcggcctcttctcctag

SEQ ID NO: 12593 - DNA, 4299 bp, Artificial Sequence
  derived and/or modified sequence
atgagcgagaagaagctggagaccaccgcccagcagcggaagtgcccagaatggatgaatgtccagaataagagatgtgccgtcgaggagcggaaagcttgtgttagaaaatcagtgtttgaggacgatctccccttccttgaattcactgggagcatcgtttattcgtacgacgcctccgactgtagctttctctcagaagacatcagtatgagcctcagcgacggagacgtcgttggattcgatatggagtggccaccactgtataaccgcggcaagctgggcaaggtcgctctgattcagctttgcgtctcggaaagcaaatgctacctgttccatgtatcgagcatgtccgtgtttcctcagggactgaagatgctgttggagaataaagctgttaagaaagcgggagtcggaatagaaggcgaccagtggaagttgttgagagacttcgatattaaattaaagaacttcgtggagctgactgatgttgcaaataagaagttgaaatgtaccgagacatggtcactgaactctctggttaaacacctcctcggcaaacagctgctgaaggacaaaagcattaggtgttccaactggtcaaagtttcctctcacagaggaccagaagctgtatgcagccactgacgcctatgccggcttcatcatttaccggaacctcgaaatcctggatgacacagtgcaaagattcgcaataaacaaggaagaggaaattttactgagtgacatgaataagcaactgaccagcatcagcgaggaggtgatggacctcgcgaagcatttgccccacgcatttagtaagctggagaacccccgacgggtgtctatacttttgaaggatatttctgaaaatctgtacagcctgaggcgaatgataatcgggagcaccaacatcgagactgagctacgtccctctaataatctcaacttgctgtctttcgaggactctacgactgggggcgtgcagcagaagcagatcagggaacatgaggtgctgatccacgtggaagacgagacatgggacccgaccctcgaccatctcgctaagcacgacggcgaagacgtgctggggaacaaggtggaaaggaaagaagatgggttcgaggacggcgtggaggataacaagcttaaagagaatatggagcgggcctgcctaatgtcgctggatatcaccgagcatgaactgcaaatcctcgaacagcagagtcaggaggagtacctgtctgatatcgcttacaagtcaaccgagcacctgagccctaatgataacgaaaatgacacatcctatgtgattgagtctgacgaagatctggagatggagatgctcaagcatctgtcccctaatgacaatgagaatgatacgagctacgtgatagagagtgatgaagacttggagatggaaatgttgaagtccttggaaaaccttaacagcggaactgtagagccgactcattctaagtgtctaaagatggaaaggaatttgggacttcccacaaaagaggaggaagaagatgacgaaaacgaagccaacgaaggtgaggaggacgacgacaaggattttctctggcctgcgccgaacgaggaacaggtgacctgtctcaagatgtacttcggtcactcctctttcaagcctgtccaatggaaggtgatccactcggtgttggaagagcgccgggataatgtcgcggtgatggccacaggatacggaaaatctctctgtttccagtaccctccggtttatgtggggaagattggccttgtgatctctccgctcattagcctcatggaagatcaggtcttgcaactgaaaatgagtaacattcctgcgtgtttccttggctctgcccagtctgagaacgtattaaccgacatcaagctgggcaaatatagaatagtgtacgtgacaccggagtattgttccggcaatatgggattacttcagcaactggaggctgacatcggcattaccctaattgcggttgatgaggcacactgcatctccgaatggggccacgacttccgggatagctttcggaagctgggctcacttaaaacagcattacccatggtgcctatcgtcgctctgacagccaccgcatcgagcagcattcgcgaggatattgtgagatgcttgaatctgaggaatccacaaataacttgcacaggttttgacagacccaacctctacctagaagtgcgcaggaagactggcaatatcctccaggacctgcagccgttcctcgtgaaaacatccagccattgggaattcgagggtccaactatcatctattgcccctccagaaaaatgacgcagcaggtcaccggagaactgaggaaactcaacctaagctgcggaacatatcacgcagggatgtctttctcaaccaggaaagacatccaccaccgcttcgtccgggacgaaatccagtgcgtgattgctactatcgcatttggcatggggataaacaaggccgatatccgccaggttatccattacggcgcccccaaagatatggaaagctactatcaagaaatcggcagggctgggcgggatggcctgcaatcaagctgtcatgtgctctgggcgcctgctgacattaacctgaaccgccacttactgacggaaataagaaatgagaaatttagactgtataagcttaaaatgatggcaaagatggaaaagtatctgcacagtagtagatgtaggcggcagattatcctgtcccattttgaggacaagcaggtacagaaggcaagcctgggcattatggggactgagaagtgctgtgacaattgtagatcgcgtctcgatcactgttactccatggatgattcggaggataccagttgggactttggtccccaagcattcaaattgctctcagccgtggatattttaggagaaaaatttgggataggcctgcctattctcttcctgcggggctctaattctcaacgactggccgaccagtaccgacgtcatagcctgttcggcaccggcaaagaccagacagaatcttggtggaaagccttctccagacaattaatcaccgagggtttccttgtagaagtgtcacgatataacaagtttatgaaaatttgtgccctgaccaaaaagggcagaaactggctgcacaaagcgaatacagagtctcaatctctcatactgcaagccaatgaagagttgtgtcctaagaaactgttgcttccatccagcaaaaccgttagctcgggaactaaggaacattgctataaccaagtcccagtggagttaagtacagagaaaaaatccaacctggaaaagttgtactcctataagccctgtgacaaaatctcctctgggtcaaacatctcaaagaaatccataatggtgcagtcccccgagaaggcatattcttcgtctcagcccgtgatctcggcccaggagcaagaaacccaaatcgtcctatatggtaaactcgtcgaggcccggcaaaagcacgccaataaaatggacgttccccccgccatcctcgccactaacaaaattctcgtggacatggccaagatgcgcccaactactgtcgaaaacgtgaagagaattgatggagtatcagaagggaaagctgctatgttggccccactgctcgaggtgatcaagcatttctgtcagaccaacagtgtgcagaccgacctattcagctcgaccaaaccccaagaggagcagaaaactagcctcgtcgccaaaaacaagatctgtaccttatctcaatccatggccatcacctattctttgttccaagaaaagaagatgcctctcaaaagtattgccgaatctagaattctgcccttgatgaccatcggcatgcacctatcacaagccgttaaggctggttgcccattggaccttgaacgagcaggactgacaccagaggtgcagaaaattatagccgatgtgattcgaaacccgccagtaaatagtgacatgtccaagatttccctcatccggatgctggttccagagaacatcgacacatatcttatccacatggcaatcgagatcctaaagcacgggcccgacagtggcctccagcccagttgcgacgtaaataagcgcagatgctttcccgggtccgaagagatttgctccagctctaagcgcagcaaggaggaagtggggatcaataccgagacttcgagtgccgagaggaagagacgtctacccgtgtggtttgcaaagggcagcgatacctcaaagaagctcatggacaagacaaagcgagggggcctgttcagctag

SEQ ID NO: 12594 - DNA, 4299 bp, Artificial Sequence
  derived and/or modified sequence
atgtccgaaaaaaagttagagaccactgcacagcagaggaagtgtcctgaatggatgaacgttcagaataaacggtgtgccgttgaagaacgcaaggcatgtgtgcggaagagtgtgtttgaggatgatctaccttttctcgaattcacaggttctatcgtttactcatatgacgcgagtgactgctcatttctgagcgaggatattagtatgtccctgtctgatggagatgttgtcggctttgatatggagtggcctcccctgtataaccggggaaagctcggcaaagtcgcactgattcagttatgcgtctccgagtcaaagtgctacctgtttcacgtctcctctatgtctgtgtttcctcaaggcctgaagatgctgcttgaaaacaaagctgtgaagaaagctggagtcggtatcgaaggtgatcagtggaaattgctgcgagactttgacatcaagcttaagaacttcgtcgagttgacggatgtggctaataagaaacttaagtgcacggaaacgtggtcgctgaacagtctggtgaaacacttactaggcaagcaattgcttaaagataagagtatccgttgcagtaattggtcaaagttccccctcacagaagaccagaaactttacgcagcgacagacgcatacgcgggtttcattatctataggaacttggagatactcgatgataccgtgcagcgcttcgccatcaacaaggaggaggagatcctgttatcagacatgaataaacagcttacttccatttcagaggaagtgatggacctggccaaacatctcccccacgctttcagcaagctcgaaaatccacgccgtgtgtcaatcctgctcaaggacatttcagagaatctatatagcttgaggcgcatgattatcgggtccacaaacatcgaaacagagcttagacccagtaataacttgaatcttctcagctttgaggatagtactaccggtggagtacaacagaagcagattagagagcacgaggtacttatccacgtggaagatgagacatgggaccctaccttggatcacctggccaagcacgacggtgaggatgtgctcggcaacaaggtcgaaaggaaagaggacggctttgaggacggcgttgaagataacaagctgaaagagaatatggagagggcctgcctgatgagccttgatatcactgaacatgaactgcagatccttgagcagcaaagccaggaggaatacctgtccgacattgcatataaaagcactgagcacctctcgcccaatgacaacgagaatgatacatcgtacgtgatcgagtccgatgaggacctggagatggaaatgctgaagcacttgtctcccaacgataacgagaatgatacgtcctacgtcattgaatccgacgaagatctggaaatggagatgttaaagagtctcgaaaatttaaattccggtacagtagaaccgacccatagtaagtgcctcaaaatggagcggaacttgggactaccaaccaaagaggaagaagaagacgatgagaacgaggcaaatgagggcgaggaggacgacgacaaggacttcctctggccagccccaaatgaggagcaggtcacctgtctgaagatgtatttcgggcattccagtttcaagccagtccagtggaaagttattcattccgtgctggaggaaaggagagacaatgtagccgtgatggcgactggttacggcaaatcactgtgcttccagtaccccccagtctatgttggcaagattggcctggttatctcccctttgatctctctgatggaggaccaggtacttcagctcaagatgtctaatattcccgcatgtttcctgggcagtgctcagtcggagaacgtgctgaccgacataaagctcggcaagtatcgcatagtttacgtgacgccggagtattgctccgggaacatgggtctccttcagcagttagaagcagatatcgggattactctcatagccgttgacgaggcccactgtatatccgagtgggggcatgactttcgagactcgttcaggaagctaggctccctgaagacagcactgccaatggtccctatcgtagccctgactgcaaccgctagcagctccatcagagaagacattgtccgctgtcttaacctcagaaatcctcaaataacttgcactgggttcgacaggcccaatctttacttagaagtgagacgaaaaaccggtaacatcctgcaagacttgcagccttttcttgttaaaacgagttctcattgggaatttgaagggccaactatcatctattgtccctccagaaaaatgacacaacaagtaacaggagaactgcgcaagctaaatttgagttgtggaacttaccacgcagggatgtccttcagtactagaaaagacatccaccatagatttgtgcgcgatgaaatccagtgtgtgatagcaacaatcgctttcggcatgggcatcaacaaggccgacatccgccaagtcatccactacggtgcccctaaagatatggagtcctactaccaggagatcggccgtgctggcagagacggactccaatcctcgtgccacgttctatgggctccagccgacattaatttaaatagacatcttttaaccgaaattcgtaacgagaagttcagactgtataagctgaaaatgatggccaagatggagaaatacctgcattctagccggtgcaggcgacagataatcttgagccatttcgaagacaaacaggtgcagaaagccagcttgggcatcatgggtactgagaaatgctgcgacaattgtaggtcaagactcgaccattgctatagcatggacgattcagaggatacgtcttgggacttcgggccacaagcgtttaagcttttatcagcggtcgacatcttgggcgagaagttcgggatcggccttccaatcctatttcttaggggcagcaactcccagaggctggctgatcaatatagacggcatagcttgttcggaaccggcaaagaccaaactgagtcctggtggaaagccttctccaggcagctaattacggaaggatttcttgtggaggtttccagatacaacaagtttatgaagatttgtgcactgaccaagaagggccgaaactggctgcataaagcgaacaccgagtcccagtcactaatcttgcaggcgaatgaagaactttgtccaaagaaactcctcctgccctcttctaagaccgtcagtagtggcaccaaggagcattgctacaaccaggtgcctgtcgagctgtccaccgagaagaagagcaacctggagaagctctacagctataaaccatgtgacaaaatcagtagtggctcgaacataagcaagaagtctatcatggttcaatcacccgagaaagcatacagcagttcccaaccggtaatttcagctcaggaacaagaaactcagatcgttctgtatggcaagttagttgaagctaggcaaaaacatgccaacaagatggatgtgcctcccgctattttggccacgaacaaaatcctggttgacatggctaagatgcggccaactacagtcgaaaatgtgaaacgtatcgacggggtatcagagggtaaagctgccatgctcgccccacttctggaggtcatcaaacacttttgtcagacaaatagcgtgcagactgacttattcagctctacgaaaccacaagaggagcagaagaccagtctggtggctaagaataaaatctgcaccctctctcagtctatggcaatcacatatagccttttccaggagaaaaagatgcccctgaaaagcatcgcagaaagcagaattctgccccttatgacaatcggcatgcacctgtcacaggcagttaaggccggttgccctctcgacttagagcgggcagggcttacacctgaggtccaaaagattattgcggatgtcattagaaaccccccagtaaatagtgacatgagtaagatttcacttattagaatgttggtgcctgagaacatagacacatatctgattcacatggccatagagatattgaagcacgggcctgattcgggtcttcagcctagctgcgacgttaataagcgtaggtgcttccccggatcggaggagatttgcagcagctcgaagaggtctaaggaagaggtcggcatcaacacagagacttctagtgccgaaaggaagagaagactccccgtgtggttcgccaaaggatctgatacttccaagaaactgatggataagaccaagcgtggagggttatttagctag

SEQ ID NO: 12595 - DNA, 5215 bp, Artificial Sequence
  derived and/or modified sequence
ggagctgatgtgtactgtgtgcgccggggaggcgccggcttgtactcggcagcgcgggaataaagtttgctgatttggtgtctagcctggatgcctgggttgcaggccctgcttgtggtggcgctccacagtcatccggctgaagaagacctgttggactggatcttctcgggttttctttcagatattgttttgtatttacccatgaagacattgttttttggactctgcaaataggacatttcaaagatgagtgaaaaaaaattggaaacaactgcacagcagcggaaatgtcctgaatggatgaatgtgcagaataaaagatgtgctgtagaagaaagaaaggcatgtgttcggaagagtgtttttgaagatgacctccccttcttagaattcactggatccattgtgtatagttacgatgctagtgattgctctttcctgtcagaagatattagcatgagtctatcagatggggatgtggtgggatttgacatggagtggccaccattatacaatagagggaaacttggcaaagttgcactaattcagttgtgtgtttctgagagcaaatgttacttgttccacgtttcttccatgtcagtttttccccagggattaaaaatgttgcttgaaaataaagcagttaaaaaggcaggtgtaggaattgaaggagatcagtggaaacttctacgtgactttgatatcaaattgaagaattttgtggagttgacagatgttgccaataaaaagctgaaatgcacagagacctggagccttaacagtctggttaaacacctcttaggtaaacagctcctgaaagacaagtctatccgctgtagcaattggagtaaatttcctctcactgaggaccagaaactgtatgcagccactgatgcttatgctggttttattatttaccgaaatttagagattttggatgatactgtgcaaaggtttgctataaataaagaggaagaaatcctacttagcgacatgaacaaacagttgacttcaatctctgaggaagtgatggatctggctaagcatcttcctcatgctttcagtaaattggaaaacccacggagggtttctatcttactaaaggatatttcagaaaatctatattcactgaggaggatgataattgggtctactaacattgagactgaactgaggcccagcaataatttaaacttattatcctttgaagattcaactactgggggagtacaacagaaacaaattagagaacatgaagttttaattcacgttgaagatgaaacatgggacccaacacttgatcatttagctaaacatgatggagaagatgtacttggaaataaagtggaacgaaaagaagatggatttgaagatggagtagaagacaacaaattgaaagagaatatggaaagagcttgtttgatgtcgttagatattacagaacatgaactccaaattttggaacagcagtctcaggaagaatatcttagtgatattgcttataaatctactgagcatttatctcccaatgataatgaaaacgatacgtcctatgtaattgagagtgatgaagatttagaaatggagatgcttaagcatttatctcccaatgataatgaaaacgatacgtcctatgtaattgagagtgatgaagatttagaaatggagatgcttaagtctttagaaaacctcaatagtggcacggtagaaccaactcattctaaatgcttaaaaatggaaagaaatctgggtcttcctactaaagaagaagaagaagatgatgaaaatgaagctaatgaaggggaagaagatgatgataaggactttttgtggccagcacccaatgaagagcaagttacttgcctcaagatgtactttggccattccagttttaaaccagttcagtggaaagtgattcattcagtattagaagaaagaagagataatgttgctgtcatggcaactggatatggaaagagtttgtgcttccagtatccacctgtttatgtaggcaagattggccttgttatctctccccttatttctctgatggaagaccaagtgctacagcttaaaatgtccaacatcccagcttgcttccttggatcagcacagtcagaaaatgttctaacagatattaaattaggtaaataccggattgtatacgtaactccagaatactgttcaggtaacatgggcctgctccagcaacttgaggctgatattggtatcacgctcattgctgtggatgaggctcactgtatttctgagtgggggcatgattttagggattcattcaggaagttgggctccctaaagacagcactgccaatggttccaatcgttgcacttactgctactgcaagttcttcaatccgggaagacattgtacgttgcttaaatctgagaaatcctcagatcacctgtactggttttgatcgaccaaacctgtatttagaagttaggcgaaaaacagggaatatccttcaggatctgcagccatttcttgtcaaaacaagttcccactgggaatttgaaggtccaacaatcatctactgtccttctagaaaaatgacacaacaagttacaggtgaacttaggaaactgaatctatcctgtggaacataccatgcgggcatgagttttagcacaaggaaagacattcatcataggtttgtaagagatgaaattcagtgtgtcatagctaccatagcttttggaatgggcattaataaagctgacattcgccaagtcattcattacggtgctcctaaggacatggaatcatattatcaggagattggtagagctggtcgtgatggacttcaaagttcttgtcacgtcctctgggctcctgcagacattaacttaaataggcaccttcttactgagatacgtaatgagaagtttcgattatacaaattaaagatgatggcaaagatggaaaaatatcttcattctagcagatgtaggagacaaatcatcttgtctcattttgaggacaaacaagtacaaaaagcctccttgggaattatgggaactgaaaaatgctgtgataattgcaggtccagattggatcattgctattccatggatgactcagaggatacatcctgggactttggtccacaagcatttaagcttttgtctgctgtggacatcttaggcgaaaaatttggaattgggcttccaattttatttctccgaggatctaattctcagcgtcttgccgatcaatatcgcaggcacagtttatttggcactggcaaggatcaaacagagagttggtggaaggctttttcccgtcagctgatcactgagggattcttggtagaagtttctcggtataacaaatttatgaagatttgcgcccttacgaaaaagggtagaaattggcttcataaagctaatacagaatctcagagcctcatccttcaagctaatgaagaattgtgtccaaagaagttgcttctgcctagttcgaaaactgtatcttcgggcaccaaagagcattgttataatcaagtaccagttgaattaagtacagagaagaagtctaacttggagaagttatattcttataaaccatgtgataagatttcttctgggagtaacatttctaaaaaaagtatcatggtacagtcaccagaaaaagcttacagttcctcacagcctgttatttcggcacaagagcaggagactcagattgtgttatatggcaaattggtagaagctaggcagaaacatgccaataaaatggatgttcccccagctattctggcaacaaacaagatactggtggatatggccaaaatgagaccaactacggttgaaaacgtaaaaaggattgatggtgtttctgaaggcaaagctgccatgttggcccctctgttggaagtcatcaaacatttctgccaaacaaatagtgttcagacagacctcttttcaagtacaaaacctcaagaagaacagaagacgagtctggtagcaaaaaataaaatatgcacactttcacagtctatggccatcacatactctttattccaagaaaagaagatgcctttgaagagcatagctgagagcaggattctgcctctcatgacaattggcatgcacttatcccaagcggtgaaagctggctgcccccttgatttggagcgagcaggcctgactccagaggttcagaagattattgctgatgttatccgaaaccctcccgtcaactcagatatgagtaaaattagcctaatcagaatgttagttcctgaaaacattgacacgtaccttatccacatggcaattgagatccttaaacatggtcctgacagcggacttcaaccttcatgtgatgtcaacaaaaggagatgttttcccggttctgaagagatctgttcaagttctaagagaagcaaggaagaagtaggcatcaatactgagacttcatctgcagagagaaagagacgattacctgtgtggtttgccaaaggaagtgataccagcaagaaattaatggacaaaacgaaaaggggaggtctttttagttaagctggcaattaccagaacaattatgtttcttgctgtattataagaggatagctatattttatttctgaagagtaaggagtagtattttggcttaaaaatcattctaattacaaagttcactgtttattgaagaactggcatcttaaatcagccttccgcaattcatgtagtttctgggtcttctgggagcctacgtgagtacatcacctaacagaatattaaattagacttcctgtaagattgctttaagaaactgttactgtcctgttttctaatctctttattaaaacagtgtatttggaaaatgttatgtgctctgatttgatatagataacagattagtagttacatggtaattatgtgatataaaatattcatatattatcaaaattctgttttgtaaatgtaagaaagcatagttattttacaaattgtttttactgtcttttgaagaagttcttaaatacgttgttaaatggtattagttgaccagggcagtgaaaatgaaaccgcattttgggtgccattaaatagggaaaaaacatgtaaaaaatgtaaaatggagaccaattgcactaggcaagtgtatattttgtattttatatacaatttctattatttttcaagtaataaaacaatgtttttcatactgaatattatatatata

SEQ ID NO: 12596 - protein, 299 aa, Artificial Sequence [sequence omitted]

SEQ ID NO: 12597 - DNA, 4482 bp, Artificial Sequence
  derived and/or modified sequence
accttggccgggattaccctccgagttccaggccatgacaaatgacatcactcccggcccaggcttaaaatctccccatgtgaggggatgtgtttccttcagcctctgctgtctggccgctctgtctaggtcctgggccacgggagagccccgtccctcctttctgaaggccccctgacttgggcctcagtgtccccgaagatcatgatggcgtatatgaacccggggccccactattctgtcaacgccttggccctaagtggccccagtgtggatctgatgcaccaggctgtgccctacccaagcgcccccaggaagcagcggcgggagcgcaccaccttcacccggagccaactggaggagctggaggcactgtttgccaagacccagtacccagacgtctatgcccgtgaggaggtggctctgaagatcaatctgcctgagtccagggttcaggtttggttcaagaaccggagggctaaatgcaggcagcagcgacagcagcagaaacagcagcagcagcccccagggggccaggccaaggcccggcctgccaagaggaaggcgggcacgtccccaagaccctccacagatgtgtgtccagaccctctgggcatctcagattcctacagtccccctctgcccggcccctcaggctccccaaccacggcagtggccactgtgtccatctggagcccagcctcagagtcccctttgcctgaggcgcagcgggctgggctggtggcctcagggccgtctctgacctccgccccctatgccatgacctacgccccggcctccgctttctgctcttccccctccgcctatgggtctccgagctcctatttcagcggcctagacccctacctttctcccatggtgccccagctagggggcccggctcttagccccctctctggcccctccgtgggaccttccctggcccagtcccccacctccctatcaggccagagctatggcgcctacagccccgtggatagcttggaattcaaggaccccacgggcacctggaaattcacctacaatcccatggaccctctggactacaaggatcagagtgcctggaagtttcagatcttgtagaggacgcagtctccatctctctccatcgggcctcgggaccctttctcttctgaatctgcttccctgcagtttagatcccgggatggcattcctgagaaagcaacccgaaccagctgtccttctgacagctcggtgttcagcttacagagaccacccctttcctccacagggagaggctcctccctctcctgggacagctcacaggtcctagtgattctctcaaccctaacaccgtctggcacgattgtgaccgctgaagtacaccacgagctccaggcttcagaaagtggtgctgagaacttgctccaagaagaagtcaaaccaaacttgcagttgatttggggtcatgtttaggtcagaatcaccgtgcccttgaacaagcaggtaggggggcttgataacttaactttccacgtggacagaatttttttttttgttttgtttttgttttgcagacacagtctagctctgtcgcccaggctggagtgcagtggcacgatctcagctcactgcaagctctacctcccgggttcacgccattctcctgcctcagcctcccgagtagctgggactacagatgcccaccaccaggcccggctaattttttttgtatttttagtagagacggggtttcaccgtgttagccaggatggtctcgatctcctgacctcgtgatccgcccgcctcggcctcccaaagtgctaggattacaggcgtgagccaccgcgcccggcccttttttttttttttttttttaattgagacggagtctcactcttttgcttaggctggagtgcagtggtgtgatctcagctcactgactgcaacctccacctcccgggttgaagcgttgctcctgcctcaatctcccaattagctgggattacaggtgtgctccatcatgcccggctaatttttctattattagtagagacagggttttaccatgttggccaggctggtctggaacccctgacctcaagtgatccgcctgcctcggcctcccaaagtgctgggattacaggcatgagccattgtgcctggccctacacgtggacacttctttagcatatggttagggacctttctagaaattccaaagacagactttaagaagccccgtcgggaaaccttaggccaatgatgtggttacattaaaaataaattatctgggaatttcacagacttcacaaatgtcaggcttacatggtaggtttaggggaccgtttgagagacaaagatctacattcatatatgtagctatacatatatgtactttttcttcttagtttctttttaaagacattttatcactcattcgctcattagcacattgggaatgtgtgtatttggtagggaaatgaaaggcaccttgcctgttccatctctactccttttttcttttgttttaggattttctaaaggtgagacactggtggaactggggtagctgcttgggacgtaccacctatagttgtggctatttcacagagaagcagcagctagacagactcccatctgtaaataaacaagagataggaagagggggaaatagatttggaggaggcagccctacatttcaaacatacattcccttttttagatttttttttttttttttttggttttcagttttgatggtgggattggaaaatagagcttggcttgaggacattttcctggggtggcaccattatttcttgaaatagaatcttacttatggtgacactggcaagcacttgtgagaacctgaagacggattgaggtcatttgatgctcagaagttgggtgctgggtccctgccttctcagtccgagttctcctttcatttttgggtggggaggcgggttccaagagcccttcattggtggagttcacaaggcaaggtgtaaaaaaaaaagtagggcaggaagacagtggtgtgctggcagaggtctaacaatgggctctccaaggaagaggaaaaggttggttgtggagtgtttgtcagtttccgtggtgtaaatactcccaccacggctgacttcaagctagcaaccggaggtcactgaactaagagttgggaagagatagggcacaatatatgcttacgagttggtacacaccgtcagcagcagccagggtcaggagaaaggcgagatgtgaagagaggccgggaggtatcagatgacgtttccagcactagaccagaagaggtgcacacagcctagaccccctgaggggtacaccctgatctctagagcccacaaagaggtttttattcaacataaaacgtgttcatctctcataggcctgagtcatgctgggttctgggacattaagcccaggagtgggccgggtgcggtggctcacgcctgtaatcccagcactttgggaggccgaggcgggtggatcacctgaggtcaggagttcgagaccagcctggccaacatggtgaaaccctgtctctactaataatacaaaaattagccgggcatggtggcacgcgcctgtaatcccagctactcgggaggctgaggcaggagaattgctggaacccgggaggcggaggttgaagagagcagagattgtgccactgtgctctagcctgggtcacaagagcgaaactccgtctcaataataacaacaacaaaaataacccaggagtggctcaagagtccagtgtgggatgaaaatataaacagaggaagacaacatatgtcactggggaggctgggggagctagacaaaattcacacgggaggggcagggatgagacaatattgtgccctgggtctgtgcaaacgttgggaccagaatccactataagtttcattcttcggagacacggaagctctgcactggaggccgggactcaggcgtggaagagaatcttctccttattcaccggggaggctgtgtcttgtgcaaacaagtcatagaaacttgatgggagttggggagggactgaaggatgcatgcaaggttctgggaaggagtgagaagtagtgaaggccaaggggcccccatcacaggccgatggggtaagacttcgagagagcctgatcctggggtcttctgagactccaccaggagccggagagggcagggagccaaatccagctaggaggttacagattgcttttcctgggctgggctcctgagtgttggttcttccagctgtgcacaggggatttcaaacgttctacgtcctaaagccaggaagagtgacaaggcaggtggggacagaaggaagaagccaggagcctccctgagaaggtgtcaccttatctgtcctcctcttccccacacactggcctctgggtcccccttctctgtccacccacagagtgaaaccaattaaaatgttggatctcatttaaaaaaaaaaaaaaaaaa

SEQ ID NO: 12598 - DNA, 900 bp, Artificial Sequence
  derived and/or modified sequence
atgatggcctacatgaaccccggcccccactacagcgtgaacgccctggccctgagcggccccagcgtggacctgatgcaccaggccgtgccctaccccagcgcccccagaaagcagagaagagagagaaccaccttcaccagaagccagctggaggagctggaggccctgttcgccaagacccagtaccccgacgtgtacgccagagaggaggtggccctgaagatcaacctgcccgagagcagagtgcaggtgtggttcaagaacagaagagccaagtgcagacagcagagacagcagcagaagcagcagcagcagccccccggcggccaggccaaggccagacccgccaagagaaaggccggcaccagccccagacccagcaccgacgtgtgccccgaccccctgggcatcagcgacagctacagcccccccctgcccggccccagcggcagccccaccaccgccgtggccaccgtgagcatctggagccccgccagcgagagccccctgcccgaggcccagagagccggcctggtggccagcggccccagcctgaccagcgccccctacgccatgacctacgcccccgccagcgccttctgcagcagccccagcgcctacggcagccccagcagctacttcagcggcctggacccctacctgagccccatggtgccccagctgggcggccccgccctgagccccctgagcggccccagcgtgggccccagcctggcccagagccccaccagcctgagcggccagagctacggcgcctacagccccgtggacagcctggagttcaaggaccccaccggcacctggaagttcacctacaaccccatggaccccctggactacaaggaccagagcgcctggaagttccagatcctgtag

SEQ ID NO: 12599 - DNA, 900 bp, Artificial Sequence
  derived and/or modified sequence
atgatggcttacatgaatccgggcccccattattctgtgaatgccctcgcgctttctggccccagtgtcgacctaatgcaccaggcggtgccctacccttctgctccccggaaacaacgacgggaacgcacaactttcacgaggtcccagctcgaagaacttgaagccctgttcgccaaaacccagtaccccgacgtatacgcgagagaggaggtcgccctcaagattaacttgccagagtctagagtgcaggtgtggtttaagaataggagggcgaagtgcaggcagcagcgccaacagcaaaaacaacagcagcagcctcccggtggccaggcgaaggctcggcctgccaaacgaaaggccgggacatccccccgcccttcgactgacgtgtgtccagacccgcttgggatcagtgactcctattcaccacccttacccggaccttctggttctcctacgaccgccgtcgctacggtttcaatctggtcgcccgcgagtgagtcgcctctgccggaggctcaaagagctggtctggtcgcatccggcccaagcttgacatccgcaccgtacgccatgacctacgcccccgccagcgcattttgtagtagtcctagcgcttatggctctccaagttcgtacttttccggactagacccgtatctgagccccatggtaccgcaactgggcggccccgctttatctccattgtccggacccagcgtaggcccgtctctagcccagagcccgaccagcctatcagggcagtcatacggcgcatacagtcctgttgactctttggagttcaaagaccctacaggaacgtggaaattcacatacaatcccatggaccccctggattacaaggatcaatccgcatggaagtttcagatcctctag

SEQ ID NO: 12600 - DNA, 900 bp, Artificial Sequence
  derived and/or modified sequence
atgatggcctacatgaaccctggcccccactacagcgtgaatgccctggccctgagcggccccagcgtggacctgatgcaccaggccgtgccctaccccagcgcccccaggaagcagaggcgggagaggaccaccttcaccaggagccagctggaggagctggaggccctgtttgccaagacccagtacccagatgtgtatgcccgggaggaggtggccctgaagatcaacctgcctgagagccgggtgcaggtgtggttcaagaacagaagagccaagtgccggcagcagaggcagcagcagaagcagcagcagcagcccccaggcggccaggccaaggcccggcctgccaagaggaaggccggcaccagcccccggcccagcacagatgtgtgcccagaccccctgggcatcagtgacagctacagcccccccctgcccggccccagcggcagccccaccacagctgtggccaccgtgtccatctggagccctgccagcgagagccccctgcctgaggcccagagagctggcctggtggccagcggccccagcctgaccagcgccccctatgccatgacctacgccccagccagcgccttctgcagcagccccagcgcctacggcagccccagcagctacttcagcggcctggacccctacctgagccccatggtgccccagctgggcggccctgccctgagccccctgagcggccccagcgtgggccccagcctggcccagagccccaccagcctgagcggccagagctatggagcctacagccctgtggacagcctggagttcaaggaccccaccggcacctggaagttcacctacaaccccatggaccccctggactacaaggaccagagcgcctggaagttccagatcctgtag

SEQ ID NO: 12601 - DNA, 900 bp, Artificial Sequence
  derived and/or modified sequence
atgatggcctacatgaaccccggcccccactacagcgtgaacgccctagctctgtcaggtccatccgtcgacctgatgcatcaggcagtgccctatcccagcgccccccggaaacagaggcgggagagaaccacgttcacgcgaagccagctggaagagcttgaagccctcttcgccaagacccaatatccagacgtttacgctagagaggaggttgcactaaaaatcaatttgccggaatcaagagttcaggtttggttcaagaaccggcgagccaagtgtagacagcagagacagcagcagaagcaacaacagcagcccccaggcggtcaagcaaaggctcggcctgccaagcggaaagccgggaccagccctagaccctctaccgatgtgtgcccggatcccctgggaatatccgactcatattcaccgcccctgccaggtcctagcggctccccaacgaccgccgtcgctactgtatctatttggagcccagcctcagaatcaccacttcccgaggctcagagggcaggccttgtggcctccggaccgtctctgacttccgcgccatatgcgatgacatacgcgcctgctagcgccttctgttcatctccctcggcctacggcagcccttcctcatacttctcaggcctcgacccttacctcagtcccatggttccccagctgggtgggcccgcactctcacctctgagtggcccttctgtgggcccctctctggcccagtcccccaccagcctgtctggccagagctatggtgcctactctccagtcgattctttagagttcaaagatcctactggcacatggaaatttacctataacccaatggatcccttagattataaggatcagagcgcctggaaattccagatcctgtag

SEQ ID NO: 12602 - DNA, 900 bp, Artificial Sequence
  derived and/or modified sequence
atgatggcgtatatgaatcctgggcctcactattctgtgaacgctcttgcactttctggcccttcagttgatctcatgcatcaggcagtcccgtacccgtcagctcccaggaagcaacgtagggagcggactacctttacccgttctcaactcgaagaactggaagccctcttcgctaagactcagtacccggatgtttatgccagagaagaggtcgccctgaaaattaacctgcccgaatccagagttcaggtgtggttcaagaatagaagagcaaagtgtaggcagcagagacagcagcagaaacagcagcagcagccaccgggaggccaggcaaaggccagaccagccaaaagaaaggcaggcacatcgccacgaccttctacggacgtctgtcctgatccacttggaatttcagattcatattctcccccactgccgggaccttctgggtccccaaccaccgctgtagccaccgtgagtatatggtctccagcctccgagtctccactgcccgaggcgcagagagctgggctagtagctagcggcccttccctgactagcgctccttatgctatgacctatgccccagccagcgccttttgctcgtcccccagcgcttatgggtccccttcaagctatttctcaggtctggatccttatttaagccccatggtcccacagctgggcggtcctgccctcagcccgcttagcggtccgagcgtgggcccaagcttggcccagagcccaacatcattgtccggccagagctatggtgcctattctccagtcgattctttggaattcaaggatccaactggcacgtggaagtttacatataatcctatggatccattggattataaggaccaatccgcatggaaattccaaatcctctag

SEQ ID NO: 12603 - DNA, 597 bp, Artificial Sequence
  derived and/or modified sequence
agagtctcgctctgtcgcccaggctggcagcctccctagtagctgggactacaggcacctgccaccacgcctagctaattttttgtatttttttagtagagacggggtttcactgtgttagccaggtctccatctcctgacctcgtgatctgcctgcctcggcatcccaaagtgctgggattacagacagagtcttgccctgttgcccaggctggagtatagtagtgcagtggtgtgatcatagctcactgtaacttcgaccacctgggctcaaacaatccttcttcctctgcctcccaagtagctgggactacagagcaggacccaggatgcaagaccctaggcatccccaaggccttccactgtccccaggccttccaaagagacagcggcaggaccgcacaatctacaactggaaacagcaggaagtgctagaaaatcactttaaggaggaacagtacccagactatgacacacgacaagagctggcggagatgctcaatctcagggagtaccaagtgcaggtgtggttcaagaatcgccgggccaaacgctctcgggagcggtggttccagaagcagctccagcagctccaga

SEQ ID NO: 12604 - DNA, 981 bp, Artificial Sequence
  derived and/or modified sequence
atgatggcctacatgaacccgggcccacactattcagtgaatgccctggctctgagcggtcctagcgtggatctgatgcaccaggcagtgccttacccctcaccgcccttggcacttgaccctccaaggcgacagagacaggaacgcacagtatataccgagtcccagcaaaaggtcctggagttctactttcagaaggaccagtatcccaactacgaccaaagattaaacctggctgaaatgcttagcctgcgtgaacaacaactgcaggtttggttcaagaatcgcagagctaagttggctcgagaacgtaggctgcagcagcaaccccagcgcgtcccgggccagcgcggtcggggtgcccgcgcagcgcctctggtgcccgtggcagccgcctctttccccggcggaccggaattcccgcagggtcggggcagttggatctccccacagccaggcccctggggagtgcttcccgcagcagaaccaaagatttattcactgccgcgtacatggggtgggccagagtgcgggactcaggaggggcttaaggccgtgccagctcctggtccagggccaattccggcccctataccgggacctgctcagattccaggccccgtgccgggccctgcccctaacctgggccccatgtcagggccccttagcgtgagcattcctgggcctatcccggcaccaatctcatgtccaggaccaatccctgaccctgttctcggaaggactctgatgcccgggcccggatctctgccaactcccgcacctggcgctctgtggcctcagtccccctatgccagcaatctgtctcccgacacccagctgtacccagatttcacaaaactgcttccattgttggaccgatttgaggaatccagtctgagtaccacaacttcacagtacaaagaggaggatggctttgtggacaagaatcactcggtaccacgctctctcctggacctatag

SEQ ID NO: 12605 - DNA, 900 bp, Artificial Sequence
  derived and/or modified sequence
atgatggcgtatatgaacccaggcccccactacagtgtgaatgccctcgccctttccgggccgtcagtcgacctcatgcaccaggcagttccctacccttccgctccacgcaagcaacgtcgagagcgcacaacctttactagatcacaactagaggagctggaagcactgttcgcaaagacacagtaccctgacgtctacgccagagaggaagtggctctcaaaatcaatttaccggaatctagggttcaagtgtggtttaagaatagaagggccaagtgcagacagcagcggcaacagcagaagcagcagcagcagccaccaggcggccaggcaaaggctaggcccgctaagcggaaagctgggactagccctcgcccctctactgacgtctgtcccgacccgctggggatttctgattcttatagtccaccactgcctggcccatcaggtagtcctacgactgctgtggccacggtttccatatggtcacccgctagtgagtcaccccttccagaagctcagagggccggcctggtagcctccggtccttcactgacatctgccccgtatgccatgacatacgctcccgctagcgcattctgttcttccccatctgcatatggctccccttcctcatacttttctggcctcgatccttacctcagccctatggttccccaactgggaggccccgccctcagtccgctgagcggcccttcagtaggaccctccctggcccagtcgccaacgtctctcagtggccaatcctacggggcatacagccccgtggacagtctcgaattcaaggatccgactggtacttggaagtttacatacaatcctatggatcccctagattacaaagaccagtccgcgtggaagttccagattctttag

SEQ ID NO: 12606 - DNA, 900 bp, Artificial Sequence
  derived and/or modified sequence
atgatggcatatatgaacccagggccccactacagcgtgaatgcactggcgctgagcggccccagcgtcgacctgatgcaccaggccgtaccttatccttcagcccctcgcaaacagaggcgggagcggacgacatttacccggagccaactagaagaattggaggcgctgtttgcaaaaacacaataccctgacgtttatgctcgcgaggaagtggctctcaaaattaatctgcctgagtcgcgcgtacaggtgtggttcaagaatcggagagccaagtgtcgtcagcagaggcaacagcaaaaacagcagcaacaaccacccgggggccaggctaaggctcgccccgctaagaggaaggccgggacctctcctcggccttcaacagacgtgtgtccagacccactggggatttcggattcatacagtccccccctgcctggcccctcaggcagccctaccacagcagtggctacggtctcgatatggtcaccagcttccgagtcgcctctccccgaggcgcagagggcagggctcgtggcctcaggtccatccctcacatccgccccctacgcaatgacgtatgccccagccagcgctttctgttcctccccaagtgcctatgggtctcctagctcttatttctccggactggacccctacttgtcacctatggttccacagctgggcggacccgccctgtcacccctcagcggtccctctgtcggtccttctctagctcagagccctactagcctgtctgggcagagttacggggcatattcacccgtggactctctcgagttcaaggatcctacgggcacttggaagttcacatacaatcccatggaccctctggactacaaagaccaatcagcatggaaattccagatcctatag

SEQ ID NO: 12607 - DNA, 900 bp, Artificial Sequence
  derived and/or modified sequence
atgatggcctatatgaaccctggcccccactattccgtgaacgcgcttgcgctatcggggccctccgtggatctgatgcatcaagccgtgccttaccctagcgccccccgcaagcagcgaagagaaagaacaacattcacacggtctcagctggaggagctcgaggctctctttgccaaaactcagtaccctgatgtgtacgctagggaggaagttgctttgaaaatcaaccttccggaatcccgggtgcaggtatggtttaagaatcgccgggcaaagtgcagacaacaacgccagcagcagaaacagcagcagcagccaccgggcggacaagccaaggctcgaccggctaaaagaaaggctggcacttccccaaggccttccacggacgtttgtcccgatcccttaggaatttctgacagttactcaccaccattaccaggtcctagcggcagccccactaccgctgtggcaacagtgtccatatggtctcctgcctctgaaagccctcttcccgaggcccaaagagcagggcttgtggcttctgggcctagcttaacttccgccccatatgctatgacatacgctcccgcaagtgcgttttgttcatccccatccgcatacggatctccctctagctatttttctgggttggacccttatttgtcacccatggtcccacagctgggggggcccgcactgtctcccctgagtgggcctagtgtgggtccttcgctagcccagtcaccaacctccctttcaggccagagctacggggcctactctcccgtggacagtctggagttcaaggatcctacaggaacatggaagtttacgtacaatcctatggatcctctcgactacaaggaccagtctgcatggaagtttcaaatactctag

SEQ ID NO: 12608 - DNA, 981 bp, Artificial Sequence
  derived and/or modified sequence
atgatggcctacatgaaccctggcccccactacagcgtgaatgccctggccctgagcggccccagcgtggacctgatgcaccaggccgtgccctaccccagcccccccctggccctggaccccccccggcggcagaggcaggagaggacagtgtacacagagagccagcagaaggtgctggagttctacttccagaaggaccagtaccccaactatgaccagaggctgaacctggccgagatgctgagcctgcgggagcagcagctgcaggtgtggttcaagaacagaagagccaagctggcccgggagcggcggctgcagcagcagccccagagggtgcccggccagaggggccgcggggcccgggccgcccccctggtgcctgtggccgccgccagcttccctgggggccctgagttcccccagggccggggctcctggatcagcccccagcccggcccctggggcgtgctgcctgctgctgagcccaagatctacagcctgcccaggacctggggcggcccagaatgtggcacccaggagggcctgaaggctgtgcctgcccctggccctggccccatcccagcccccatccctggccctgcccagatccctggccctgtgcccggccctgcccccaacctgggccccatgagcggccccctgtctgtgtccatccctggccccatcccagcccccatcagctgccccggccccatcccagaccctgtgctgggccgcaccctgatgcctggccctggcagcctgcccaccccagcccctggggccctgtggccccagagcccctatgccagcaacctgagcccagacacccagctgtacccagacttcaccaagctgctgcccctgctggacagatttgaggagagcagcctgagcaccaccaccagccagtacaaggaggaggatggctttgtggacaagaaccacagcgtgcccaggagcctgctggacctgtag

SEQ ID NO: 12609 - DNA, 981 bp, Artificial Sequence
  derived and/or modified sequence
atgatggcctacatgaaccccggcccccactacagcgtgaacgccttggctctatctggtccaagcgttgatctgatgcaccaggcggtaccatatccttcaccgcctttggcccttgatccacccaggcgtcagaggcaggagaggaccgtgtacactgagtctcagcagaaggtcctggagttctacttccagaaggaccagtatcccaattacgatcagcggctgaacctggctgaaatgctgtccttgcgcgaacagcagctccaggtctggtttaaaaacagacgagctaaacttgcccgcgaaagacgactgcagcagcagccacagagagtccctggccagcggggacgtggcgcaagggcagcaccgctggtaccggtcgctgctgcttcttttccaggtggcccagagttcccccagggcaggggctcttggatctctcctcagccagggccctggggtgttcttccagccgccgagcctaagatctacagtcttccaagaacttgggggggaccagagtgtggaacccaagaaggccttaaggccgtgcctgcgcctggccccgggcctatacctgctcccattccaggaccagcccagatccctggccctgtccctgggccagctccaaacttggggcctatgtctggccctctttctgtgtccataccaggaccaatccccgctccgattagctgccccgggccgatccccgaccctgtcctcggaagaacgctgatgcccggacctggtagcttgccaactcctgcgcctggcgctctatggcctcagagtccgtacgcctccaacctgtcaccagacacacaattgtaccctgacttcacaaaactattgccattgctggacaggttcgaggagtcaagcttgagcacaaccacctctcaatataaggaggaggacggttttgttgacaaaaaccatagtgtgccccggtcacttctggacctgtag

SEQ ID NO: 12610 - DNA, 900 bp, Artificial Sequence
  derived and/or modified sequence
atgatggcctacatgaaccccggcccccactacagcgtgaacgccctggcgctgtcgggcccctcagtagacttgatgcatcaagctgtaccttaccccagcgcacccagaaagcaaaggcgggaacggactacatttacccggtctcaattagaggagctggaggctttatttgccaaaacccagtatcctgatgtttatgcccgggaagaggtagcactgaaaattaacctcccagaaagccgcgtgcaggtctggttcaagaacagaagagccaagtgccggcagcaacggcagcaacagaagcagcagcagcaaccccctgggggccaggccaaagcccggcccgccaagcgcaaggcagggacctctcctcggccctctaccgacgtctgtccagatcctcttgggataagtgattcctactcgccccctttacccggcccaagcggaagtccaactaccgccgtggccaccgtttccatttggagtcccgcctccgaatcaccattgcctgaggcacagcgggccgggctggttgccagcgggccaagcttgacaagcgctccctatgccatgacctacgctccagcctccgcattctgttctagcccaagtgcctacggatctccatcaagctactttagcggacttgatccttacctctcacccatggttccacagctgggaggcccagccctgtcccccctgtccgggccttcggtcggcccgtcgttggcccagtctccaacttcactgtcaggacagtcctatggggcttattctcccgtggatagcctggaatttaaagatcccactgggacctggaaattcacatacaaccccatggatcccctagactacaaggaccagtcagcctggaagttccagattctctag

SEQ ID NO: 12611 - DNA, 900 bp, Artificial Sequence
  derived and/or modified sequence
atgatggcctacatgaaccccggcccccactacagcgtgaacgccctggcactctcaggaccaagcgtagacctgatgcatcaagcagtcccttatccaagcgctcctaggaaacaaaggagggaaagaactacgtttacccggagtcagctcgaggagctggaggcactgtttgcgaaaactcagtacccggatgtctacgcacgggaggaagtggctctgaaaatcaacctgccagagagtagagtgcaggtatggtttaagaacaggagagcaaaatgcagacaacagaggcagcagcaaaagcagcagcaacaaccccctggcggccaagctaaggctagaccagcaaaaaggaaggctggcacttccccacgaccatccactgatgtgtgtccagatcctctgggcatttcagactcctatagccctccactgcccggcccatctggaagtccaacaacagcagtggccaccgtatctatctggagccctgcgtcggaatctccactccccgaggctcagcgcgcaggcctggtagccagcggcccttccctgacatccgccccctacgccatgacctatgcgcctgcatctgctttttgctcctcaccctctgcctacggatctccttcatcgtacttctcagggttagacccgtatctctcgccaatggtcccccagcttggtgggccagcactttctccactctccggcccgtccgtgggtccaagtctagcccagtcaccaacctctctgtcaggccagagttatggggcctactcccctgttgactcactcgaatttaaagatcctactggcacctggaagttcacatacaaccccatggaccctctggactacaaagaccaaagcgcctggaagtttcagatcctgtag

SEQ ID NO: 12612 - DNA, 900 bp, Artificial Sequence
  derived and/or modified sequence
atgatggcctacatgaaccccggcccccactacagcgtgaacgccctcgctctctccggcccttcagtggatctgatgcaccaagctgtgccataccccagcgctcctcggaagcaaaggagagagcggacaacatttacgaggagccaactggaggagttggaggccctgtttgccaagacacagtaccccgatgtttatgccagggaggaagttgctctgaagattaacctacctgaatctagagtgcaggtatggttcaaaaacagacgggctaaatgcagacagcagagacaacaacagaaacagcagcagcaaccgccgggggggcaagccaaagcccgacctgcgaaaaggaaggcggggacatctcctcgtccctctacggacgtgtgtcctgatcccctcggaatttcagattcatatagccccccactccctgggccatcaggcagtcccactactgccgtcgcaacagtttccatctggtcaccggcctcagaatcccccttgccagaggcacagcgcgctggtctcgtagcgagtggcccttcactgacgtcagccccttacgccatgacttatgccccggccagcgctttctgcagctctccatcagcatatggcagcccctccagctacttcagcggattggatccctacctctcaccgatggtcccacagttgggagggcccgccctctcacctttgtcgggaccctcggtcggtccctctctggcccagtctcctacatctctgagcgggcagtcctatggcgcctacagcccggtggatagtctggaatttaaagaccccaccgggacttggaaatttacatacaaccccatggacccgctggactacaaagatcagagcgcttggaagttccaaatcctgtag

SEQ ID NO: 12613 - DNA, 981 bp, Artificial Sequence
  derived and/or modified sequence
atgatggcctacatgaaccctggtccacactactctgtgaacgcactcgccctgagcgggccaagcgtcgacctcatgcaccaagccgtcccttatccttctcctccactggccctagacccccctaggagacagcgccaggaaaggaccgtttacacagaatctcagcagaaggtgctcgagttttacttccagaaagaccagtacccaaattatgaccaaagactaaacctggccgagatgctatcccttagggagcagcagttacaagtatggttcaagaatagacgggcaaaactggccagagagaggcgcctccagcagcagccgcaaagggtcccaggtcaaaggggaagaggggcaagagccgctcccctcgtgcccgtcgcagcagctagcttccctggcggacccgagttcccccagggcagaggatcctggatttcccctcagccaggcccatggggcgtcctgcctgccgcagagccaaagatctactccctgcccaggacctggggcggtcctgaatgtggtactcaggagggcctgaaggcggtcccggctccaggacctggccctatcccagcgcctatccctggcccagcccagatccctggacccgtaccaggacctgcgcctaatttgggcccaatgtcagggcctctgtccgtatctatcccaggccctattcccgctcccatcagctgtcccggaccaatccccgatcctgtattgggacgcactctgatgccgggacctgggtccctaccgacaccagcgccaggagcgctttggccccagtcgccctacgcctccaatttatctcccgacacccaactctatccagatttcacgaagctcctgcccctcctcgacagatttgaggaaagctcactgtctactacgacgagccagtataaagaagaagacggctttgtggataagaaccacagtgtacctaggagccttctggacctttag

SEQ ID NO: 12614 - DNA, 900 bp, Artificial Sequence
  derived and/or modified sequence
atgatggcgtacatgaatccgggtccgcactatagcgtcaatgcactagctctttctgggcctagtgtcgatctcatgcatcaagctgtgccctatccgtcagcgcctaggaaacagcggagggaaaggaccacttttacccgaagccagctcgaggagctcgaggccttgtttgccaaaacacagtacccagatgtgtacgctcgggaggaggtggctctaaaaatcaacctccccgagagccgggtgcaggtgtggtttaagaaccggcgagccaagtgccggcaacagcgacagcaacagaagcaacaacagcagcccccagggggacaggctaaggctaggccagccaagagaaaggcaggtactagcccccgtccgagcacagatgtttgtcccgatcccctgggcatcagtgactcatactcccccccactgcccggtccaagcgggtctccgacaactgcagtagccacagtatctatctggagtcccgcaagtgagtccccactgccggaggcccagagagccggattggtggcaagcgggccatctctcacttctgctccatatgctatgacttatgcacccgcatctgcgttctgctcttctccctcggcctatggaagtccttcatcatacttctccgggctcgacccgtacttgtctccaatggtgcctcagttgggcggacccgctctgtcacctctcagcggaccttcggtaggaccttccctggcccagagccctacctcactgtcagggcaaagttatggcgcatatagtccagtagactcactggaattcaaggatcccacgggaacttggaaattcacatataatcctatggatccgctcgattacaaggaccaatctgcatggaagttccagatactttag

SEQ ID NO: 12615 - DNA, 900 bp, Artificial Sequence
  derived and/or modified sequence
atgatggcctatatgaaccccggaccccattacagtgtgaatgccttggctctcagcggaccaagtgtggacctgatgcaccaagcagtgccttaccccagcgctccacggaagcagaggagagagaggacaaccttcacccggtctcagttggaagagttggaggcactttttgctaagactcaatatcctgacgtatacgcacgtgaagaggtcgccctgaaaattaatctccctgaatcaagggtccaagtgtggttcaaaaacagacgagctaagtgccgccagcagcggcagcagcagaagcaacagcaacagcctcccggaggccaggccaaggcacgtcctgccaaaaggaaggcagggacctcaccccgaccctccacagatgtttgccctgatccactgggaattagtgattcttattcccctccactcccaggcccttccggctctccaaccactgcagttgccacagtgtcaatttggagccccgcatcagagtcccccctgcctgaggcacagagggctgggctcgttgccagcgggccaagtctgacttccgccccttacgctatgacttacgcacctgcctcagccttttgcagctccccaagcgcatacgggagtccatcctcctacttttccggactggacccatacttgtctccaatggttccacagctggggggacccgcactttcaccccttagtgggccatccgtgggcccttctctagcacagtcacctacctcactaagtgggcagtcctacggcgcttacagccccgtggactctctggaatttaaagacccaacaggaacttggaagtttacatacaatccaatggatccccttgattacaaggaccagtccgcttggaaattccagattctgtag

SEQ ID NO: 12616 - DNA, 900 bp, Artificial Sequence
  derived and/or modified sequence
atgatggcctacatgaatcccggtccgcattacagcgtgaatgcactggcactctccggaccatctgttgacctgatgcatcaggccgtgccgtatccctccgcccctcggaagcaacgaagggaacggaccacctttaccagatctcaactagaggaactcgaggctctgttcgcgaaaacacaatacccagacgtctacgctagagaagaagtggcgctcaagatcaacctccccgaatctagagttcaagtttggtttaaaaatcggagagcaaaatgccggcagcagagacaacagcagaaacagcaacaacagccacctggaggccaggccaaggccagacctgccaaaagaaaggctggaacttctcctagaccatccactgacgtctgtcccgatcccctgggcatctctgattcatacagcccacctctgccaggtccatctggatcacctactaccgcagtagcaacagtgtcgatctggtctccggctagcgagagccctcttcccgaagcacaacgtgcgggtctggtagcctccggcccatctcttaccagcgctccctacgctatgacatatgccccagcgtccgccttttgttcgagcccctccgcctacggctctccatcaagttattttagcgggctggatccctatttatccccaatggtcccccagcttggcggaccggctctgagcccgctatccggcccttccgttggtccatcactggctcagagccccacatctctctcgggacagagttacggtgcttattctccagtcgattctctggagtttaaggaccctaccggcacatggaaatttacttacaaccctatggacccgctggactacaaggaccagtcagcctggaaattccagatcctgtag

SEQ ID NO: 12617 - DNA, 4814 bp, Artificial Sequence
  derived and/or modified sequence
ccaccttggccgggattaccctccgagttccaggccatgacaaatgacatcactcccggcccaggcttaaaatctccccatgtgaggggatgtgtttccttcagcctctgctgtctggccgctctgtctaggtcctgggccacgggagagccccgtccctcctttctgaaggccccctgacttgggcctcagtgtccccgaagatcatgatggcgtatatgaacccggggccccactattctgtcaacgccttggccctaagtggccccagtgtggatctgatgcaccaggctgtgccctacccaagcgcccccaggaagcagcggcgggagcgcaccaccttcacccggagccaactggaggagctggaggcactgtttgccaagacccagtacccagacgtctatgcccgtgaggaggtggctctgaagatcaatctgcctgagtccagggttcaggtttggttcaagaaccggagggctaaatgcaggcagcagcgacagcagcagaaacagcagcagcagcccccagggggccaggccaaggcccggcctgccaagaggaaggcgggcacgtccccaagaccctccacagatgtgtgtccagaccctctgggcatctcagattcctacagtccccctctgcccggcccctcaggctccccaaccacggcagtggccactgtgtccatctggagcccagcctcagagtcccctttgcctgaggcgcagcgggctgggctggtggcctcagggccgtctctgacctccgccccctatgccatgacctacgccccggcctccgctttctgctcttccccctccgcctatgggtctccgagctcctatttcagcggcctagacccctacctttctcccatggtgccccagctagggggcccggctcttagccccctctctggcccctccgtgggaccttccctggcccagtcccccacctccctatcaggccagagctatggcgcctacagccccgtggatagcttggaattcaaggaccccacgggcacctggaaattcacctacaatcccatggaccctctggactacaaggatcagagtgcctggaagtttcagatcttgtagaggacgcagtctccatctctctccatcgggcctcgggaccctttctcttctgaatctgcttccctgcagtttagatcccgggatggcattcctgagaaagcaacccgaaccagctgtccttctgacagctcggtgttcagcttacagagaccacccctttcctccacagggagaggctcctccctctcctgggacagctcacaggtcctagtgattctctcaaccctaacaccgtctggcacgattgtgaccgctgaagtacaccacgagctccaggcttcagaaagtggtgctgagaacttgctccaagaagaagtcaaaccaaacttgcagttgatttggggtcatgtttaggtcagaatcaccgtgcccttgaacaagcaggtaggggggcttgataacttaactttccacgtggacagaatttttttttttgttttgtttttgttttgcagacacagtctagctctgtcgcccaggctggagtgcagtggcacgatctcagctcactgcaagctctacctcccgggttcacgccattctcctgcctcagcctcccgagtagctgggactacagatgcccaccaccaggcccggctaattttttttgtatttttagtagagacggggtttcaccgtgttagccaggatggtctcgatctcctgacctcgtgatccgcccgcctcggcctcccaaagtgctaggattacaggcgtgagccaccgcgcccggcccttttttttttttttttttttaattgagacggagtctcactcttttgcttaggctggagtgcagtggtgtgatctcagctcactgactgcaacctccacctcccgggttgaagcgttgctcctgcctcaatctcccaattagctgggattacaggtgtgctccatcatgcccggctaatttttctattattagtagagacagggttttaccatgttggccaggctggtctggaacccctgacctcaagtgatccgcctgcctcggcctcccaaagtgctgggattacaggcatgagccattgtgcctggccctacacgtggacacttctttagcatatggttagggacctttctagaaattccaaagacagactttaagaagccccgtcgggaaaccttaggccaatgatgtggttacattaaaaataaattatctgggaatttcacagacttcacaaatgtcaggcttacatggtaggtttaggggaccgtttgagagacaaagatctacattcatatatgtagctatacatatatgtactttttcttcttagtttctttttaaagacattttatcactcattcgctcattagcacattgggaatgtgtgtatttggtagggaaatgaaaggcaccttgcctgttccatctctactccttttttcttttgttttaggattttctaaaggtgagacactggtggaactggggtagctgcttgggacgtaccacctatagttgtggctatttcacagagaagcagcagctagacagactcccatctgtaaataaacaagagataggaagagggggaaatagatttggaggaggcagccctacatttcaaacatacattcccttttttagatttttttttttttttttttggttttcagttttgatggtgggattggaaaatagagcttggcttgaggacattttcctggggtggcaccattatttcttgaaatagaatcttacttatggtgacactggcaagcacttgtgagaacctgaagacggattgaggtcatttgatgctcagaagttgggtgctgggtccctgccttctcagtccgagttctcctttcatttttgggtggggaggcgggttccaagagcccttcattggtggagttcacaaggcaaggtgtaaaaaaaaaagtagggcaggaagacagtggtgtgctggcagaggtctaacaatgggctctccaaggaagaggaaaaggttggttgtggagtgtttgtcagtttccgtggtgtaaatactcccaccacggctgacttcaagctagcaaccggaggtcactgaactaagagttgggaagagatagggcacaatatatgcttacgagttggtacacaccgtcagcagcagccagggtcaggagaaaggcgagatgtgaagagaggccgggaggtatcagatgacgtttccagcactagaccagaagaggtgcacacagcctagaccccctgaggggtacaccctgatctctagagcccacaaagaggtttttattcaacataaaacgtgttcatctctcataggcctgagtcatgctgggttctgggacattaagcccaggagtgggccgggtgcggtggctcacgcctgtaatcccagcactttgggaggccgaggcgggtggatcacctgaggtcaggagttcgagaccagcctggccaacatggtgaaaccctgtctctactaataatacaaaaattagccgggcatggtggcacgcgcctgtaatcccagctactcgggaggctgaggcaggagaattgctggaacccgggaggcggaggttgaagagagcagagattgtgccactgtgctctagcctgggtcacaagagcgaaactccgtctcaataataacaacaacaaaaataacccaggagtggctcaagagtccagtgtgggatgaaaatataaacagaggaagacaacatatgtcactggggaggctgggggagctagacaaaattcacacgggaggggcagggatgagacaatattgtgccctgggtctgtgcaaacgttgggaccagaatccactataagtttcattcttcggagacacggaagctctgcactggaggccgggactcaggcgtggaagagaatcttctccttattcaccggggaggctgtgtcttgtgcaaacaagtcatagaaacttgatgggagttggggagggactgaaggatgcatgcaaggttctgggaaggagtgagaagtagtgaaggccaaggggcccccatcacaggccgatggggtaagacttcgagagagcctgatcctggggtcttctgagactccaccaggagccggagagggcagggagccaaatccagctaggaggttacagattgcttttcctgggctgggctcctgagtgttggttcttccagctgtgcacaggggatttcaaacgttctacgtcctaaagccaggaagagtgacaaggcaggtggggacagaaggaagaagccaggagcctccctgagaaggtgtcaccttatctgtcctcctcttccccacacactggcctctgggtcccccttctctgtccacccacagagtgaaaccaattaaaatgttggatctcatttaaagtctgggtgattctttagtttccgtgttttctccaggaggggcaggtagaaacaggaactactctgttccttctgtctgtggggcctgggtccctccatgtgtttcctgtctcatcaccctcctttccttgacatctctctaaagccaatttatgaaggatcaggggctgggtgcagtggctcacgcatgtaatccagtgctctgagaagctgaggagggaagattgattaaggccaggagtttgagaccagcccaggcaacatagcgagatctctgtctctacaaaaaattaaaaaaatcaaccgggtgtggtgatgtgtgcctgtggtcccagctactcggga

SEQ ID NO: 12618 - DNA, 981 bp, Artificial Sequence
  derived and/or modified sequence
atgatggcgtatatgaacccggggccccactattctgtcaacgccttggccctaagtggccccagtgtggatctgatgcaccaggctgtgccctacccaagccctcccctggccctggaccctccaaggagacagcggcaggagcgcacggtctacactgaaagccagcagaaagtgctagaattttactttcagaaggaccagtacccgaactacgaccagcgactgaatctggcggagatgctcagcctcagggagcaacagctgcaggtgtggttcaagaatcgccgcgccaaactagctcgggagcggcggctccagcagcagccccagcgcgtccctgggcagagaggccgaggagcccgcgctgcgcccctagtccctgtagccgctgcctccttccctgggggtcctgagttcccgcagggcaggggttcctggatctcccctcagccgggcccctggggagtcctcccagcagcagaaccgaagatctacagcctcccccggacctggggtggccctgagtgtggaacacaggagggcctcaaggctgtcccggctccaggccctggcccaatcccagcccctatcccaggcccagcccagatcccaggcccagtcccaggcccagccccgaatttaggcccaatgtcaggcccactgtcagtctcgatccccggtccaataccagcccccatctcttgcccaggcccaatcccagacccagtcctaggccgaaccctgatgccaggcccaggatcactcccaaccccagccccaggcgccttgtggcctcagagcccctatgcctccaacttgtcgccagacacccagttataccctgacttcaccaagctgctcccgctcctagaccggttcgaggaatcctcactctccaccacgacgtctcagtacaaagaggaggatggcttcgtggacaaaaatcactcagtccccaggtcattactggatttatag

SEQ ID NO: 12619 - DNA, 2275 bp, Artificial Sequence
  derived and/or modified sequence
taaaatctccccatgtgaggggatgtgtttccttcagcctctgctgtctggccgctctgtctaggtcctgggccacgggagagccccgtccctcctttctgaaggccccctgacttgggcctcagtgtccccgaagatcatgatggcgtatatgaacccggggccccactattctgtcaacgccttggccctaagtggccccagtgtggatctgatgcaccaggctgtgccctacccaagcgcccccaggaagcagcggcgggagcgcaccaccttcacccggagccaactggaggagctggaggcactgtttgccaagacccagtacccagacgtctatgcccgtgaggaggtggctctgaagatcaatctgcctgagtccagggttcaggtttggttcaagaaccggagggctaaatgcaggcagcagcgacagcagcagaaacagcagcagcagcccccagggggccaggccaaggcccggcctgccaagaggaaggcgggcacgtccccaagaccctccacagatgtgtgtccagaccctctgggcatctcagattcctacagtccccctctgcccggcccctcaggctccccaaccacggcagtggccactgtgtccatctggagcccagcctcagagtcccctttgcctgaggcgcagcgggctgggctggtggcctcagggccgtctctgacctccgccccctatgccatgacctacgccccggcctccgctttctgctcttccccctccgcctatgggtctccgagctcctatttcagcggcctagacccctacctttctcccatggtgccccagctagggggcccggctcttagccccctctctggcccctccgtgggaccttccctggcccagtcccccacctccctatcaggccagagctatggcgcctacagccccgtggatagcttggaattcaaggaccccacgggcacctggaaattcacctacaatcccatggaccctctggactacaaggatcagagtgcctggaagtttcagatcttgtagaggacgcagtctccatctctctccatcgggcctcgggaccctttctcttctgaatctgcttccctgcagtttagatcccgggatggcattcctgagaaagcaacccgaaccagctgtccttctgacagctcggtgttcagcttacagagaccacccctttcctccacagggagaggctcctccctctcctgggacagctcacaggtcctagtgattctctcaaccctaacaccgtctggcacgattgtgaccgctgaagtacaccacgagctccaggcttcagaaagtggtgctgagaacttgctccaagaagaagtcaaaccaaacttgcagttgatttggggtcatgtttaggtcagaatcaccgtgcccttgaacaagcaggtaggggggcttgataacttaactttccacgtggacagaatttttttttttgttttgtttttgttttgcagacacagtctagcctgggtcacaagagcgaaactccgtctcaataataacaacaacaaaaataacccaggagtggctcaagagtccagtgtgggatgaaaatataaacagaggaagacaacatatgtcactggggaggctgggggagctagacaaaattcacacgggaggggcagggatgagacaatattgtgccctgggtctgtgcaaacgttgggaccagaatccactataagtttcattcttcggagacacggaagctctgcactggaggccgggactcaggcgtggaagagaatcttctccttattcaccggggaggctgtgtcttgtgcaaacaagtcatagaaacttgatgggagttggggagggactgaaggatgcatgcaaggttctgggaaggagtgagaagtagtgaaggccaaggggcccccatcacaggccgatggggtaagacttcgagagagcctgatcctggggtcttctgagactccaccaggagccggagagggcagggagccaaatccagctaggaggttacagattgcttttcctgggctgggctcctgagtgttggttcttccagctgtgcacaggggatttcaaacgttctacgtcctaaagccaggaagagtgacaaggcaggtggggacagaaggaagaagccaggagcctccctgagaaggtgtcaccttatctgtcctcctcttccccacacactggcctctgggtcccccttctctgtccacccacagagtgaaaccaattaaaatgttggatctc

SEQ ID NO: 12620 - DNA, 2276 bp, Artificial Sequence
  derived and/or modified sequence
taaaatctccccatgtgaggggatgtgtttccttcagcctctgctgtctggccgctctgtctaggtcctgggccacgggagagccccgtccctcctttctgaaggccccctgacttgggcctcagtgtccccgaagatcatgatggcgtatatgaacccggggccccactattctgtcaacgccttggccctaagtggccccagtgtggatctgatgcaccaggctgtgccctacccaagcgcccccaggaagcagcggcgggagcgcaccaccttcacccggagccaactggaggagctggaggcactgtttgccaagacccagtacccagacgtctatgcccgtgaggaggtggctctgaagatcaatctgcctgagtccagggttcaggtttggttcaagaaccggagggctaaatgcaggcagcagcgacagcagcagaaacagcagcagcagcccccagggggccaggccaaggcccggcctgccaagaggaaggcgggcacgtccccaagaccctccacagatgtgtgtccagaccctctgggcatctcagattcctacagtccccctctgcccggcccctcaggctccccaaccacggcagtggccactgtgtccatctggagcccagcctcagagtcccctttgcctgaggcgcagcgggctgggctggtggcctcagggccgtctctgacctccgccccctatgccatgacctacgccccggcctccgctttctgctcttccccctccgcctatgggtctccgagctcctatttcagcggcctagacccctacctttctcccatggtgccccagctagggggcccggctcttagccccctctctggcccctccgtgggaccttccctggcccagtcccccacctccctatcaggccagagctatggcgcctacagccccgtggatagcttggaattcaaggaccccacgggcacctggaaattcacctacaatcccatggaccctctggactacaaggatcagagtgcctggaagtttcagatcttgtagaggacgcagtctccatctctctccatcgggcctcgggaccctttctcttctgaatctgcttccctgcagtttagatcccgggatggcattcctgagaaagcaacccgaaccagctgtccttctgacagctcggtgttcagcttacagagaccacccctttcctccacagggagaggctcctccctctcctgggacagctcacaggtcctagtgattctctcaaccctaacaccgtctggcacgattgtgaccgctgaagtacaccacgagctccaggcttcagaaagtggtgctgagaacttgctccaagaagaagtcaaaccaaacttgcagttgatttggggtcatgtttaggtcagaatcaccgtgcccttgaacaagcaggtaggggggcttgataacttaactttccacgtggacagaatttttttttttgttttgtttttattgtgccactgtgctctagcctgggtcacaagagcgaaactccgtctcaataataacaacaacaaaaataacccaggagtggctcaagagtccagtgtgggatgaaaatataaacagaggaagacaacatatgtcactggggaggctgggggagctagacaaaattcacacgggaggggcagggatgagacaatattgtgccctgggtctgtgcaaacgttgggaccagaatccactataagtttcattcttcggagacacggaagctctgcactggaggccgggactcaggcgtggaagagaatcttctccttattcaccggggaggctgtgtcttgtgcaaacaagtcatagaaacttgatgggagttggggagggactgaaggatgcatgcaaggttctgggaaggagtgagaagtagtgaaggccaaggggcccccatcacaggccgatggggtaagacttcgagagagcctgatcctggggtcttctgagactccaccaggagccggagagggcagggagccaaatccagctaggaggttacagattgcttttcctgggctgggctcctgagtgttggttcttccagctgtgcacaggggatttcaaacgttctacgtcctaaagccaggaagagtgacaaggcaggtggggacagaaggaagaagccaggagcctccctgagaaggtgtcaccttatctgtcctcctcttccccacacactggcctctgggtcccccttctctgtccacccacagagtgaaaccaattaaaatgttggatctca

SEQ ID NO: 12621 - DNA, 2241 bp, Artificial Sequence
  derived and/or modified sequence
ggccgctctgtctaggtcctgggccacgggagagccccgtccctcctttctgaaggccccctgacttgggcctcagtgtccccgaagatcatgatggcgtatatgaacccggggccccactattctgtcaacgccttggccctaagtggccccagtgtggatctgatgcaccaggctgtgccctacccaagcgcccccaggaagcagcggcgggagcgcaccaccttcacccggagccaactggaggagctggaggcactgtttgccaagacccagtacccagacgtctatgcccgtgaggaggtggctctgaagatcaatctgcctgagtccagggttcaggtttggttcaagaaccggagggctaaatgcaggcagcagcgacagcagcagaaacagcagcagcagcccccagggggccaggccaaggcccggcctgccaagaggaaggcgggcacgtccccaagaccctccacagatgtgtgtccagaccctctgggcatctcagattcctacagtccccctctgcccggcccctcaggctccccaaccacggcagtggccactgtgtccatctggagcccagcctcagagtcccctttgcctgaggcgcagcgggctgggctggtggcctcagggccgtctctgacctccgccccctatgccatgacctacgccccggcctccgctttctgctcttccccctccgcctatgggtctccgagctcctatttcagcggcctagacccctacctttctcccatggtgccccagctagggggcccggctcttagccccctctctggcccctccgtgggaccttccctggcccagtcccccacctccctatcaggccagagctatggcgcctacagccccgtggatagcttggaattcaaggaccccacgggcacctggaaattcacctacaatcccatggaccctctggactacaaggatcagagtgcctggaagtttcagatcttgtagaggacgcagtctccatctctctccatcgggcctcgggaccctttctcttctgaatctgcttccctgcagtttagatcccgggatggcattcctgagaaagcaacccgaaccagctgtccttctgacagctcggtgttcagcttacagagaccacccctttcctccacagggagaggctcctccctctcctgggacagctcacaggtcctagtgattctctcaaccctaacaccgtctggcacgattgtgaccgctgaagtacaccacgagctccaggcttcagaaagtggtgctgagaacttgctccaagaagaagtcaaaccaaacttgcagttgatttggggtcatgtttaggtcagaatcaccgtgcccttgaacaagcaggtaggggggcttgataacttaactttccacgtggacagaatttttttttttgttttgtttttgttttgcagacacaattgtgccactgtgctctagcctgggtcacaagagcgaaactccgtctcaataataacaacaacaaaaataacccaggagtggctcaagagtccagtgtgggatgaaaatataaacagaggaagacaacatatgtcactggggaggctgggggagctagacaaaattcacacgggaggggcagggatgagacaatattgtgccctgggtctgtgcaaacgttgggaccagaatccactataagtttcattcttcggagacacggaagctctgcactggaggccgggactcaggcgtggaagagaatcttctccttattcaccggggaggctgtgtcttgtgcaaacaagtcatagaaacttgatgggagttggggagggactgaaggatgcatgcaaggttctgggaaggagtgagaagtagtgaaggccaaggggcccccatcacaggccgatggggtaagacttcgagagagcctgatcctggggtcttctgagactccaccaggagccggagagggcagggagccaaatccagctaggaggttacagattgcttttcctgggctgggctcctgagtgttggttcttccagctgtgcacaggggatttcaaacgttctacgtcctaaagccaggaagagtgacaaggcaggtggggacagaaggaagaagccaggagcctccctgagaaggtgtcaccttatctgtcctcctcttccccacacactggcctctgggtcccccttctctgtccacccacagagtgaaaccaattaaaatgttggatctca

SEQ ID NO: 12622 - DNA, 981 bp, Artificial Sequence
  derived and/or modified sequence
atgatggcctacatgaaccccggcccccactacagcgtgaacgccctggccctgagcggccccagcgtggacctgatgcaccaggccgtgccctaccccagcccccccctggccctggacccccccagaagacagagacaggagagaaccgtgtacaccgagagccagcagaaggtgctggagttctacttccagaaggaccagtaccccaactacgaccagagactgaacctggccgagatgctgagcctgagagagcagcagctgcaggtgtggttcaagaacagaagagccaagctggccagagagagaagactgcagcagcagccccagagagtgcccggccagagaggcagaggcgccagagccgcccccctggtgcccgtggccgccgccagcttccccggcggccccgagttcccccagggcagaggcagctggatcagcccccagcccggcccctggggcgtgctgcccgccgccgagcccaagatctacagcctgcccagaacctggggcggccccgagtgcggcacccaggagggcctgaaggccgtgcccgcccccggccccggccccatccccgcccccatccccggccccgcccagatccccggccccgtgcccggccccgcccccaacctgggccccatgagcggccccctgagcgtgagcatccccggccccatccccgcccccatcagctgccccggccccatccccgaccccgtgctgggcagaaccctgatgcccggccccggcagcctgcccacccccgcccccggcgccctgtggccccagagcccctacgccagcaacctgagccccgacacccagctgtaccccgacttcaccaagctgctgcccctgctggacagattcgaggagagcagcctgagcaccaccaccagccagtacaaggaggaggacggcttcgtggacaagaaccacagcgtgcccagaagcctgctggacctgtag

SEQ ID NO: 12623 - protein, 441 aa, Artificial Sequence
  derived and/or modified sequence
MKTLPLHSHCTEMQRLLPKLEMLTLGSSFCSLQGEFCQAMDSFTTVSHVGMCEETDASFNVFSPKFQFDRSHCQSLRFHQNMELDFGHFDERDKTSRNMRGSRMNGLPSPTHSAHCSFYRTRTLQALSNEKKAKKVRFYRNGDRYFKGIVYAVSSDRFRSFDALLADLTRSLSDNINLPQGVRYIYTIDGSRKIGSMDELEEGESYVCSSDNFFKKVEYTKNVNPNWSVNVKTSANMKAPQSLASSNSAQARENKDFVRPKLVTIIRSGVKPRKAVRVLLNKKTAHSFEQVLTDITEAIKLETGVVKKLYTLDGKQVTCLHDFFGDDDVFIACGPEKFRYAQDDFSLDENECRVMKGNPSATAGPKASPTPQKTSAKSPGPMRRSKSPADSANGTSSSQLSTPKSKQSPISTPTSPGSLRKHKDLYLPLSLDDSDSLGDSM

SEQ ID NO: 12624 - protein, 438 aa, Artificial Sequence
  derived and/or modified sequence
  misc_feature (1)..(1): Xaa can be any naturally occurring amino acid
XCTEMQRLLPKLEMLTLGSSFCSLQGEFCQAMDSFTTVSHVGMCEETDASFNVFSPKFQFDRSHCQSLRFHQNMELDFGHFDERDKTSRNMRGSRMNGLPSPTHSAHCSFYRTRTLQALSNEKKAKKVRFYRNGDRYFKGIVYAVSSDRFRSFDALLADLTRSLSDNINLPQGVRYIYTIDGSRKIGSMDELEEGESYVCSSDNFFKKVEYTKNVNPNWSVNVKTSANMKAPQSLASSNSAQARENKDFVRPKLVTIIRSGVKPRKAVRVLLNKKTAHSFEQVLTDITEAIKLETGVVKKLYTLDGKQVTCLHDFFGDDDVFIACGPEKFRYAQDDFSLDENECRVMKGNPSATAGPKASPTPQKTSAKSPGPMRRSKSPADSGNDQDANGTSSSQLSTPKSKQSPISTPTSPGSLRKHKDLYLPLSLDDSDSLGDSM

SEQ ID NO: 12625 - protein, 360 aa, Artificial Sequence
  derived and/or modified sequence
MELDFGHFDERDKTSRNMRGSRMNGLPSPTHSAHCSFYRTRTLQALSNEKKAKKVRFYRNGDRYFKGIVYAVSSDRFRSFDALLADLTRSLSDNINLPQGVRYIYTIDGSRKIGSMDELEEGESYVCSSDNFFKKVEYTKNVNPNWSVNVKTSANMKAPQSLASSNSAQARENKDFVRPKLVTIIRSGVKPRKAVRVLLNKKTAHSFEQVLTDITEAIKLETGVVKKLYTLDGKQVTCLHDFFGDDDVFIACGPEKFRYAQDDFSLDENECRVMKGNPSATAGPKASPTPQKTSAKSPGPMRRSKSPADSANGTSSSQLSTPKSKQSPISTPTSPGSLRKHKDLYLPLSLDDSDSLGDSM

SEQ ID NO: 12626 - DNA, 1326 bp, Artificial Sequence
  derived and/or modified sequence
atgaagaccctaccattgcattcacactgcacagagatgcaaaggctgctccccaagctggagatgcttaccctgggttctagcttttgtagtctccaaggcgagttctgtcaagctatggactcgtttacaaccgtctcacatgtggggatgtgtgaagaaacggacgcatcatttaacgtgttcagccctaagtttcaatttgacaggagccattgccagtccctgagatttcaccagaacatggagctggattttggtcattttgacgaaagggataagacttcgagaaatatgcggggatctagaatgaacggtcttccatctcctacacacagtgcacactgcagcttctatcgtacacggactttgcaagccctcagcaatgaaaaaaaggccaagaaggtgcgattctaccgaaacggagatcggtatttcaagggcatagtctacgcggtgtcatcagatcgctttcgtagtttcgacgcactgctcgctgacctgacccgatctctaagcgataacataaacctaccccagggcgtgcgctacatttacacgatcgatggttctcgcaaaattggttcaatggacgagctggaggagggcgagagttatgtgtgctcaagtgataattttttcaaaaaagtggaatacaccaaaaacgtgaaccctaactggtctgtgaacgtgaagacttctgccaatatgaaggccccacagagcttggcaagctccaacagtgcccaagcgcgagagaataaggattttgtccgaccgaaactagtcaccattatccgctcaggggtgaagcctaggaaggcggttcgggtgttactgaataaaaagacagcccactcctttgaacaggtgctgactgatatcactgaggccataaaacttgaaaccggggtggtcaagaagctttataccctggatggaaaacaggtcacatgtctgcacgatttcttcggcgatgatgatgtctttattgcatgtggtccagaaaagttcaggtacgcgcaagacgacttttctctggatgagaacgagtgtcgcgttatgaagggaaaccctagcgccaccgccgggcctaaggcctcaccaaccccccaaaagacctctgcgaaaagccctggccctatgcgccgatccaagtcccctgcagactctgcaaacggtacatcctctagccagcttagcacgcctaaatcgaaacagtccccaatttctacccccacctcccccgggtccctcaggaaacacaaggatttgtacctgcccctatcccttgatgattcagacagtctgggagatagcatgtag

SEQ ID NO: 12627 - DNA, 1317 bp, Artificial Sequence
  derived and/or modified sequence
tgatgcaccgagatgcagagacttctgccaaaactggaaatgctgacactcggcagctctttctgctccctgcagggagaattctgccaggcaatggacagtttcaccaccgtgtctcacgtaggaatgtgcgaagaaacggatgcgagtttcaacgtgtttagtccaaagttccaattcgatcggtcccactgtcagtccctgcgatttcatcagaatatggagttggattttggtcacttcgacgagagagataaaacttccaggaacatgaggggcagccgtatgaacgggcttcccagcccaacccattctgctcattgttccttttatcgcacacgcaccctgcaggccctgtcaaacgaaaaaaaggcaaagaaagtccggttctatcggaacggggatagatacttcaaggggattgtgtacgccgtatcctcggaccgttttcgtagttttgacgccctgctggctgatctaacccgaagcctttctgacaacattaacctgccccagggcgtgcgctacatctatacaatcgatggcagcaggaaaatcggtagtatggacgaattggaggagggcgaatcttacgtgtgcagtagtgataactttttcaagaaggtcgaatacaccaagaatgtgaaccccaattggtccgtaaacgtaaagacttccgctaatatgaaggccccccaatctctggcctcttcaaacagcgcccaggccagagagaacaaagattttgtcagacccaagctggttaccatcattagaagcggagtgaagccaagaaaggcagtgcgcgtacttctcaataagaagacagctcacagcttcgagcaggtactgacagacattacagaggctataaagctggagaccggggtcgttaaaaagctttataccctggacggaaaacaggtcacctgtctccacgatttctttggcgacgatgatgtgttcatagcttgcggtcccgaaaaattccgttatgcgcaggacgacttctcattggatgagaatgaatgtcgggtgatgaaggggaatccgtccgctacagccggacccaaagccagccctacccctcaaaaaacctcggcgaagtctccaggccctatgcgccgctccaagagcccagccgacagcggaaacgaccaagacgccaacgggacctctagcagccagctgagtacaccaaagtcgaaacaatccccaatctcgaccccaacttccccgggcagtctgcgcaagcataaggacctgtacctgcccctgtccctggacgattctgattccctcggagacagtatgtag

SEQ ID NO: 12628 - DNA, 1326 bp, Artificial Sequence
  derived and/or modified sequence
atgaagaccctgcccctgcacagccactgcacagagatgcagaggctgctgcccaagctggagatgctgaccctgggcagcagcttctgcagcctgcagggcgagttctgccaggccatggacagcttcaccaccgtgagccacgtgggcatgtgtgaggagacagatgccagcttcaacgtgttcagccccaagttccagtttgacaggagccactgccagagcctgcgcttccaccagaacatggagctggactttggccactttgatgagcgggacaagaccagcaggaacatgaggggcagcaggatgaatggcctgcccagccccacccacagcgcccactgcagcttctaccgcaccaggaccctgcaggccctgagcaatgagaagaaggccaagaaggtgcgcttctacagaaatggagaccgctacttcaagggcatcgtgtatgctgtgtccagtgaccgcttccgcagctttgatgccctgctggccgacctgaccaggagcctgagtgacaacatcaacctgccccagggcgtgcgctacatctacaccattgatggcagcaggaagattggctccatggatgagctggaggagggggagagctatgtgtgcagcagtgacaacttcttcaagaaggtggagtacaccaagaatgtgaaccccaactggagcgtgaatgtgaagaccagcgccaacatgaaggccccccagagcctggccagcagcaacagcgcccaggcccgggagaacaaggactttgtgcggcccaagctggtgaccatcatccgcagcggcgtgaagcccaggaaggctgtgcgggtgctgctgaacaagaagacagcccacagctttgagcaggtgctgacagacatcacagaggccatcaagctggagactggagtggtgaagaagctgtacaccctggatggcaagcaggtgacctgcctgcatgacttctttggagatgatgatgtgttcatcgcctgtggccctgagaagttccgctatgcccaggatgacttcagcctggatgaaaatgaatgtcgggtgatgaagggcaaccccagcgccacagctggccccaaggccagccccaccccccagaagaccagcgccaagagccctggccccatgagaagaagcaagagccctgctgacagcgccaacggcaccagcagcagccagctgagcacccccaagagcaagcagagccccatcagcacccccaccagccctggcagcctgaggaagcacaaggacctgtacctgcccctgagcctggatgacagcgacagcctgggggacagcatgtag

SEQ ID NO: 12629 - DNA, 1317 bp, Artificial Sequence
  derived and/or modified sequence
tgatgcacagagatgcagaggctgctgcccaagctggagatgctgaccctgggcagcagcttctgcagcctgcagggcgagttctgccaggccatggacagcttcaccaccgtgagccacgtgggcatgtgtgaggagacagatgccagcttcaacgtgttcagccccaagttccagtttgacaggagccactgccagagcctgcgcttccaccagaacatggagctggactttggccactttgatgagcgggacaagaccagcaggaacatgaggggcagcaggatgaatggcctgcccagccccacccacagcgcccactgcagcttctaccgcaccaggaccctgcaggccctgagcaatgagaagaaggccaagaaggtgcgcttctacagaaatggagaccgctacttcaagggcatcgtgtatgctgtgtccagtgaccgcttccgcagctttgatgccctgctggccgacctgaccaggagcctgagtgacaacatcaacctgccccagggcgtgcgctacatctacaccattgatggcagcaggaagattggctccatggatgagctggaggagggggagagctatgtgtgcagcagtgacaacttcttcaagaaggtggagtacaccaagaatgtgaaccccaactggagcgtgaatgtgaagaccagcgccaacatgaaggccccccagagcctggccagcagcaacagcgcccaggcccgggagaacaaggactttgtgcggcccaagctggtgaccatcatccgcagcggcgtgaagcccaggaaggctgtgcgggtgctgctgaacaagaagacagcccacagctttgagcaggtgctgacagacatcacagaggccatcaagctggagactggagtggtgaagaagctgtacaccctggatggcaagcaggtgacctgcctgcatgacttctttggagatgatgatgtgttcatcgcctgtggccctgagaagttccgctatgcccaggatgacttcagcctggatgaaaatgaatgtcgggtgatgaagggcaaccccagcgccacagctggccccaaggccagccccaccccccagaagaccagcgccaagagccctggccccatgagaagaagcaagagccctgctgacagcggaaatgaccaggatgccaacggcaccagcagcagccagctgagcacccccaagagcaagcagagccccatcagcacccccaccagccctggcagcctgaggaagcacaaggacctgtacctgcccctgagcctggatgacagcgacagcctgggggacagcatgtag

SEQ ID NO: 12630 - DNA, 1326 bp, Artificial Sequence
  derived and/or modified sequence
atgaagaccctgcccctgcacagccactgcaccgagatgcagcggttactgccaaaacttgaaatgctgactttggggtcttctttctgttctctgcagggtgaattttgtcaggcaatggattcatttactacagtcagccacgtgggcatgtgtgaggaaacagacgcatcgtttaacgtctttagccctaagtttcagttcgatagaagccactgtcagagtctgcgattccaccagaatatggagctggacttcgggcactttgacgagcgcgataagacctcaagaaatatgcggggctcccgaatgaacggcctcccaagtcccacacattcagcgcattgttcattctacagaacccggactttacaggcactgtctaatgagaagaaggctaagaaggtcaggttttaccgcaacggtgaccgttatttcaaggggattgtgtatgccgtgagctctgaccgattcagaagctttgatgccctgctggcagatttgacccgatcgcttagcgacaacatcaaccttccacagggagtacgttatatttacacaatcgacggctcaagaaaaattggaagtatggatgagctcgaagaaggcgagagttacgtgtgcagcagtgacaacttctttaaaaaggtcgaatatacaaagaacgtgaatccaaactggtctgtcaacgttaaaacgtctgccaacatgaaggctccacagtccctggctagttccaacagcgcacaagcacgagaaaacaaggatttcgtgcgccccaagctggtcaccatcatccgcagcggcgttaagccaagaaaggctgtccgggtgctgttaaataaaaagacagcccactctttcgagcaggtgctgactgatattaccgaagccatcaaactggagactggcgtggtgaagaagttgtacacgcttgatggaaaacaggttacctgtctgcacgattttttcggcgatgacgacgtcttcattgcatgcggcccagagaagttcaggtatgcccaggacgacttctccctcgacgagaatgagtgccgcgtgatgaagggaaatccatcagctacggctggccccaaggccagccccaccccacagaagaccagtgcaaagtcaccgggacctatgcgaagatctaaatcgcctgcagacagcgcgaacggcacttccagcagccagttgtctacaccaaaatccaaacaatcacctatctctacccccactagcccaggctcacttcgcaagcataaggacctgtacctgcccctcagcctcgacgattcagactccctgggggactccatgtag

SEQ ID NO: 12631 - DNA, 1317 bp, Artificial Sequence
  derived and/or modified sequence
tgatgcaccgagatgcagcggctgctgcccaagctggagatgctgaccctgggtagctctttctgtagtctacagggggagttttgccaggccatggacagcttcaccaccgtgtctcacgtagggatgtgtgaggaaaccgacgcatccttcaacgtgttttctcccaagttccagttcgataggtcacactgccagagtcttagatttcaccagaacatggaactggatttcgggcatttcgatgagagggacaagactagccgtaatatgagggggtctaggatgaatgggctgccgtcgccgactcactccgcgcactgttctttttataggacccggaccttgcaggcactgtcaaacgagaaaaaagctaagaaagtccgtttctatcgcaatggcgatcgctacttcaagggaatagtgtatgctgtttctagcgatcgttttcgcagctttgacgcactgctcgctgacctgactcggtcactgagtgataacataaatttgccccagggagtgaggtacatttacacgattgacgggagcagaaaaattggatccatggatgagctggaagagggcgagtcctacgtgtgctcctcagataatttctttaaaaaagtagagtataccaagaacgttaatcccaattggagtgtgaatgttaagacctccgcgaatatgaaagccccacagtcactagccagttctaatagtgctcaggctagagagaacaaggacttcgttaggcctaagcttgttactattattcgcagcggcgttaagcccaggaaggcagtgcgggtactactgaacaagaaaacagcacactctttcgaacaggttctgaccgatatcactgaggccattaaattagaaacaggggtcgtgaaaaagttgtataccttagatgggaagcaagtgacatgtcttcatgactttttcggagacgacgatgtcttcatagcctgcggtcctgagaagttcagatacgctcaggatgactttagcttagatgagaacgagtgtcgtgtgatgaagggaaacccttctgccacggctggacctaaggcctcgcctaccccacaaaaaacctctgcaaagtctcccggaccaatgcgccggtccaagtctcctgctgactccggcaacgatcaggacgctaatggtacaagcagttcccaactctctacacccaagtcaaagcagtctcccatatccacccctacgagcccgggtagcctgcggaaacacaaagacctgtacctgcccctatcgctggatgatagcgacagcttaggagattctatgtag

SEQ ID NO: 12632 - DNA, 1326 bp, Artificial Sequence
  derived and/or modified sequence
atgaagacccttcctctgcatagccattgcacagaaatgcagcgtctgcttccaaagctcgagatgttaactcttggctcttcgttttgctccctgcaaggtgaattctgccaggctatggattcctttaccaccgtgtcacacgttggtatgtgcgaagagacagacgcatcatttaatgtgttttcccccaagttccaattcgaccggtcccactgtcagtccctccgcttccaccaaaatatggagctggactttggacatttcgacgagcgggacaaaacttcaagaaacatgagagggtcacgtatgaacgggctgccatcacctactcacagcgctcactgcagtttttaccgcacgcgcacattgcaggccctatccaatgaaaagaaagcgaaaaaggtgaggttctataggaatggagatcggtactttaaaggcatcgtctatgccgttagcagcgatcgatttagatcctttgatgcgcttctggctgatttgacacggagcctttcagataacatcaacctgccccagggtgttaggtatatttacacaatcgacggctccaggaagattgggagtatggacgaactggaggagggcgaatcctacgtctgctctagcgacaacttcttcaagaaggtagagtacacaaagaacgttaatccaaactggtccgtgaacgtcaagacttccgcaaatatgaaggcaccccaaagtctcgcaagtagcaatagcgcacaagctcgagaaaataaagattttgtaagacccaagttggtcacaattattcgaagtggggtgaaacctaggaaggcggtgcgcgttctcttgaataaaaagacagcccactcttttgaacaggtattaactgacattaccgaggcaatcaaactggaaacaggcgtggtcaaaaaactgtacactctcgacggaaaacaagtgacttgtctgcacgatttttttggcgatgatgatgtgtttattgcctgtggccctgagaagttccgttacgctcaggatgatttctcactagacgagaatgagtgccgcgtaatgaagggcaatcccagcgcaacagccggtcctaaagccagcccgactccgcagaagaccagcgcaaaatctccaggacctatgaggcgctctaagtctccggctgacagtgccaacggaacctcatcctcgcaactctcgacacccaagtccaaacagtctcctatatccacgcctacctccccgggaagcttgcgaaagcataaagatctgtatctccctctcagtcttgatgattctgacagtcttggtgattccatgtag

SEQ ID NO: 12633 - DNA, 1317 bp, Artificial Sequence
  derived and/or modified sequence
tgatgtactgaaatgcagaggctgcttccaaagctggaaatgctgacgcttgggagcagcttttgttctcttcagggagagttctgccaagccatggattcctttaccactgtctcccacgtggggatgtgcgaagaaactgacgccagcttcaacgtctttagtcctaagttccaattcgacagaagccactgccaaagcctccgcttccatcagaacatggagctcgactttgggcactttgatgaacgtgataagaccagccgcaacatgaggggcagcaggatgaacggtctgccaagccctacacacagtgcacattgcagtttctatcgtactcggaccctccaggccctctctaacgagaagaaggcaaagaaggtgaggttttatcggaacggcgatcgatactttaagggcattgtctacgccgtgtctagcgaccggttccggtccttcgacgcactgctcgccgacctgactcgaagtctgtctgataatataaatctcccgcaaggcgtgcgctacatttatacaatcgacgggagcagaaagattggcagtatggacgagctcgaggagggcgagtcctacgtctgtagcagcgataacttctttaagaaagtcgaatacaccaagaatgtcaaccccaactggtcagtgaatgtcaagacgagtgctaacatgaaggctccccagagcttagcttcaagcaactctgcccaggccagggaaaataaggacttcgtaagacctaagctggtgacaattattagatccggggtaaagccccgtaaagccgtgagggtgcttctgaacaagaaaacagctcacagtttcgagcaagttctgactgatatcacagaggctatcaagctggagacaggggtggtcaaaaaactctatactctagacggtaagcaggttacatgcctgcacgacttcttcggggatgacgacgtgttcatcgcgtgtgggccagagaaattccggtatgcgcaggacgacttctcgctcgatgagaatgagtgtagagtcatgaaaggcaacccttctgcaaccgctggccctaaggctagcccaacccctcaaaagacgtctgctaaatctccaggcccaatgcgacggtcgaagagccctgctgatagcgggaatgatcaggacgctaacgggacgagcagctcccagctcagtacacccaaatctaaacagtctccaataagcaccccaacatctcccggatcactgcgaaagcataaggatttgtatttaccactctcattagatgactccgactcactgggcgactccatgtag

SEQ ID NO: 12634 - DNA, 1326 bp, Artificial Sequence
  derived and/or modified sequence
atgaagaccctgcccctgcacagccactgcaccgagatgcagagactgctgcccaagctggagatgctgaccctgggcagcagcttctgcagcctgcagggcgagttctgccaggccatggacagcttcaccaccgtgagccacgtgggcatgtgcgaggagaccgacgccagcttcaacgtgttcagccccaagttccagttcgacagaagccactgccagagcctgagattccaccagaacatggagctggacttcggccacttcgacgagagagacaagaccagcagaaacatgagaggcagcagaatgaacggcctgcccagccccacccacagcgcccactgcagcttctacagaaccagaaccctgcaggccctgagcaacgagaagaaggccaagaaggtgagattctacagaaacggcgacagatacttcaagggcatcgtgtacgccgtgagcagcgacagattcagaagcttcgacgccctgctggccgacctgaccagaagcctgagcgacaacatcaacctgccccagggcgtgagatacatctacaccatcgacggcagcagaaagatcggcagcatggacgagctggaggagggcgagagctacgtgtgcagcagcgacaacttcttcaagaaggtggagtacaccaagaacgtgaaccccaactggagcgtgaacgtgaagaccagcgccaacatgaaggccccccagagcctggccagcagcaacagcgcccaggccagagagaacaaggacttcgtgagacccaagctggtgaccatcatcagaagcggcgtgaagcccagaaaggccgtgagagtgctgctgaacaagaagaccgcccacagcttcgagcaggtgctgaccgacatcaccgaggccatcaagctggagaccggcgtggtgaagaagctgtacaccctggacggcaagcaggtgacctgcctgcacgacttcttcggcgacgacgacgtgttcatcgcctgcggccccgagaagttcagatacgcccaggacgacttcagcctggacgagaacgagtgcagagtgatgaagggcaaccccagcgccaccgccggccccaaggccagccccaccccccagaagaccagcgccaagagccccggccccatgagaagaagcaagagccccgccgacagcgccaacggcaccagcagcagccagctgagcacccccaagagcaagcagagccccatcagcacccccaccagccccggcagcctgagaaagcacaaggacctgtacctgcccctgagcctggacgacagcgacagcctgggcgacagcatgtag

SEQ ID NO: 12635 - DNA, 1317 bp, Artificial Sequence
  derived and/or modified sequence
tgatgcaccgagatgcagagactgctgcccaagctggagatgctgaccctgggcagcagcttctgcagcctgcagggcgagttctgccaggccatggacagcttcaccaccgtgagccacgtgggcatgtgcgaggagaccgacgccagcttcaacgtgttcagccccaagttccagttcgacagaagccactgccagagcctgagattccaccagaacatggagctggacttcggccacttcgacgagagagacaagaccagcagaaacatgagaggcagcagaatgaacggcctgcccagccccacccacagcgcccactgcagcttctacagaaccagaaccctgcaggccctgagcaacgagaagaaggccaagaaggtgagattctacagaaacggcgacagatacttcaagggcatcgtgtacgccgtgagcagcgacagattcagaagcttcgacgccctgctggccgacctgaccagaagcctgagcgacaacatcaacctgccccagggcgtgagatacatctacaccatcgacggcagcagaaagatcggcagcatggacgagctggaggagggcgagagctacgtgtgcagcagcgacaacttcttcaagaaggtggagtacaccaagaacgtgaaccccaactggagcgtgaacgtgaagaccagcgccaacatgaaggccccccagagcctggccagcagcaacagcgcccaggccagagagaacaaggacttcgtgagacccaagctggtgaccatcatcagaagcggcgtgaagcccagaaaggccgtgagagtgctgctgaacaagaagaccgcccacagcttcgagcaggtgctgaccgacatcaccgaggccatcaagctggagaccggcgtggtgaagaagctgtacaccctggacggcaagcaggtgacctgcctgcacgacttcttcggcgacgacgacgtgttcatcgcctgcggccccgagaagttcagatacgcccaggacgacttcagcctggacgagaacgagtgcagagtgatgaagggcaaccccagcgccaccgccggccccaaggccagccccaccccccagaagaccagcgccaagagccccggccccatgagaagaagcaagagccccgccgacagcggcaacgaccaggacgccaacggcaccagcagcagccagctgagcacccccaagagcaagcagagccccatcagcacccccaccagccccggcagcctgagaaagcacaaggacctgtacctgcccctgagcctggacgacagcgacagcctgggcgacagcatgtag

SEQ ID NO: 12636 - DNA, 9405 bp, Artificial Sequence
  derived and/or modified sequence
cttatttcttatgaatgtcggatagctgcaccagcttggtggggaaagggtttgatgaatagcacaaagacactggctgttccctggaggctgtccctttaaaggagaatcttagtttattctggggggaggggatgcacacattagagtaggaaagagggcttggaataaaatgaaaacactcccccttcatagtcattgtactgaaatgcaaagactgcttcctaagctggagatgctaaccttgggtagctccttctgttctcttcaaggggaattttgtcaggctatggattcatttacaactgttagtcatgtgggcatgtgtgaggaaacagatgccagttttaatgtatttagcccgaagttccaatttgataggagccactgtcagtctctgaggttccaccaaaatatggaacttgattttggacactttgacgaaagagataagacatccaggaacatgcgaggctcccggatgaatgggttgcctagccccactcacagcgcccactgtagcttctaccgaaccagaaccttgcaggcactgagtaatgagaagaaagccaagaaggtacgtttctaccgcaatggggaccgctacttcaaggggattgtgtacgctgtgtcctctgaccgttttcgcagctttgacgccttgctggctgacctgacgcgatctctgtctgacaacatcaacctgcctcagggagtgcgttacatttacaccattgatggatccaggaagatcggaagcatggatgaactggaggaaggggaaagctatgtctgttcctcagacaacttctttaaaaaggtggagtacaccaagaatgtcaatcccaactggtctgtcaacgtaaaaacatctgccaatatgaaagccccccagtccttggctagcagcaacagtgcacaggccagggagaacaaggactttgtgcgccccaagctggttaccatcatccgcagtggggtgaagcctcggaaggctgtgcgtgtgcttctgaacaagaagacagcccactcttttgagcaagtcctcactgatatcacagaagccatcaaactggagaccggggttgtcaaaaaactctacactctggatggaaaacaggtaacttgtctccatgatttctttggtgatgatgatgtgtttattgcctgtggtcctgaaaaatttcgctatgctcaggatgatttttctctggatgaaaatgaatgccgagtcatgaagggaaacccatcagccacagctggcccaaaggcatccccaacacctcagaagacttcagccaagagccctggtcctatgcgccgaagcaagtctccagctgactcagcaaacggaacctccagcagccagctctctacccccaagtctaagcagtctcccatctctacgcccaccagtcctggcagcctccggaagcacaaggacctgtacctgcctctgtccttggatgactcggactcgcttggtgattccatgtaaaggaggggagagtgctcagagtccagagtacaaatccaagcctatcattgtagtagggtacttctgctcaagtgtccaacagggctattggtgctttcaagtttttattttgttgttgttgttattttgaaaaacacattgtaatatgttgggtttattttcctgtgatttctcctctgggccactgatccacagttaccaattatgagagatagattgataaccatcctttggggcagcattccagggatgcaaaatgtgctagtccatgacctttcaatggaaagcttaggtgcctgcgttatatttgccctgtctaattttgcccatacagtcttccttctgtagagggctgtttacatatacagcacttaaaatgtttgtgtgggaaaaaaaaaactcattggcagatccaagaatgacaaacacaagtgccccttttctctggatctcaagaatggtggaggaccctggaaggacagcaaggcagctccccagcctcactcttcactcctgattgaggcccgggtttgttgtccagcaccaattctggctgtcaatggggagaaataaaccaacaacttataattgtgacaccagatgcttaggatcctggtgctgggttagctaagagaatagacagaattggaaaatactgcagacatttccgaagagtttataaagcacagtgaattcctggtcaatctctccactgaggcaatttggaatcaataagcaattgataatagtttggagtaagggacttcatatacctgattcctctagaaggctgtctaacataccacatgattacatgaactgtatggtatccatctatctctgttctattgaatgccttgttaacagccaacactgaaaacactgtgagaatttgttttcaggtctgacacctttcagtctctttttatagcaagaaatcaatatcctttttataaaaattcatgtctgtatttcaggagcaaactcttcaggctccttttttataaactggtgatttttcttttgtctaaaaaacacatgaagaaaatttaccaaaaaaaaaaaaaaaagcagaagaataatgtagtttagaaattatgctgtcactgccaaacagtaacctccaggagaaaacaagatgaatagcagaggccaattcaatagaatcagttttttgatagctttttaacagttatgcttgcattaataatttcaatgtggaccagacattctaattatattttaaatgaaatgttacagcatattttaagcaactctttttatctataatcctaatatttcatactgaagacacagaaatctttcacttgtctttaacattagaaaggatttctctttactaaggactgatcatttgaaatagttttcagtcttttgagatacaggtttataacactgcttttttttttctgtaatcatagcccataatggcaaagacaactaaatttaagtgaaggtcatgcatgccaattctgtgtttgcttttagcagatatgaagatttccttatttctttgtaattgtgcagatattttgaaaggcacagcattcgaagccaagctgctgtttggctactgaatggcttgcagttgttcctccactctaaatggaatgagcttgctgtgtgtgtgtgtggtggtggtgggagggggtggtgcatgtgtgtgtgtgtgtgtgcatctgcagctgcttcaaaattaggaaatactacaggacacccctgtaatggattggtggcaactgggtggcactgctgatgtgcactgtgtaggggggaacccagtggtggtggggtagctcagatgcccctagacaagcttcagatgtctgtagctaccagaaacattttcggttcaggaaaagtgagatgatggtagtactggtttctggtgaaattgaagaaccccaaatgatgaggatctctttttgccccctctcctttttttgtagacccattcaaaaccattaataagcccattttactaagcccctatttctttctagaagctcagggttttcttagtgcctcccagaacattttgtagttaattgggaaaaagtgatacttggattagggggtgtgggcataaagaatggtgggaggcctgattttaaacttcaggccagaacccccaatgactccacccatagtctcactttaggtctcatttagtccatcacctttattttaagttgaggaagtggaggctggtaaagagcaggaccagaggaagaatccagatttccttatgcttgggcctcacactagctctctgagtatttccttgattgcggtatatgtactactagaaaataccaaatggatatattttctttaggataacctttgaaccaacaatcttcaataacaatagtacatcttccatcttacttttaatcgagtataaggaaatgtttctttatggccattttggagggagcaggggatgaggcttggcatagtccaaaatttaagtctccaataattaattgcattttaaattggcccactttcaaggcaattttttttgtgtgtctgtaactgagctcctccacccctgtcattcacttccaattttacccaatccaattttagcactcaagttccattgtgttaatttctgcacggtcaacaaacatcaagtcagcaagcatttgccaccactccctatacttctccctccttcttacacacacacacacacacacacacacaatccatctcttgcttgttcctacctcctgatttttcttccctacagaaatagaaatagggacaaagaaggggaaaatgtatatattggggctgggctgaacaactaacttcataagtagtattaactaggggtaaattgagagaaaagctccttttctcttcactgttttggaaaggatagccattagcatgactgctttgtgtccttatggactttagtattagcctagattgaattatagcgttttctagctggaaggaaccttaagatcacatcatctactcctctactccaaatttctcattcttcaggccaggaaaccgagacacagaggtaaagtaatttccccaaggtcacacagctggctggggcaggattgggtttacaacccacatctcctggctcttattccagggccttttcccactaagtagtattgccttccattaggctcctgagagttatttctcagggtcatgttgcatcttggagccacatgctgctgccctgatctcagtgggaaatccacccagcaacctaatacagccccttttccctgcattcacctggttcccatccacatgggttgcagatgtccttgaagagagtgaggcattgagggccaataggagcaatggggtccctggccttgtccatctgattcaggagatcactgctccatcgtgaggagccctctgaatagccccccactgaatgcttgccttgcccaaatggaatggaggaagattgattttctccatcagttcaccttgtgtcatctcataatggttggtctttccaggctgagggaaatgtttcttgtttccagagtagaaaaagaaagagtggaacaatagctttgttcatcctaactttctgagatggcttttcaacattttaaaaaaactagtgtggctaccattcactggcaatgatttcttttagaatatgggagtaagatgagctagagaaaataacctggtctcactgtggttgccctcatccacaatgtccccaaagccatcctgctctgatgaggacaatttccaggtataagcaaggggctttgtgacaaaaatgtaccctggctgatgttaaacattggctcctgtgtttgcaccaaaatagcaagctgtgtgctctatacactcttcccatcgtcttgtgtacactgctcctgtggccttccacagcagaaaccagggcaaaagggtccaaacacatggttttccttgctgcaaggctcttcctgggaactaagggggtatttattagttcagttctaagagacctccttctgggcttaccccactcctcaggtacttctctctccttcctccttctcctccacagtcacaagtaaccaaggaacctgaaagtggatgtgtagctatttgaagaaggcaaggaaccctgagattcttctttgaatcctctagtccaagtcttagaccagtgattggtgcttaccttgaacaaaattttgtctgtgttcctaatcccttcaatactctgggtacaatgctcccaatcaccctgcacatttgattctaaatggcttttattttttaaaaatccatatccctaggacaagagaacaggatgcctatatccccaaaatgagctccaggacactgatgggaatgatcccaaagatcaccccacctcagaaacgtctgtgccaagagacttccccagatagaaacactgggacagtggtttgaacgacttcttttatggttgtccagtttgctatggaaataaaaggcattgattttttaaaaagatgattggaacctgtctttggccacatagggccacttggatccatttccaggccttactcatatattgccttcactgaagggctttggctttaagtcccagactggtctcccaagtgaaccataagtgttttggagctcatctggggtgaggcatgagaatgttgccccatctatcccttcaggaaaaggtgccttccctccctttctcctaaagcctggtccccagaaattgtttttgtctccaaaagtctagtatggtctttatacacccagactcttagtgttgcgtcctgccttgtttccttgttaaggatctatgcagacctcccgctttggcttagctagcgtgacattggctatcatttgacaagactaacttttttttttttttttttttgactgagtctccctctgtcacctaggctggagtgcagtggcacaatcttggctcgctgcaaccttcacccttcacctcccaggtcgaagcgattctcctgcctcagtctcccgagtagctgggattacaggcgtgcgccaccaaatctggctatttttttattattattatttttagtagagatggggtttcaccatgttggccagactggtcttgaactcttggcctcaaattatctgcccacctcggcctcccaaagtgctgggattacaggcatgagccaccatgcccagctgacaagactaattttttatcccttggtttattggcttcaacatcttctggaatcagaggtgattttttcttaccttggatgcctgagactaggggagtatagaattccaattggtaattaaggcatctttctgctcctgatcagaagggcaggttagttgggagaggtcagatggcacaacagaagtcaccttgtaagtaaggcaaagacttgaaggcattagcgtttctcattactaggtcaataacctgagggaatcaatggctttttgccgctctacctcttgtgtatctctttgacttttctttctctgtctagtttcctctgttctcagtttatattctatgttatcagtctctctttccacagtacaaacatccatcctttctcctgtgcaattctgtctctccctcttattatctttatttgtactttttccttcctccctgtctaggcattgggcatgtgcctcttcttagcctgtgattttgccttgggactgatgataaattatttccagattcaatcagccctggtcctaccccagtccaatcagaagtatgttggtgggaatcaacctgatcctggccctttcttcttctccattttcattcgtaatccccctcagcagatctttacaagcagtttccttatagctcatgtatctttaggtctttgccttccaagcactgtacagaatactttgtggttcctttttagtctgacattttgtggagcagtgaagcgtgctcagagacataatcagctgaagagaaaaaatccacccatggatttatatcagctaaatactaataattgattttgtttgatgtgcccataatttttaaagctgcaatataatataatgagggaccacaggtaatttctcctgtcatttgttttggctggatgggggtgggggagtaattgcttaaagttttaccattacacattaaactctctataataatcttgtttggggcttgctaactgttgagctgttttaactaaactggtaggcaatcggagttgatttaaatgaaaagataatttaacaaatctatactataaaaagagacatttgcttaattgacatgtattttttccttctgagtcacctaaacatttactcttgacaccaactgttcatgatactgaatagacagtccatataagagaaattagtggacctaaagaagccagattgtaggtgttaatttattaaacagagtgcaaagcccttggaaatgtcactgcttggcaataccatatggaatgccaaaatttacaatgacttttctttataagttatccaaaagggatttgaacaagtaagaggttatgccaaaatgtctccaatgtatggtcctgtaatatattgcagcttgaagccaatgatcccttatgacttgtatacaactaatgcatgttttattgaattttgcatttcccacgtgtggtaagttctttaaaatgtttttgatcacctttttgtgccattaaacttgtacagaaaatgtttttatggccattttcaaagggagaaagtttaaaatggaaacagcccaccctttctgccctatagctgtagttagaattgagtacctgtagcaaaacagctgtaattggtggttgtagtgttagaggtgttagcttgctagtgactagctttggagagtaaatgcatggtattgtacatcacatttcttaactcgttttaacctctgaaaagaatatattcttctttgtagtccttcttcccacccccttgccctctccctctccctgctcccagttgtcttacagttgtaaatatctgatttgaggcccaataactcttgccaagtaaagtcagcaaacaacaaacaaaccaaaatgtggggaaaaggcatttctcaaccatctctcagcagttattgatcatttcttaaggaacagcattgtgatcaaagactcaactttacgtaaaaatcagtggtaaattggggttgtatttggccatttgattacatttcaggattgaatagttttcagaatcacatgtaatccaaagacagtaggtagtgatgtcccttatccctgcagctgttttaagatagagacctcagaagactctgcttgaccgatgaccaataattatttgaaaaaaaaagaaaaaatgagagaaataaaacagatatttaagaactttagccacctatttagaatagttatagccagaaaaaaaaacaagggcatgagttcaaatgcattactatcagtgtcctaggcaatacctaacctactctgaaattgtgattcaaaagcagtatttcaagaggcattctccttttttggtttgctgaccccacttggactggtaggtttggtgaggcccccataaaccagctggagcagacccttttcatctcctgtgcctgtaacacccctcttcccccaccccctccgcaattcaatgagggctttcttgggtcagaggacttcaaggttgtctagagaagtttgccatgtgtgtaaggtgctgtgaactgtgagtgctgaagattcgcagcattcaataccaggcagccaaagagctgctcttgcaattattttggctctcaagctctgttcttcatcgcattctcatttctgtgtacatttgcaagatgtgtgtaatgtcattttccaaaaataaaatttgatttcaat

SEQ ID NO: 12637 - DNA, 9223 bp, Artificial Sequence
  derived and/or modified sequence
attgtactgaaatgcaaagactgcttcctaagctggagatgctaaccttgggtagctccttctgttctcttcaaggggaattttgtcaggctatggattcatttacaactgttagtcatgtgggcatgtgtgaggaaacagatgccagttttaatgtatttagcccgaagttccaatttgataggagccactgtcagtctctgaggttccaccaaaatatggaacttgattttggacactttgacgaaagagataagacatccaggaacatgcgaggctcccggatgaatgggttgcctagccccactcacagcgcccactgtagcttctaccgaaccagaaccttgcaggcactgagtaatgagaagaaagccaagaaggtacgtttctaccgcaatggggaccgctacttcaaggggattgtgtacgctgtgtcctctgaccgttttcgcagctttgacgccttgctggctgacctgacgcgatctctgtctgacaacatcaacctgcctcagggagtgcgttacatttacaccattgatggatccaggaagatcggaagcatggatgaactggaggaaggggaaagctatgtctgttcctcagacaacttctttaaaaaggtggagtacaccaagaatgtcaatcccaactggtctgtcaacgtaaaaacatctgccaatatgaaagccccccagtccttggctagcagcaacagtgcacaggccagggagaacaaggactttgtgcgccccaagctggttaccatcatccgcagtggggtgaagcctcggaaggctgtgcgtgtgcttctgaacaagaagacagcccactcttttgagcaagtcctcactgatatcacagaagccatcaaactggagaccggggttgtcaaaaaactctacactctggatggaaaacaggtaacttgtctccatgatttctttggtgatgatgatgtgtttattgcctgtggtcctgaaaaatttcgctatgctcaggatgatttttctctggatgaaaatgaatgccgagtcatgaagggaaacccatcagccacagctggcccaaaggcatccccaacacctcagaagacttcagccaagagccctggtcctatgcgccgaagcaagtctccagctgactcaggtaacgaccaagacgcaaacggaacctccagcagccagctctctacccccaagtctaagcagtctcccatctctacgcccaccagtcctggcagcctccggaagcacaaggacctgtacctgcctctgtccttggatgactcggactcgcttggtgattccatgtaaaggaggggagagtgctcagagtccagagtacaaatccaagcctatcattgtagtagggtacttctgctcaagtgtccaacagggctattggtgctttcaagtttttattttgttgttgttgttattttgaaaaacacattgtaatatgttgggtttattttcctgtgatttctcctctgggccactgatccacagttaccaattatgagagatagattgataaccatcctttggggcagcattccagggatgcaaaatgtgctagtccatgacctttcaatggaaagcttaggtgcctgcgttatatttgccctgtctaattttgcccatacagtcttccttctgtagagggctgtttacatatacagcacttaaaatgtttgtgtgggaaaaaaaaaactcattggcagatccaagaatgacaaacacaagtgccccttttctctggatctcaagaatggtggaggaccctggaaggacagcaaggcagctccccagcctcactcttcactcctgattgaggcccgggtttgttgtccagcaccaattctggctgtcaatggggagaaataaaccaacaacttataattgtgacaccagatgcttaggatcctggtgctgggttagctaagagaatagacagaattggaaaatactgcagacatttccgaagagtttataaagcacagtgaattcctggtcaatctctccactgaggcaatttggaatcaataagcaattgataatagtttggagtaagggacttcatatacctgattcctctagaaggctgtctaacataccacatgattacatgaactgtatggtatccatctatctctgttctattgaatgccttgttaacagccaacactgaaaacactgtgagaatttgttttcaggtctgacacctttcagtctctttttatagcaagaaatcaatatcctttttataaaaattcatgtctgtatttcaggagcaaactcttcaggctccttttttataaactggtgatttttcttttgtctaaaaaacacatgaagaaaatttaccaaaaaaaaaaaaaaaagcagaagaataatgtagtttagaaattatgctgtcactgccaaacagtaacctccaggagaaaacaagatgaatagcagaggccaattcaatagaatcagttttttgatagctttttaacagttatgcttgcattaataatttcaatgtggaccagacattctaattatattttaaatgaaatgttacagcatattttaagcaactctttttatctataatcctaatatttcatactgaagacacagaaatctttcacttgtctttaacattagaaaggatttctctttactaaggactgatcatttgaaatagttttcagtcttttgagatacaggtttataacactgcttttttttttctgtaatcatagcccataatggcaaagacaactaaatttaagtgaaggtcatgcatgccaattctgtgtttgcttttagcagatatgaagatttccttatttctttgtaattgtgcagatattttgaaaggcacagcattcgaagccaagctgctgtttggctactgaatggcttgcagttgttcctccactctaaatggaatgagcttgctgtgtgtgtgtgtggtggtggtgggagggggtggtgcatgtgtgtgtgtgtgtgtgcatctgcagctgcttcaaaattaggaaatactacaggacacccctgtaatggattggtggcaactgggtggcactgctgatgtgcactgtgtaggggggaacccagtggtggtggggtagctcagatgcccctagacaagcttcagatgtctgtagctaccagaaacattttcggttcaggaaaagtgagatgatggtagtactggtttctggtgaaattgaagaaccccaaatgatgaggatctctttttgccccctctcctttttttgtagacccattcaaaaccattaataagcccattttactaagcccctatttctttctagaagctcagggttttcttagtgcctcccagaacattttgtagttaattgggaaaaagtgatacttggattagggggtgtgggcataaagaatggtgggaggcctgattttaaacttcaggccagaacccccaatgactccacccatagtctcactttaggtctcatttagtccatcacctttattttaagttgaggaagtggaggctggtaaagagcaggaccagaggaagaatccagatttccttatgcttgggcctcacactagctctctgagtatttccttgattgcggtatatgtactactagaaaataccaaatggatatattttctttaggataacctttgaaccaacaatcttcaataacaatagtacatcttccatcttacttttaatcgagtataaggaaatgtttctttatggccattttggagggagcaggggatgaggcttggcatagtccaaaatttaagtctccaataattaattgcattttaaattggcccactttcaaggcaattttttttgtgtgtctgtaactgagctcctccacccctgtcattcacttccaattttacccaatccaattttagcactcaagttccattgtgttaatttctgcacggtcaacaaacatcaagtcagcaagcatttgccaccactccctatacttctccctccttcttacacacacacacacacacacacacacaatccatctcttgcttgttcctacctcctgatttttcttccctacagaaatagaaatagggacaaagaaggggaaaatgtatatattggggctgggctgaacaactaacttcataagtagtattaactaggggtaaattgagagaaaagctccttttctcttcactgttttggaaaggatagccattagcatgactgctttgtgtccttatggactttagtattagcctagattgaattatagcgttttctagctggaaggaaccttaagatcacatcatctactcctctactccaaatttctcattcttcaggccaggaaaccgagacacagaggtaaagtaatttccccaaggtcacacagctggctggggcaggattgggtttacaacccacatctcctggctcttattccagggccttttcccactaagtagtattgccttccattaggctcctgagagttatttctcagggtcatgttgcatcttggagccacatgctgctgccctgatctcagtgggaaatccacccagcaacctaatacagccccttttccctgcattcacctggttcccatccacatgggttgcagatgtccttgaagagagtgaggcattgagggccaataggagcaatggggtccctggccttgtccatctgattcaggagatcactgctccatcgtgaggagccctctgaatagccccccactgaatgcttgccttgcccaaatggaatggaggaagattgattttctccatcagttcaccttgtgtcatctcataatggttggtctttccaggctgagggaaatgtttcttgtttccagagtagaaaaagaaagagtggaacaatagctttgttcatcctaactttctgagatggcttttcaacattttaaaaaaactagtgtggctaccattcactggcaatgatttcttttagaatatgggagtaagatgagctagagaaaataacctggtctcactgtggttgccctcatccacaatgtccccaaagccatcctgctctgatgaggacaatttccaggtataagcaaggggctttgtgacaaaaatgtaccctggctgatgttaaacattggctcctgtgtttgcaccaaaatagcaagctgtgtgctctatacactcttcccatcgtcttgtgtacactgctcctgtggccttccacagcagaaaccagggcaaaagggtccaaacacatggttttccttgctgcaaggctcttcctgggaactaagggggtatttattagttcagttctaagagacctccttctgggcttaccccactcctcaggtacttctctctccttcctccttctcctccacagtcacaagtaaccaaggaacctgaaagtggatgtgtagctatttgaagaaggcaaggaaccctgagattcttctttgaatcctctagtccaagtcttagaccagtgattggtgcttaccttgaacaaaattttgtctgtgttcctaatcccttcaatactctgggtacaatgctcccaatcaccctgcacatttgattctaaatggcttttattttttaaaaatccatatccctaggacaagagaacaggatgcctatatccccaaaatgagctccaggacactgatgggaatgatcccaaagatcaccccacctcagaaacgtctgtgccaagagacttccccagatagaaacactgggacagtggtttgaacgacttcttttatggttgtccagtttgctatggaaataaaaggcattgattttttaaaaagatgattggaacctgtctttggccacatagggccacttggatccatttccaggccttactcatatattgccttcactgaagggctttggctttaagtcccagactggtctcccaagtgaaccataagtgttttggagctcatctggggtgaggcatgagaatgttgccccatctatcccttcaggaaaaggtgccttccctccctttctcctaaagcctggtccccagaaattgtttttgtctccaaaagtctagtatggtctttatacacccagactcttagtgttgcgtcctgccttgtttccttgttaaggatctatgcagacctcccgctttggcttagctagcgtgacattggctatcatttgacaagactaacttttttttttttttttttttgactgagtctccctctgtcacctaggctggagtgcagtggcacaatcttggctcgctgcaaccttcacccttcacctcccaggtcgaagcgattctcctgcctcagtctcccgagtagctgggattacaggcgtgcgccaccaaatctggctatttttttattattattatttttagtagagatggggtttcaccatgttggccagactggtcttgaactcttggcctcaaattatctgcccacctcggcctcccaaagtgctgggattacaggcatgagccaccatgcccagctgacaagactaattttttatcccttggtttattggcttcaacatcttctggaatcagaggtgattttttcttaccttggatgcctgagactaggggagtatagaattccaattggtaattaaggcatctttctgctcctgatcagaagggcaggttagttgggagaggtcagatggcacaacagaagtcaccttgtaagtaaggcaaagacttgaaggcattagcgtttctcattactaggtcaataacctgagggaatcaatggctttttgccgctctacctcttgtgtatctctttgacttttctttctctgtctagtttcctctgttctcagtttatattctatgttatcagtctctctttccacagtacaaacatccatcctttctcctgtgcaattctgtctctccctcttattatctttatttgtactttttccttcctccctgtctaggcattgggcatgtgcctcttcttagcctgtgattttgccttgggactgatgataaattatttccagattcaatcagccctggtcctaccccagtccaatcagaagtatgttggtgggaatcaacctgatcctggccctttcttcttctccattttcattcgtaatccccctcagcagatctttacaagcagtttccttatagctcatgtatctttaggtctttgccttccaagcactgtacagaatactttgtggttcctttttagtctgacattttgtggagcagtgaagcgtgctcagagacataatcagctgaagagaaaaaatccacccatggatttatatcagctaaatactaataattgattttgtttgatgtgcccataatttttaaagctgcaatataatataatgagggaccacaggtaatttctcctgtcatttgttttggctggatgggggtgggggagtaattgcttaaagttttaccattacacattaaactctctataataatcttgtttggggcttgctaactgttgagctgttttaactaaactggtaggcaatcggagttgatttaaatgaaaagataatttaacaaatctatactataaaaagagacatttgcttaattgacatgtattttttccttctgagtcacctaaacatttactcttgacaccaactgttcatgatactgaatagacagtccatataagagaaattagtggacctaaagaagccagattgtaggtgttaatttattaaacagagtgcaaagcccttggaaatgtcactgcttggcaataccatatggaatgccaaaatttacaatgacttttctttataagttatccaaaagggatttgaacaagtaagaggttatgccaaaatgtctccaatgtatggtcctgtaatatattgcagcttgaagccaatgatcccttatgacttgtatacaactaatgcatgttttattgaattttgcatttcccacgtgtggtaagttctttaaaatgtttttgatcacctttttgtgccattaaacttgtacagaaaatgtttttatggccattttcaaagggagaaagtttaaaatggaaacagcccaccctttctgccctatagctgtagttagaattgagtacctgtagcaaaacagctgtaattggtggttgtagtgttagaggtgttagcttgctagtgactagctttggagagtaaatgcatggtattgtacatcacatttcttaactcgttttaacctctgaaaagaatatattcttctttgtagtccttcttcccacccccttgccctctccctctccctgctcccagttgtcttacagttgtaaatatctgatttgaggcccaataactcttgccaagtaaagtcagcaaacaacaaacaaaccaaaatgtggggaaaaggcatttctcaaccatctctcagcagttattgatcatttcttaaggaacagcattgtgatcaaagactcaactttacgtaaaaatcagtggtaaattggggttgtatttggccatttgattacatttcaggattgaatagttttcagaatcacatgtaatccaaagacagtaggtagtgatgtcccttatccctgcagctgttttaagatagagacctcagaagactctgcttgaccgatgaccaataattatttgaaaaaaaaagaaaaaatgagagaaataaaacagatatttaagaactttagccacctatttagaatagttatagccagaaaaaaaaacaagggcatgagttcaaatgcattactatcagtgtcctaggcaatacctaacctactctgaaattgtgattcaaaagcagtatttcaagaggcattctccttttttggtttgctgaccccacttggactggtaggtttggtgaggcccccataaaccagctggagcagacccttttcatctcctgtgcctgtaacacccctcttcccccaccccctccgcaattcaatgagggctttcttgggtcagaggacttcaaggttgtctagagaagtttgccatgtgtgtaaggtgctgtgaactgtgagtgctgaagattcgcagcattcaataccaggcagccaaagagctgctcttgcaattattttggctctcaagctctgttcttcatcgcattctcatttctgtgtacatttgcaagatgtgtgtaatgtcattttccaaaaataaaatttgatttcaat

SEQ ID NO: 12638 - DNA, 9122 bp, Artificial Sequence
  derived and/or modified sequence
cacaaggcaaagcctgctctctctgtctctctgtctcctcttctccttttttgccttattctatccgattttttccctaagcttctacctgggattttcctttggaaaagtctctgaggttccaccaaaatatggaacttgattttggacactttgacgaaagagataagacatccaggaacatgcgaggctcccggatgaatgggttgcctagccccactcacagcgcccactgtagcttctaccgaaccagaaccttgcaggcactgagtaatgagaagaaagccaagaaggtacgtttctaccgcaatggggaccgctacttcaaggggattgtgtacgctgtgtcctctgaccgttttcgcagctttgacgccttgctggctgacctgacgcgatctctgtctgacaacatcaacctgcctcagggagtgcgttacatttacaccattgatggatccaggaagatcggaagcatggatgaactggaggaaggggaaagctatgtctgttcctcagacaacttctttaaaaaggtggagtacaccaagaatgtcaatcccaactggtctgtcaacgtaaaaacatctgccaatatgaaagccccccagtccttggctagcagcaacagtgcacaggccagggagaacaaggactttgtgcgccccaagctggttaccatcatccgcagtggggtgaagcctcggaaggctgtgcgtgtgcttctgaacaagaagacagcccactcttttgagcaagtcctcactgatatcacagaagccatcaaactggagaccggggttgtcaaaaaactctacactctggatggaaaacaggtaacttgtctccatgatttctttggtgatgatgatgtgtttattgcctgtggtcctgaaaaatttcgctatgctcaggatgatttttctctggatgaaaatgaatgccgagtcatgaagggaaacccatcagccacagctggcccaaaggcatccccaacacctcagaagacttcagccaagagccctggtcctatgcgccgaagcaagtctccagctgactcagcaaacggaacctccagcagccagctctctacccccaagtctaagcagtctcccatctctacgcccaccagtcctggcagcctccggaagcacaaggacctgtacctgcctctgtccttggatgactcggactcgcttggtgattccatgtaaaggaggggagagtgctcagagtccagagtacaaatccaagcctatcattgtagtagggtacttctgctcaagtgtccaacagggctattggtgctttcaagtttttattttgttgttgttgttattttgaaaaacacattgtaatatgttgggtttattttcctgtgatttctcctctgggccactgatccacagttaccaattatgagagatagattgataaccatcctttggggcagcattccagggatgcaaaatgtgctagtccatgacctttcaatggaaagcttaggtgcctgcgttatatttgccctgtctaattttgcccatacagtcttccttctgtagagggctgtttacatatacagcacttaaaatgtttgtgtgggaaaaaaaaaactcattggcagatccaagaatgacaaacacaagtgccccttttctctggatctcaagaatggtggaggaccctggaaggacagcaaggcagctccccagcctcactcttcactcctgattgaggcccgggtttgttgtccagcaccaattctggctgtcaatggggagaaataaaccaacaacttataattgtgacaccagatgcttaggatcctggtgctgggttagctaagagaatagacagaattggaaaatactgcagacatttccgaagagtttataaagcacagtgaattcctggtcaatctctccactgaggcaatttggaatcaataagcaattgataatagtttggagtaagggacttcatatacctgattcctctagaaggctgtctaacataccacatgattacatgaactgtatggtatccatctatctctgttctattgaatgccttgttaacagccaacactgaaaacactgtgagaatttgttttcaggtctgacacctttcagtctctttttatagcaagaaatcaatatcctttttataaaaattcatgtctgtatttcaggagcaaactcttcaggctccttttttataaactggtgatttttcttttgtctaaaaaacacatgaagaaaatttaccaaaaaaaaaaaaaaaagcagaagaataatgtagtttagaaattatgctgtcactgccaaacagtaacctccaggagaaaacaagatgaatagcagaggccaattcaatagaatcagttttttgatagctttttaacagttatgcttgcattaataatttcaatgtggaccagacattctaattatattttaaatgaaatgttacagcatattttaagcaactctttttatctataatcctaatatttcatactgaagacacagaaatctttcacttgtctttaacattagaaaggatttctctttactaaggactgatcatttgaaatagttttcagtcttttgagatacaggtttataacactgcttttttttttctgtaatcatagcccataatggcaaagacaactaaatttaagtgaaggtcatgcatgccaattctgtgtttgcttttagcagatatgaagatttccttatttctttgtaattgtgcagatattttgaaaggcacagcattcgaagccaagctgctgtttggctactgaatggcttgcagttgttcctccactctaaatggaatgagcttgctgtgtgtgtgtgtggtggtggtgggagggggtggtgcatgtgtgtgtgtgtgtgtgcatctgcagctgcttcaaaattaggaaatactacaggacacccctgtaatggattggtggcaactgggtggcactgctgatgtgcactgtgtaggggggaacccagtggtggtggggtagctcagatgcccctagacaagcttcagatgtctgtagctaccagaaacattttcggttcaggaaaagtgagatgatggtagtactggtttctggtgaaattgaagaaccccaaatgatgaggatctctttttgccccctctcctttttttgtagacccattcaaaaccattaataagcccattttactaagcccctatttctttctagaagctcagggttttcttagtgcctcccagaacattttgtagttaattgggaaaaagtgatacttggattagggggtgtgggcataaagaatggtgggaggcctgattttaaacttcaggccagaacccccaatgactccacccatagtctcactttaggtctcatttagtccatcacctttattttaagttgaggaagtggaggctggtaaagagcaggaccagaggaagaatccagatttccttatgcttgggcctcacactagctctctgagtatttccttgattgcggtatatgtactactagaaaataccaaatggatatattttctttaggataacctttgaaccaacaatcttcaataacaatagtacatcttccatcttacttttaatcgagtataaggaaatgtttctttatggccattttggagggagcaggggatgaggcttggcatagtccaaaatttaagtctccaataattaattgcattttaaattggcccactttcaaggcaattttttttgtgtgtctgtaactgagctcctccacccctgtcattcacttccaattttacccaatccaattttagcactcaagttccattgtgttaatttctgcacggtcaacaaacatcaagtcagcaagcatttgccaccactccctatacttctccctccttcttacacacacacacacacacacacacacaatccatctcttgcttgttcctacctcctgatttttcttccctacagaaatagaaatagggacaaagaaggggaaaatgtatatattggggctgggctgaacaactaacttcataagtagtattaactaggggtaaattgagagaaaagctccttttctcttcactgttttggaaaggatagccattagcatgactgctttgtgtccttatggactttagtattagcctagattgaattatagcgttttctagctggaaggaaccttaagatcacatcatctactcctctactccaaatttctcattcttcaggccaggaaaccgagacacagaggtaaagtaatttccccaaggtcacacagctggctggggcaggattgggtttacaacccacatctcctggctcttattccagggccttttcccactaagtagtattgccttccattaggctcctgagagttatttctcagggtcatgttgcatcttggagccacatgctgctgccctgatctcagtgggaaatccacccagcaacctaatacagccccttttccctgcattcacctggttcccatccacatgggttgcagatgtccttgaagagagtgaggcattgagggccaataggagcaatggggtccctggccttgtccatctgattcaggagatcactgctccatcgtgaggagccctctgaatagccccccactgaatgcttgccttgcccaaatggaatggaggaagattgattttctccatcagttcaccttgtgtcatctcataatggttggtctttccaggctgagggaaatgtttcttgtttccagagtagaaaaagaaagagtggaacaatagctttgttcatcctaactttctgagatggcttttcaacattttaaaaaaactagtgtggctaccattcactggcaatgatttcttttagaatatgggagtaagatgagctagagaaaataacctggtctcactgtggttgccctcatccacaatgtccccaaagccatcctgctctgatgaggacaatttccaggtataagcaaggggctttgtgacaaaaatgtaccctggctgatgttaaacattggctcctgtgtttgcaccaaaatagcaagctgtgtgctctatacactcttcccatcgtcttgtgtacactgctcctgtggccttccacagcagaaaccagggcaaaagggtccaaacacatggttttccttgctgcaaggctcttcctgggaactaagggggtatttattagttcagttctaagagacctccttctgggcttaccccactcctcaggtacttctctctccttcctccttctcctccacagtcacaagtaaccaaggaacctgaaagtggatgtgtagctatttgaagaaggcaaggaaccctgagattcttctttgaatcctctagtccaagtcttagaccagtgattggtgcttaccttgaacaaaattttgtctgtgttcctaatcccttcaatactctgggtacaatgctcccaatcaccctgcacatttgattctaaatggcttttattttttaaaaatccatatccctaggacaagagaacaggatgcctatatccccaaaatgagctccaggacactgatgggaatgatcccaaagatcaccccacctcagaaacgtctgtgccaagagacttccccagatagaaacactgggacagtggtttgaacgacttcttttatggttgtccagtttgctatggaaataaaaggcattgattttttaaaaagatgattggaacctgtctttggccacatagggccacttggatccatttccaggccttactcatatattgccttcactgaagggctttggctttaagtcccagactggtctcccaagtgaaccataagtgttttggagctcatctggggtgaggcatgagaatgttgccccatctatcccttcaggaaaaggtgccttccctccctttctcctaaagcctggtccccagaaattgtttttgtctccaaaagtctagtatggtctttatacacccagactcttagtgttgcgtcctgccttgtttccttgttaaggatctatgcagacctcccgctttggcttagctagcgtgacattggctatcatttgacaagactaacttttttttttttttttttttgactgagtctccctctgtcacctaggctggagtgcagtggcacaatcttggctcgctgcaaccttcacccttcacctcccaggtcgaagcgattctcctgcctcagtctcccgagtagctgggattacaggcgtgcgccaccaaatctggctatttttttattattattatttttagtagagatggggtttcaccatgttggccagactggtcttgaactcttggcctcaaattatctgcccacctcggcctcccaaagtgctgggattacaggcatgagccaccatgcccagctgacaagactaattttttatcccttggtttattggcttcaacatcttctggaatcagaggtgattttttcttaccttggatgcctgagactaggggagtatagaattccaattggtaattaaggcatctttctgctcctgatcagaagggcaggttagttgggagaggtcagatggcacaacagaagtcaccttgtaagtaaggcaaagacttgaaggcattagcgtttctcattactaggtcaataacctgagggaatcaatggctttttgccgctctacctcttgtgtatctctttgacttttctttctctgtctagtttcctctgttctcagtttatattctatgttatcagtctctctttccacagtacaaacatccatcctttctcctgtgcaattctgtctctccctcttattatctttatttgtactttttccttcctccctgtctaggcattgggcatgtgcctcttcttagcctgtgattttgccttgggactgatgataaattatttccagattcaatcagccctggtcctaccccagtccaatcagaagtatgttggtgggaatcaacctgatcctggccctttcttcttctccattttcattcgtaatccccctcagcagatctttacaagcagtttccttatagctcatgtatctttaggtctttgccttccaagcactgtacagaatactttgtggttcctttttagtctgacattttgtggagcagtgaagcgtgctcagagacataatcagctgaagagaaaaaatccacccatggatttatatcagctaaatactaataattgattttgtttgatgtgcccataatttttaaagctgcaatataatataatgagggaccacaggtaatttctcctgtcatttgttttggctggatgggggtgggggagtaattgcttaaagttttaccattacacattaaactctctataataatcttgtttggggcttgctaactgttgagctgttttaactaaactggtaggcaatcggagttgatttaaatgaaaagataatttaacaaatctatactataaaaagagacatttgcttaattgacatgtattttttccttctgagtcacctaaacatttactcttgacaccaactgttcatgatactgaatagacagtccatataagagaaattagtggacctaaagaagccagattgtaggtgttaatttattaaacagagtgcaaagcccttggaaatgtcactgcttggcaataccatatggaatgccaaaatttacaatgacttttctttataagttatccaaaagggatttgaacaagtaagaggttatgccaaaatgtctccaatgtatggtcctgtaatatattgcagcttgaagccaatgatcccttatgacttgtatacaactaatgcatgttttattgaattttgcatttcccacgtgtggtaagttctttaaaatgtttttgatcacctttttgtgccattaaacttgtacagaaaatgtttttatggccattttcaaagggagaaagtttaaaatggaaacagcccaccctttctgccctatagctgtagttagaattgagtacctgtagcaaaacagctgtaattggtggttgtagtgttagaggtgttagcttgctagtgactagctttggagagtaaatgcatggtattgtacatcacatttcttaactcgttttaacctctgaaaagaatatattcttctttgtagtccttcttcccacccccttgccctctccctctccctgctcccagttgtcttacagttgtaaatatctgatttgaggcccaataactcttgccaagtaaagtcagcaaacaacaaacaaaccaaaatgtggggaaaaggcatttctcaaccatctctcagcagttattgatcatttcttaaggaacagcattgtgatcaaagactcaactttacgtaaaaatcagtggtaaattggggttgtatttggccatttgattacatttcaggattgaatagttttcagaatcacatgtaatccaaagacagtaggtagtgatgtcccttatccctgcagctgttttaagatagagacctcagaagactctgcttgaccgatgaccaataattatttgaaaaaaaaagaaaaaatgagagaaataaaacagatatttaagaactttagccacctatttagaatagttatagccagaaaaaaaaacaagggcatgagttcaaatgcattactatcagtgtcctaggcaatacctaacctactctgaaattgtgattcaaaagcagtatttcaagaggcattctccttttttggtttgctgaccccacttggactggtaggtttggtgaggcccccataaaccagctggagcagacccttttcatctcctgtgcctgtaacacccctcttcccccaccccctccgcaattcaatgagggctttcttgggtcagaggacttcaaggttgtctagagaagtttgccatgtgtgtaaggtgctgtgaactgtgagtgctgaagattcgcagcattcaataccaggcagccaaagagctgctcttgcaattattttggctctcaagctctgttcttcatcgcattctcatttctgtgtacatttgcaagatgtgtgtaatgtcattttccaaaaataaaatttgatttcaata

SEQ ID NO: 12639 - DNA, 518 bp, Artificial Sequence
  derived and/or modified sequence
aatgctgagctcagcataggtcatggtgacattggaaaaaaggcggaattgagcctggcagacccattaggcaccagtctttcttatctcctgtcctcctggtcccttgcaaatatattgatgtggcagtgtgtagcagctgagccctgcttgctttgtctctgaggttccaccaaaatatggaacttgattttggacactttgacgaaagagataagacatccaggaacatgcgaggctcccggatgaatgggttgcctagccccactcacagcgcccactgtagcttctaccgaaccagaaccttgcaggcactgagtaatgagaagaaagccaagaaggtacgtttctaccgcaatggggaccgctacttcaaggggattgtgtacgctgtgtcctctgaccgttttcgcagctttgacgccttgctggctgacctgacgcgatctctgtctgacaacatcaacctgcctcagggagtgcgttacatttacaccattgatggatccaggaagatc

SEQ ID NO: 12640 - DNA, 2422 bp, Artificial Sequence
  derived and/or modified sequence
gaaacctttctagctgttaatgcagcctgtgaatttttttaaaagcatgtaattaatcataggaggttggggggattcactaagcctgagttacatgggagaagctggacaaggcactaggacctagaaggcatctatccaccctggcaggaatttcttgcttggagctcagacaacaaaggcatagagagattggttttctttctctcagcatctccacccaaccagcagaaaaccggtctctgaggttccaccaaaatatggaacttgattttggacactttgacgaaagagataagacatccaggaacatgcgaggctcccggatgaatgggttgcctagccccactcacagcgcccactgtagcttctaccgaaccagaaccttgcaggcactgagtaatgagaagaaagccaagaaggtacgtttctaccgcaatggggaccgctacttcaaggggattgtgtacgctgtgtcctctgaccgttttcgcagctttgacgccttgctggctgacctgacgcgatctctgtctgacaacatcaacctgcctcagggagtgcgttacatttacaccattgatggatccaggaagatcggaagcatggatgaactggaggaaggggaaagctatgtctgttcctcagacaacttctttaaaaaggtggagtacaccaagaatgtcaatcccaactggtctgtcaacgtaaaaacatctgccaatatgaaagccccccagtccttggctagcagcaacagtgcacaggccagggagaacaaggactttgtgcgccccaagctggttaccatcatccgcagtggggtgaagcctcggaaggctgtgcgtgtgcttctgaacaagaagacagcccactcttttgagcaagtcctcactgatatcacagaagccatcaaactggagaccggggttgtcaaaaaactctacactctggatggaaaacaggtaacttgtctccatgatttctttggtgatgatgatgtgtttattgcctgtggtcctgaaaaatttcgctatgctcaggatgatttttctctggatgaaaatgaatgccgagtcatgaagggaaacccatcagccacagctggcccaaaggcatccccaacacctcagaagacttcagccaagagccctggtcctatgcgccgaagcaagtctccagctgactcagcaaacggaacctccagcagccagctctctacccccaagtctaagcagtctcccatctctacgcccaccagtcctggcagcctccggaagcacaaggacctgtacctgcctctgtccttggatgactcggactcgcttggtgattccatgtaaaggaggggagagtgctcagagtccagagtacaaatccaagcctatcattgtagtagggtacttctgctcaagtgtccaacagggctattggtgctttcaagtttttattttgttgttgttgttattttgaaaaacacattgtaatatgttgggtttattttcctgtgatttctcctctgggccactgatccacagttaccaattatgagagatagattgataaccatcctttggggcagcattccagggatgcaaaatgtgctagtccatgacctttcaatggaaagcttaggtgcctgcgttatatttgccctgtctaattttgcccatacagtcttccttctgtagagggctgtttacatatacagcacttaaaatgtttgtgtgggaaaaaaaaaactcattggcagatccaagaatgacaaacacaagtgccccttttctctggatctcaagaatggtggaggaccctggaaggacagcaaggcagctccccagcctcactcttcactcctgattgaggcccgggtttgttgtccagcaccaattctggctgtcaatggggagaaataaaccaacaacttataattgtgacaccagatgcttaggatcctggtgctgggttagctaagagaatagacagaattggaaaatactgcagacatttccgaagagtttataaagcacagtgaattcctggtcaatctctccactgaggcaatttggaatcaataagcaattgataatagtttggagtaagggacttcatatacctgattcctctagaaggctgtctaacataccacatgattacatgaactgtatggtatccatctatctctgttctattgaatgccttgttaacagccaacactgaaaacactgtgagaatttgttttcaggtctgacacctttcagtctctttttatagcaagaaatcaatatcctttttataaaaattcatgtctgtatttcaggagcaaactcttcaggctccttttttataaactggtgatttttcttttgtctaaaaaacacatgaagaaaatttaccaaaaaaaaaaaaaaaagcagaagaa

SEQ ID NO: 12641 - protein, 147 aa, Artificial Sequence
  derived and/or modified sequence
MGHFTEEDKATITSLWGKVNVEDAGGETLGRLLVVYPWTQRFFDSFGNLSSASAIMGNPKVKAHGKKVLTSLGDATKHLDDLKGTFAQLSELHCDKLHVDPENFKLLGNVLVTVLAIHFGKEFTPEVQASWQKMVTAVASALSSRYH

SEQ ID NO: 12642 - DNA, 444 bp, Artificial Sequence
  derived and/or modified sequence
atgggccattttacagaggaagacaaggccaccatcacgtcactttggggtaaagttaacgttgaagatgctgggggtgaaacgctgggaaggcttctggtagtctacccatggacccagcgtttttttgattcttttggaaacttgagttctgcttcagctataatggggaatccaaaagtcaaggcccatggcaaaaaagtgcttacctcattaggcgatgcaactaaacatctggacgatctcaagggcaccttcgcccagctgtctgagctgcactgcgacaagttgcatgttgatccggagaatttcaaactgctaggaaatgtactcgttacagtgctggctattcactttggcaaggaattcacacccgaagtgcaggcctcttggcagaagatggtgacagcggtggcttccgctttgtcatcacgctaccactag

SEQ ID NO: 12643 - DNA, 808 bp, Artificial Sequence
  derived and/or modified sequence
gaagaataaaaggaagcacccttcagcagttccacacactcgcttctggaacgtctgaggttatcaataagctcctagtccagacgccatgggtcatttcacagaggaggacaaggctactatcacaagcctgtggggcaaggtgaatgtggaagatgctggaggagaaaccctgggaaggctcctggttgtctacccatggacccagaggttctttgacagctttggcaacctgtcctctgcctctgccatcatgggcaaccccaaagtcaaggcacatggcaagaaggtgctgacttccttgggagatgccacaaagcacctggatgatctcaagggcacctttgcccagctgagtgaactgcactgtgacaagctgcatgtggatcctgagaacttcaagctcctgggaaatgtgctggtgaccgttttggcaatccatttcggcaaagaattcacccctgaggtgcaggcttcctggcagaagatggtgactgcagtggccagtgccctgtcctccagataccactgagctcactgcccatgattcagagctttcaaggataggctttattctgcaagcaatacaaataataaatctattctgctgagagatcacacatgattttcttcagctcttttttttacatctttttaaatatatgagccacaaagggtttatattgagggaagtgtgtatgtgtatttctgcatgcctgtttgtgtttgtggtgtgtgcatgctcctcatttatttttatatgagatgtgcattttgatgagcaaataaaagcagtaaagacacttgt

SEQ ID NO: 12644 - DNA, 444 bp, Artificial Sequence
  derived and/or modified sequence
atgggccacttcacagaggaggacaaggccaccatcaccagcctgtggggcaaggtgaatgtggaggatgctggaggagagaccctgggccgcctgctggtggtgtacccctggacccagcgcttctttgacagctttggaaacctgagcagcgccagcgccatcatgggcaaccccaaggtgaaggcccacggcaagaaggtgctgaccagcctgggagatgccaccaagcacctggatgacctgaagggcacctttgcccagctgtctgagctgcactgtgacaagctgcacgtggaccctgagaacttcaagctgctgggcaatgtgctggtgacagtgctggccatccactttgggaaggagttcaccccagaggtgcaggcctcctggcagaagatggtgacagctgtggccagcgccctgagcagccgctaccactag

SEQ ID NO: 12645 - DNA, 444 bp, Artificial Sequence
  derived and/or modified sequence
atgggccacttcaccgaggaggacaaggccaccatcaccagcctgtggggcaaagtgaatgtcgaagacgcaggaggtgagaccttggggcgcttactagtggtgtatccctggactcaaaggttttttgattcattcggaaatctatccagcgcaagcgccatcatgggaaaccccaaggtgaaagcccacggcaaaaaggtgctcacctctctgggagatgcaacgaagcacctggacgatttaaagggaaccttcgcccagctgtcagagttgcattgtgacaagttacatgtcgacccagaaaattttaagctactcgggaacgtgctggtgacagtactggccattcatttcgggaaagagttcacccccgaagtgcaagccagttggcagaaaatggtgactgcagtggcttccgcgcttagttcccggtatcattag

SEQ ID NO: 12646 - DNA, 444 bp, Artificial Sequence
  derived and/or modified sequence
atgggtcacttcactgaagaggacaaggcaacaatcacttccctgtggggaaaggtaaatgttgaggatgctggcggagagactctgggaagacttctcgtggtttacccatggacccagaggttctttgacagtttcggcaacctgagttctgcctctgcaattatggggaaccccaaggtgaaggcgcacggcaaaaaagttctgacctcgttgggcgacgcaacaaagcatctggatgatctgaaagggactttcgcccagctcagcgaactgcattgcgataagctccatgttgatcccgaaaacttcaagctcctgggcaatgttctcgtaactgtgctcgcgatccacttcggaaaagaattcacccccgaagtgcaagccagttggcagaagatggtgaccgcagttgcaagcgccctgagttctcgctaccattag

SEQ ID NO: 12647 - DNA, 444 bp, Artificial Sequence
  derived and/or modified sequence
atgggccacttcaccgaggaggacaaggccaccatcaccagcctgtggggcaaggtgaacgtggaggacgccggcggcgagaccctgggcagactgctggtggtgtacccctggacccagagattcttcgacagcttcggcaacctgagcagcgccagcgccatcatgggcaaccccaaggtgaaggcccacggcaagaaggtgctgaccagcctgggcgacgccaccaagcacctggacgacctgaagggcaccttcgcccagctgagcgagctgcactgcgacaagctgcacgtggaccccgagaacttcaagctgctgggcaacgtgctggtgaccgtgctggccatccacttcggcaaggagttcacccccgaggtgcaggccagctggcagaagatggtgaccgccgtggccagcgccctgagcagcagataccactag

SEQ ID NO: 12648 - protein, 420 aa, Artificial Sequence
  derived and/or modified sequence
MIIVAHVLLILLGATEILQADLLPDEKISLLPPVNFTIKVTGLAQVLLQWKPNPDQEQRNVNLEYQVKINAPKEDDYETRITESKCVTILHKGFSASVRTILQNDHSLLASSWASAELHAPPGSPGTSIVNLTCTTNTTEDNYSRLRSYQVSLHCTWLVGTDAPEDTQYFLYYRYGSWTEECQEYSKDTLGRNIACWFPRTFILSKGRDWLAVLVNGSSKHSAIRPFDQLFALHAIDQINPPLNVTAEIEGTRLSIQWEKPVSAFPIHCFDYEVKIHNTRNGYLQIEKLMTNAFISIIDDLSKYDVQVRAAVSSMCREAGLWSEWSQPIYVGNDEHKPLREWFVIVIMATICFILLILSLICKICHLWIKLFPPIPAPKSNIKDLFVTTNYEKAGSSETEIEVICYIEKPGVETLEDSVF

SEQ ID NO: 12649 - DNA, 1263 bp, Artificial Sequence
  derived and/or modified sequence
atgatcatcgtcgcccatgttcttttaatcctcctgggagcgactgaaatcctccaggcagacctgcttcctgatgagaagatctccctgttacctcccgtgaatttcacaattaaagttaccgggctcgcccaggtcctcttacagtggaagcctaaccccgaccaggagcagagaaatgttaatttggagtaccaagtgaagataaacgcccccaaggaagacgactatgagacccgcattacagaaagcaagtgcgtgaccattctccataagggctttagcgcaagtgtgcgaaccatcctacaaaacgatcacagcctgttagcatcatcctgggcctccgctgaactgcatgcaccaccaggctcccctgggacttcaattgtgaaccttacatgtaccacaaacacgactgaagataactattccagactgagaagttaccaagtgtcacttcactgcacttggttggttggcaccgatgcaccagaggatacacaatacttcttgtattaccgctatgggtcctggacagaggagtgtcaggaatactcaaaggacactctgggccgaaatattgcctgttggttcccgcgcacattcattcttagcaaaggccgggattggctggctgtcctcgttaatgggagtagtaagcactccgcaattaggccctttgatcagctcttcgctctgcatgctattgatcagatcaacccacccctcaacgtgaccgcggaaattgaagggactcgcctgtcaatacagtgggagaaacccgttagcgcctttccgattcactgtttcgactacgaggtgaaaatacacaacacacgtaacggctatctgcagattgaaaagttaatgaccaacgcgtttatatccattatcgacgatttatccaagtatgacgtccaagtccgggcagctgtgtcctctatgtgtcgcgaagccggcctctggtcagaatggtcccagcccatctatgtaggaaacgacgaacacaaacctcttagggagtggttcgtgattgtaattatggcaacaatttgtttcattctgttaatcttatccctcatttgtaagatctgccatctatggattaagctgtttccccccattcccgcgcctaaatcgaacatcaaagacctctttgtgacaacgaactacgaaaaagcaggatctagcgagaccgagattgaggtcatatgctacatcgaaaagccaggcgttgaaactctggaggattcagtcttttag

SEQ ID NO: 12650 - DNA, 1263 bp, Artificial Sequence
  derived and/or modified sequence
atgatcattgtagcccacgttctattgatcctgctgggtgctaccgagattttgcaggccgacctgcttcccgacgaaaaaatatctttgctgccgcccgtgaattttacaattaaagtaaccggactggcccaggtgctcttacaatggaagccaaacccggatcaggaacagagaaatgttaaccttgaataccaagtgaaaataaacgcgcctaaggaagacgattacgaaaccaggattacagaaagtaaatgcgtgacaattcttcacaagggtttctcagcaagcgtacggaccattttgcagaacgaccatagtttgttggccagtagttgggcttcagcggaactgcatgcccctccaggcagcccagggaccagcatagttaacttgacctgtaccacaaatacaacggaagataattactctcgccttcgatcctaccaggtttctctgcactgtacttggttagtaggcacagacgcaccagaggatacacagtattttctatattataggtatggctcgtggacagaagaatgccaggaatatagcaaggacactctgggtagaaacattgcatgctggttcccgcgaacctttattctgtctaaaggccgagattggttagccgtcctagtcaatggatccagcaagcattccgctatacggccatttgaccaacttttcgccttacatgctattgatcaaataaacccacctctgaacgttaccgccgagatcgaggggaccaggctctcaatccagtgggaaaaaccagtgagtgccttccccatccattgcttcgactacgaagtgaagatccacaatacccggaacgggtatctccagattgagaagctcatgacaaatgccttcatctcaattatcgacgatctgagtaagtatgacgttcaggtgagagccgcagtgtccagcatgtgtcgagaggccggcctctggtccgagtggtcacagccgatttatgtagggaatgatgaacacaagcctctcagagaatggttcgttattgtcatcatggcgactatctgctttatccttttaatcctgagtcttatttgtaaaatctgtcacctctggattaagcttttcccccccatccctgcaccaaagtcaaacattaaggacctgtttgtaacgacaaattacgagaaggccggctccagcgagacggagatcgaggtgatctgctatatcgagaaacctggtgttgagacacttgaggactctgttttttag

SEQ ID NO: 12651 - DNA, 2001 bp, Artificial Sequence
  derived and/or modified sequence
ccgctgcttctcatcgcatggccaccgcatttctcaggccaggcacattgagcattggtcctgtgcctgacgctatgctagatgctggggttgcagccacgagcatagacacgacagacacggtcctcgccatcttctgttgagtactggtcggaacaagaggatcgtctgtagacaggctacagattgttttagattgaagtttcctgtcatgttcactcatctttaaatcctcatagtgaaaaaggatatgatcatcgtggcgcatgtattactcatccttttgggggccactgagatactgcaagctgacttacttcctgatgaaaagatttcacttctcccacctgtcaatttcaccattaaagttactggtttggctcaagttcttttacaatggaaaccaaatcctgatcaagagcaaaggaatgttaatctagaatatcaagtgaaaataaacgctccaaaagaagatgactatgaaaccagaatcactgaaagcaaatgtgtaaccatcctccacaaaggcttttcagcaagtgtgcggaccatcctgcagaacgaccactcactactggccagcagctgggcttctgctgaacttcatgccccaccagggtctcctggaacctcaattgtgaatttaacttgcaccacaaacactacagaagacaattattcacgtttaaggtcataccaagtttcccttcactgcacctggcttgttggcacagatgcccctgaggacacgcagtattttctctactataggtatggctcttggactgaagaatgccaagaatacagcaaagacacactggggagaaatatcgcatgctggtttcccaggacttttatcctcagcaaagggcgtgactggcttgcggtgcttgttaacggctccagcaagcactctgctatcaggccctttgatcagctgtttgcccttcacgccattgatcaaataaatcctccactgaatgtcacagcagagattgaaggaactcgtctctctatccaatgggagaaaccagtgtctgcttttccaatccattgctttgattatgaagtaaaaatacacaatacaaggaatggatatttgcagatagaaaaattgatgaccaatgcattcatctcaataattgatgatctttctaagtacgatgttcaagtgagagcagcagtgagctccatgtgcagagaggcagggctctggagtgagtggagccaacctatttatgtgggaaatgatgaacacaagcccttgagagagtggtttgtcattgtgattatggcaaccatctgcttcatcttgttaattctctcgcttatctgtaaaatatgtcatttatggatcaagttgtttccaccaattccagcaccaaaaagtaatatcaaagatctctttgtaaccactaactatgagaaagctgggtccagtgagacggaaattgaagtcatctgttatatagagaagcctggagttgagaccctggaggattctgtgttttgactgtcactttggcatcctctgatgaactcacacatgcctcagtgcctcagtgaaaagaacagggatgctggctcttggctaagaggtgttcagaatttaggcaacactcaatttacctgcgaagcaatacacccagacacaccagtcttgtatctcttaaaagtatggatgcttcatccaaatcgcctcacctacagcagggaagttgactcatccaagcattttgccatgttttttctccccatgccgtacagggtagcacctcctcacctgccaatctttgcaatttgcttgactcacctcagacttttcattcacaacagacagcttttaaggctaacgtccagctgtatttacttctggctgtgcccgtttggctgtttaagctgccaattgtagcactcagctaccatctgaggaagaaagcattttgcatcagcctggagtgaaccatgaacttggattcaagactgtcttttctatagcaa

SEQ ID NO: 12652 - DNA, 2514 bp, Artificial Sequence
  derived and/or modified sequence
aaacaaaacagaaatgcaacgctttagagtacccacggaaaacttgtttaccttgtcaccatgagtaaaagttaattcccactcctgaagagagcaaaccaactctgaaagagagtgaaaatgcagacaagacagttatcagataatggctatctggacgagagattctttcgtttgacagcagtttggttgttgggagttccagttcagctcctgcacagttgctctgtacaaatcctcctccatatttgcttagagaaaacgtgttgccatcccatcatgaaggaagctgcctgagagtttttaaccattacagccgtgatgatgaaagagtgaagaaccgcctctaagttaaaaagtgcacccagagataaggttcgttctcaatgccctgccgctgcttctcatcgcatggccaccgcatttctcaggccaggcacattgagcattggtcctgtgcctgacgctatgctagatgctggggttgcagccacgagcatagacacgacagacacggtcctcgccatcttctgttgagtactggtcggaacaagaggatcgtctgtagacaggatatgatcatcgtggcgcatgtattactcatccttttgggggccactgagatactgcaagctgacttacttcctgatgaaaagatttcacttctcccacctgtcaatttcaccattaaagttactggtttggctcaagttcttttacaatggaaaccaaatcctgatcaagagcaaaggaatgttaatctagaatatcaagtgaaaataaacgctccaaaagaagatgactatgaaaccagaatcactgaaagcaaatgtgtaaccatcctccacaaaggcttttcagcaagtgtgcggaccatcctgcagaacgaccactcactactggccagcagctgggcttctgctgaacttcatgccccaccagggtctcctggaacctcaattgtgaatttaacttgcaccacaaacactacagaagacaattattcacgtttaaggtcataccaagtttcccttcactgcacctggcttgttggcacagatgcccctgaggacacgcagtattttctctactataggtatggctcttggactgaagaatgccaagaatacagcaaagacacactggggagaaatatcgcatgctggtttcccaggacttttatcctcagcaaagggcgtgactggcttgcggtgcttgttaacggctccagcaagcactctgctatcaggccctttgatcagctgtttgcccttcacgccattgatcaaataaatcctccactgaatgtcacagcagagattgaaggaactcgtctctctatccaatgggagaaaccagtgtctgcttttccaatccattgctttgattatgaagtaaaaatacacaatacaaggaatggatatttgcagatagaaaaattgatgaccaatgcattcatctcaataattgatgatctttctaagtacgatgttcaagtgagagcagcagtgagctccatgtgcagagaggcagggctctggagtgagtggagccaacctatttatgtgggaaatgatgaacacaagcccttgagagagtggtttgtcattgtgattatggcaaccatctgcttcatcttgttaattctctcgcttatctgtaaaatatgtcatttatggatcaagttgtttccaccaattccagcaccaaaaagtaatatcaaagatctctttgtaaccactaactatgagaaagctgggtccagtgagacggaaattgaagtcatctgttatatagagaagcctggagttgagaccctggaggattctgtgttttgactgtcactttggcatcctctgatgaactcacacatgcctcagtgcctcagtgaaaagaacagggatgctggctcttggctaagaggtgttcagaatttaggcaacactcaatttacctgcgaagcaatacacccagacacaccagtcttgtatctcttaaaagtatggatgcttcatccaaatcgcctcacctacagcagggaagttgactcatccaagcattttgccatgttttttctccccatgccgtacagggtagcacctcctcacctgccaatctttgcaatttgcttgactcacctcagacttttcattcacaacagacagcttttaaggctaacgtccagctgtatttacttctggctgtgcccgtttggctgtttaagctgccaattgtagcactcagctaccatctgaggaagaaagcattttgcatcagcctggagtgaaccatgaacttggattcaagactgtcttttctatagcaagtgagagccacaaattcctcacccccctacattctagaatgatctttttctaggtagattgtgtatgtgtgtgtatgagagagagagagagagagagagagagagaaattatctcaagctccagaggcctgatccaggatacatcatttgaaaccaactaatttaaaagcataatagagctaatatat

SEQ ID NO: 12653 - DNA, 1263 bp, Artificial Sequence
  derived and/or modified sequence
atgatcatcgtggcccacgtgctgctgatcctgctgggcgccacagagatcctgcaggccgacctgctgcctgatgagaagatcagcctgctgccccctgtgaacttcaccatcaaggtgacaggcctggcccaggtgctgctgcagtggaagcccaacccagaccaggagcagagaaatgtgaacctggagtaccaggtgaagatcaatgcccccaaggaggatgattatgagacccgcatcacagagagcaaatgtgtgaccatcctgcacaagggcttcagcgcctctgtgaggaccatcctgcagaatgaccacagcctgctggccagctcctgggccagcgctgagctgcacgcccctcctggcagccctggcaccagcatcgtgaacctgacctgcaccaccaacaccacagaggacaactacagccggctgcggagctaccaggtgtccctgcactgcacctggctggtgggcacagatgcccctgaggacacccagtacttcctgtactaccgctatggctcctggacagaggagtgccaggagtacagcaaggacaccctgggcaggaacatcgcctgctggttccccaggaccttcatcctgagcaagggccgggactggctggccgtgctggtgaatggcagcagcaagcacagcgccatccggccctttgaccagctgtttgccctgcacgccatcgaccagatcaacccccccctgaatgtgacagctgagattgagggcacccggctgagcatccagtgggagaagcctgtgtctgccttccccatccactgctttgattatgaggtgaagatccacaacaccagaaatggctacctgcagatcgagaagctgatgaccaatgccttcatcagcatcattgatgacctgagcaaatatgatgtgcaggtgcgggctgctgtgtcctccatgtgccgggaggccggcctgtggagcgagtggagccagcccatctacgtgggcaatgatgagcacaagcccctgcgggagtggtttgtgattgtcatcatggccaccatctgcttcatcctgctgatcctgagcctcatctgcaagatctgccacctgtggatcaagctgtttcctcccatcccagcccccaagagcaacatcaaggacctgtttgtgaccaccaactatgagaaggccggcagcagcgagacagaaattgaagtcatctgctacatcgagaagccaggagtggagaccctggaggacagcgtcttctag

SEQ ID NO: 12654 - DNA, 1263 bp, Artificial Sequence
  derived and/or modified sequence
atgatcatcgtggcccacgtgctgctgatcctgctgggcgccaccgaaatcctacaggcagacctgctgccagacgaaaagataagcctgctgccgcccgtcaacttcactatcaaagtgactggcttggctcaggtgctcctgcagtggaagccaaatcccgatcaagaacaaagaaacgtgaaccttgagtaccaggtcaagattaatgctcccaaagaagatgactacgagaccagaataacggaatcaaagtgtgtgactattcttcataaggggttctcagcctccgtccggacaattttgcagaacgatcactctctgctcgcatcttcgtgggcctcagccgaactccacgctcccccaggatctcctggaacgtcaatcgtcaatctgacctgtaccacaaatactacagaggacaattattccaggttgcggtcctatcaggtgtcactgcattgtacttggctggtcggcactgatgcacctgaagacacccagtactttctgtattaccggtatggaagctggaccgaggagtgccaggagtattccaaggataccctcggtcgaaacattgcttgctggtttcccagaacctttatcctttccaagggcagggattggctggccgtactcgtgaatggtagttcaaagcattccgctatccgacccttcgaccaactttttgccttacacgcgattgaccagattaatccccccctgaatgtaaccgcagagattgagggcacgagactcagcatacagtgggagaagccagtgtcggcttttcccatacactgcttcgactatgaggtgaaaatccacaacactcgcaatgggtacttacaaattgagaaactgatgactaatgcttttataagcatcattgatgatttgtctaagtacgacgtgcaggtgagagctgccgtgtccagcatgtgtagagaggcagggctctggtccgaatggtcacagcccatctacgttgggaacgatgagcataaacctctgcgagagtggtttgttatagtgataatggctacaatctgttttatcttactcattctgtccctgatctgtaagatatgccatctgtggattaagctcttcccgccaatccccgctcccaagagcaacattaaggacctgtttgtcacaacgaactacgaaaaagcgggatcctccgaaactgagatcgaagttatctgttacattgaaaaaccaggtgtagaaacactggaagactccgtgttttag

SEQ ID NO: 12655 - DNA, 1263 bp, Artificial Sequence
  derived and/or modified sequence
atgatcatcgtggcccacgtgctgctgatcctgctgggcgccaccgagattctgcaagctgacttactgccagacgaaaagatctcattactccctcccgtgaacttcactattaaggtcacgggccttgcgcaggttctcctgcagtggaagcccaatccagatcaggaacagcggaatgtgaatctcgaataccaggtaaagattaacgccccgaaagaagacgactatgagactaggattactgaaagtaagtgcgtgaccattcttcataaaggtttcagtgcttccgtgaggaccattctccagaacgaccacagtcttctggcttcctcatgggcgtcagctgagctgcacgctccccctggcagcccagggacgagtatcgtgaacctcacatgcacaactaacacgacggaagacaattattccaggctgcgaagttaccaggtaagtctccattgcacatggctcgtgggtacggacgcacctgaggacactcagtattttctgtattacagatatggatcgtggaccgaggaatgtcaggaatacagcaaggacaccctgggacgtaacatagcctgttggttcccgcggaccttcattctgtccaagggccgggattggctggctgttctagtgaatgggtcttctaagcactccgccatccgaccttttgatcaactcttcgccctgcacgccatcgaccagataaacccgccgctgaatgtcaccgccgagatagaaggaaccagattgtcaatccaatgggagaagccagtctcggcttttcccattcattgtttcgactacgaggtgaagatacacaacacaaggaatggctatctgcagatcgagaaactgatgactaatgcattcatatccataattgacgatctctcaaagtacgatgtacaggtaagggccgcggtgtcaagcatgtgcagagaagctggcctgtggtccgaatggtcccagcccatctacgtcgggaatgatgagcacaagccactacgcgagtggtttgtcatagtgattatggctacgatctgttttattctgctaattctgtcactgatctgtaagatctgtcacttgtggattaaactgtttcccccaatccctgcacctaaaagcaacataaaggatttattcgtaacaaccaactatgagaaagccgggtcctctgagaccgagattgaggtcatctgttatatcgagaaacctggcgtggagacactggaagattcggtgttctag

SEQ ID NO: 12656 - DNA, 1263 bp, Artificial Sequence
  derived and/or modified sequence
atgataatcgtggcccatgtgctgctcatcctcctgggcgcaactgaaattctccaagcagacctgctgcccgacgaaaagatctctctcctcccgcctgtcaactttaccatcaaagttaccggcctggcccaggtgcttctgcagtggaaacctaaccctgaccaggaacagaggaatgttaacctggagtatcaggttaaaattaatgctcccaaggaggacgactacgagacaagaatcactgaaagcaaatgtgtgaccatcctacataagggattttcagcctctgtgagaactatcttgcagaacgatcacagcctcttggcaagctcctgggctagcgcggagttacacgcccctccgggtagcccaggtacatcaattgttaatctgacatgcacgacaaacaccactgaggacaattattcccggcttagatcctatcaggtttctctgcactgcacatggctcgttggcactgacgcccctgaagacacccagtacttcctctactacagatacgggtcttggaccgaagagtgccaggagtacagcaaggacaccctggggaggaacatagcttgttggtttccgaggacattcattctgagcaaggggagggactggctagccgttctcgtgaatggcagctccaaacatagtgctattcggcctttcgaccagctgtttgccctgcatgctatagatcagatcaatccgccactgaacgtgacagctgaaatagaagggaccagactcagtatacagtgggaaaaaccagtctccgcatttcccattcattgttttgattacgaggtgaagatccataatacacggaatggctatctgcagatcgagaagctgatgactaacgcctttatcagcatcatcgatgatttatctaaatatgatgttcaagtgagagcggcagtgagttcaatgtgtcgggaggcgggactgtggtcggagtggagccagccaatatacgtcggcaacgacgagcataaaccactcagggagtggttcgttatcgtgatcatggcgacgatttgctttattcttcttatcctcagtttgatttgcaaaatttgtcacctgtggatcaagctgttccccccaatcccagcccctaagagtaacataaaggacctgtttgtcaccaccaactacgagaaggctggctcaagtgagaccgaaattgaggtgatctgttacattgagaagccaggggttgagacccttgaagactctgtgttctag

SEQ ID NO: 12657 - DNA, 1263 bp, Artificial Sequence
  derived and/or modified sequence
atgatcattgtggcccacgttctgttgatcctcctcggggcaacagaaatacttcaggccgacttactgcccgatgagaagatatcactcttacccccagtgaatttcaccataaaggtgactggcttggcacaggtgctgttgcagtggaaacccaatccggaccaagagcagcgtaatgtgaatctagagtatcaggtgaagatcaatgcccctaaggaggacgattacgagacccgtatcacagagtccaaatgtgtgaccattctccacaagggatttagcgctagcgtgcggactatactgcaaaatgatcattcactgctggctagctcttgggcatctgcagagttgcacgccccaccgggttctccgggtaccagcatagtcaacttgacatgcacaaccaatactacagaagacaactattctcgcctgcgctcgtatcaggtgtcactgcactgtacatggttagtgggaaccgacgcccctgaggacacacagtactttttgtattataggtatgggtcttggaccgaagaatgccaagagtatagcaaggacactctcggtcggaacatcgcttgttggttcccacggactttcatcctaagtaaaggtagagattggctggcggttctagtgaatgggagttccaaacacagcgccatcaggcctttcgatcagctgttcgcactgcacgccatagatcagatcaaccctcctcttaacgtcactgcggaaattgagggcacccgcctgtccatacagtgggagaagccagtgagcgcttttcccattcattgctttgattacgaggtgaagatccacaatacacgcaacggttacctacagattgagaagctcatgactaacgcctttatctccatcatcgacgatcttagcaaatatgacgtacaggttagagcggcagtgtccagtatgtgtagagaggccggattatggagcgagtggagtcagcccatctacgtaggcaacgatgaacacaaacctttgcgggagtggttcgtaattgtaatcatggctaccatctgttttatcctcctaattctctcgctcatttgtaaaatttgtcacctgtggatcaaactgttccctcctatacctgcgcctaaatctaacataaaagatctttttgtcaccactaactacgagaaagctggctcctctgagacggaaatcgaggtaatatgctacattgaaaagcccggtgtcgagaccctggaagatagtgtgttttag

SEQ ID NO: 12658 - DNA, 1263 bp, Artificial Sequence
  derived and/or modified sequence
atgatcatcgtggcccacgtgctgctgatcctgctgggcgccaccgagatcctgcaggccgacctgctgcccgacgagaagatcagcctgctgccccccgtgaacttcaccatcaaggtgaccggcctggcccaggtgctgctgcagtggaagcccaaccccgaccaggagcagagaaacgtgaacctggagtaccaggtgaagatcaacgcccccaaggaggacgactacgagaccagaatcaccgagagcaagtgcgtgaccatcctgcacaagggcttcagcgccagcgtgagaaccatcctgcagaacgaccacagcctgctggccagcagctgggccagcgccgagctgcacgccccccccggcagccccggcaccagcatcgtgaacctgacctgcaccaccaacaccaccgaggacaactacagcagactgagaagctaccaggtgagcctgcactgcacctggctggtgggcaccgacgcccccgaggacacccagtacttcctgtactacagatacggcagctggaccgaggagtgccaggagtacagcaaggacaccctgggcagaaacatcgcctgctggttccccagaaccttcatcctgagcaagggcagagactggctggccgtgctggtgaacggcagcagcaagcacagcgccatcagacccttcgaccagctgttcgccctgcacgccatcgaccagatcaacccccccctgaacgtgaccgccgagatcgagggcaccagactgagcatccagtgggagaagcccgtgagcgccttccccatccactgcttcgactacgaggtgaagatccacaacaccagaaacggctacctgcagatcgagaagctgatgaccaacgccttcatcagcatcatcgacgacctgagcaagtacgacgtgcaggtgagagccgccgtgagcagcatgtgcagagaggccggcctgtggagcgagtggagccagcccatctacgtgggcaacgacgagcacaagcccctgagagagtggttcgtgatcgtgatcatggccaccatctgcttcatcctgctgatcctgagcctgatctgcaagatctgccacctgtggatcaagctgttcccccccatccccgcccccaagagcaacatcaaggacctgttcgtgaccaccaactacgagaaggccggcagcagcgagaccgagatcgaggtgatctgctacatcgagaagcccggcgtggagaccctggaggacagcgtgttctag

SEQ ID NO: 12659 - protein, 468 aa, Artificial Sequence
  derived and/or modified sequence
MLAVGCALLAALLAAPGAALAPRRCPAQEVARGVLTSLPGDSVTLTCPGVEPEDNATVHWVLRKPAAGSHPSRWAGMGRRLLLRSVQLHDSGNYSCYRAGRPAGTVHLLVDVPPEEPQLSCFRKSPLSNVVCEWGPRSTPSLTTKAVLLVRKFQNSPAEDFQEPCQYSQESQKFSCQLAVPEGDSSFYIVSMCVASSVGSKFSKTQTFQGCGILQPDPPANITVTAVARNPRWLSVTWQDPHSWNSSFYRLRFELRYRAERSKTFTTWMVKDLQHHCVIHDAWSGLRHVVQLRAQEEFGQGEWSEWSPEAMGTPWTESRSPPAENEVSTPMQALTTNKDDDNILFRDSANATSLPVQDSSSVPLPTFLVAGGSLAFGTLLCIAIVLRFKKTWKLRALKEGKTSMHPPYSLGQLVPERPRPTPVLVPLISPPVSPSSLGSDNTSSHNRPDARDPRSPYDISNTDYFFPR

SEQ ID NO: 12660 - DNA, 1407 bp, Artificial Sequence
  derived and/or modified sequence
atgctcgccgtcggctgtgcactattggccgccttacttgcagccccaggggcagctcttgcacctaggcgatgtcctgcacaggaggtggctagaggtgtgcttacatccctgcctggtgactctgtgacactcacctgtcccggcgttgaaccggaggacaatgccaccgtccactgggtgctgcgcaaacctgccgctgggtcacatccatcgcggtgggcaggtatggggcgccggttgctcctacgttcggtacagttgcacgacagcgggaattactcgtgttaccgtgccggcagacctgcagggactgtgcacctcctggtagatgtgccgcccgaggagccacagctctcttgttttcgcaaatcccctctgtcaaacgttgtttgcgaatggggtccaagaagtacgccctctctcacaactaaggcggtgctgctggtgcgcaaattccagaattcgccggcagaagattttcaggagccttgccagtatagtcaggagtcacagaaattctcttgccagctcgccgtgcctgaaggcgactccagtttctatatagtgtccatgtgtgtggcctctagtgtgggtagcaaatttagtaagacccagacatttcagggctgcggcattcttcagccagatcccccagccaacattacagtaacagcggtggcaaggaacccgcggtggttatcagtgacctggcaagacccccattcttggaatagttcattctatcgactgcgcttcgaacttcggtacagggctgaacgctccaagaccttcaccacttggatggtgaaggacctccagcaccactgtgtgattcatgatgcatggtctggcctacggcacgttgttcagctgcgtgcccaggaagaattcgggcagggcgagtggagcgagtggagtcctgaagctatgggcaccccctggaccgagagtcgctctccgcccgctgaaaatgaggttagtaccccgatgcaggccttaactacaaataaagacgacgataatatcttgttcagagattctgcaaacgcaaccagcctgcccgttcaagattcatcctcagtgcctctccctacatttctggtcgctggcggaagtttggctttcgggaccttactgtgtatcgcgattgtgttacgatttaaaaagacatggaaattgcgggcactgaaagagggaaagacgtcgatgcacccaccttacagtttaggacagctggtcccggaaagacccaggcccactccggtcctcgtgccgctgataagcccaccagtgtccccgtcttcgttaggttctgataacacctccagtcataaccgccctgatgctagggatccgaggagcccatatgacatctccaataccgattatttttttccacggtag

SEQ ID NO: 12661 - DNA, 5914 bp, Artificial Sequence
  derived and/or modified sequence
ggcggtcccctgttctccccgctcaggtgcggcgctgtggcaggaagccaccccctcggtcggccggtgcgcggggctgttgcgccatccgctccggctttcgtaaccgcaccctgggacggcccagagacgctccagcgcgagttcctcaaatgttttcctgcgttgccaggaccgtccgccgctctgagtcatgtgcgagtgggaagtcgcactgacactgagccgggccagagggagaggagccgagcgcggcgcggggccgagggactcgcagtgtgtgtagagagccgggctcctgcggatgggggctgcccccggggcctgagcccgcctgcccgcccaccgccccgccccgcccctgccacccctgccgcccggttcccattagcctgtccgcctctgcgggaccatggagtggtagccgaggaggaagcatgctggccgtcggctgcgcgctgctggctgccctgctggccgcgccgggagcggcgctggccccaaggcgctgccctgcgcaggaggtggcgagaggcgtgctgaccagtctgccaggagacagcgtgactctgacctgcccgggggtagagccggaagacaatgccactgttcactgggtgctcaggaagccggctgcaggctcccaccccagcagatgggctggcatgggaaggaggctgctgctgaggtcggtgcagctccacgactctggaaactattcatgctaccgggccggccgcccagctgggactgtgcacttgctggtggatgttccccccgaggagccccagctctcctgcttccggaagagccccctcagcaatgttgtttgtgagtggggtcctcggagcaccccatccctgacgacaaaggctgtgctcttggtgaggaagtttcagaacagtccggccgaagacttccaggagccgtgccagtattcccaggagtcccagaagttctcctgccagttagcagtcccggagggagacagctctttctacatagtgtccatgtgcgtcgccagtagtgtcgggagcaagttcagcaaaactcaaacctttcagggttgtggaatcttgcagcctgatccgcctgccaacatcacagtcactgccgtggccagaaacccccgctggctcagtgtcacctggcaagacccccactcctggaactcatctttctacagactacggtttgagctcagatatcgggctgaacggtcaaagacattcacaacatggatggtcaaggacctccagcatcactgtgtcatccacgacgcctggagcggcctgaggcacgtggtgcagcttcgtgcccaggaggagttcgggcaaggcgagtggagcgagtggagcccggaggccatgggcacgccttggacagaatccaggagtcctccagctgagaacgaggtgtccacccccatgcaggcacttactactaataaagacgatgataatattctcttcagagattctgcaaatgcgacaagcctcccagtgcaagattcttcttcagtaccactgcccacattcctggttgctggagggagcctggccttcggaacgctcctctgcattgccattgttctgaggttcaagaagacgtggaagctgcgggctctgaaggaaggcaagacaagcatgcatccgccgtactctttggggcagctggtcccggagaggcctcgacccaccccagtgcttgttcctctcatctccccaccggtgtcccccagcagcctggggtctgacaatacctcgagccacaaccgaccagatgccagggacccacggagcccttatgacatcagcaatacagactacttcttccccagatagctggctgggtggcaccagcagcctggaccctgtggatgataaaacacaaacgggctcagcaaaagatgcttctcactgccatgccagcttatctcaggggtgtgcggcctttggcttcacggaagagccttgcggaaggttctacgccaggggaaaatcagcctgctccagctgttcagctggttgaggtttcaaacctccctttccaaatgcccagcttaaaggggctagagtgaacttgggccactgtgaagagaaccatatcaagactctttggacactcacacggacactcaaaagctgggcaggttggtgggggcctcggtgtggagaagcggctggcagcccacccctcaacacctctgcacaagctgcaccctcaggcaggtgggatggatttccagccaaagcctcctccagccgccatgctcctggcccactgcatcgtttcatcttccaactcaaactcttaaaacccaagtgccttagcaaattctgtttttctaggcctggggacggcttttacttaaaccgccaaggctgggggaagaagctctctcctccctttcttccctacagttgaaaaacagctgagggtgagtgggtgaataatacagtatctcagggcctggtcgttttcaacagaattataattagttcctcattagcattttgctaaatgtgaatgatgatcctaggcatttgctgaatacagaggcaactgcattggctttgggttgcaggacctcaggtgagaagcagaggaaggagaggagaggggcacagggtctctaccatcccctgtagagtgggagctgagtgggggatcacagcctctgaaaaccaatgttctctcttctccacctcccacaaaggagagctagcagcagggagggcttctgccatttctgagatcaaaacggttttactgcagctttgtttgttgtcagctgaacctgggtaactagggaagataatattaaggaagacaatgtgaaaagaaaaatgagcctggcaagaatgtgtttaaacttggtttttaaaaaactgctgactgttttctcttgagagggtggaatatccaatattcgctgtgtcagcatagaagtaacttacttaggtgtgggggaagcaccataactttgtttagcccaaaaccaagtcaagtgaaaaaggaggaagagaaaaaatattttcctgccaggcatggtggcccacgcacttcgggaggtcgaggcaggaggatcacttgagtccagaagtttgagatcagcctgggcaatgtgataaaaccccatctctacaaaaagcataaaaattagccaagtgtggtagagtgtgcctgaagtcccagatacttggggggctgaggtgggaggatctcttgagcctgggaggtcaaggctgcagtgagccgagattgcaccactgcactccagcctgggtgacagagcaagtgagaccctgtctcaaaaaaagaaaaagaaaaagaaaaaatattttccctattagagaagagattgtggtttcattctgtattttgtttttgtcttaaaaagtggaaaaatagcctgcctcttctctactctagggaaaaaccagcgtgtgactactcccccaggtggttatggagagggtgtccggtccctgtcccagtgccgagaaggaagcctcccacgactgcccggcagggtcctagaaattccccaccctgaaagccctgagctttctgctatcaaagaggttttaaaaaaatcccatttaaaaaaaatcccttacctcggtgccttcctctttttatttagttccttgagttgattcagctctgcaagaattgaagcaggactaaatgtctagttgtaacaccatgattaaccacttcagctgacttttctgtccgagctttgaaaattcagtggtgttagtggttacccagttagctctcaagttatcagggtattccagagtggggatatgatttaaatcagccgtgtaaccatggacccaatatttaccagaccacaaaacttttctaatactctaccctcttagaaaaaccaccaccatcaccagacaggtgcgaaaggatgaaagtgaccatgttttgtttacggttttccaggtttaagctgttactgtcttcagtaagccgtgattttcattgctgggcttgtctgtagattttagaccctattgctgcttgaggcaactcatcttaggttggcaaaaaggcaggatggccgggcgcggtggctcacgcctgtaatcctagcactttgggaggccaaggtgggaggattgcttgagctcaggagtttgagaccaacctgggtaacatagtgagacaccatctctattatgaacaataacagttaagaaaaaaaaaggcaggcaggcggttatggtggttccctcccatcccaccacataaagtttctgagacttgagaacagcaaaatgctgttaaagggaaatattaagaatgagaatctgcagtaagggtgattctgtgcccacagttcttcaattctttataccgttttacccacatgtggtgttaccaaagccgggcagaaccatgctagcggaagatgtgaaatccagatagctcattattgccaagagctaggcagctttgatctccaaattgttattgctttcatttttattgtaatggaattgctttgttttgtttttttgtttttgtattgaagagggttgttttccctttatttttcataagctaatgtaaatgaagaaaaaatgtcttctctgggctgtaggcctggctcagcgtacacaggtatacatcctaagctctctatgttctctaatctgtggtgactgaacatgtgtctcaatgcacggggcatttctacctgtgtttctgcagcacccccactgccttgagtccccagcagtgctgttatttgcctaacacctgtagccatctgccacgcagccagacgtgaaacgctgagacagagaccatttaggttaaatacgacagcttatcctgctgggtggggaaagtaaaaaatatgctggttcaaggcctaaagtaaaatgatcaataatgtttgtagcattaatgaaatattttcaagaaatgtgtccaggggtagcactggctatgttgacgaggcctttggtaactcagagagctcttggccctgatggggacttgcccttacgctttctttatcaggctctgagttcacacggagcctctggcacttccctgctgtcttgggagaaaggaaactggttgccgcggcaggttgtggaatctgttgctggaaccaggctggaagcccacctggtagtgaacagggcccagtggggcaggctgggcatgttgtggtctatgggtttgtttcctggagaatgttcaggaatgtcttcccagctgctttggtgctgagctctattatctcacagcacgtccagaaggctaacccaggtggggaggatgctgacaccagctccaggtggagttggtggtcttaatttggagatgcaggggcaacctgtgaccctttgaggcaagagccctgcacccagctgtcccgtgcagccgtgggcaggggctgcacacggaggggcaggcgggccagttcagggtccgtgccaggccctcctcagtgccctgtgaaggcctcctgtcctccgtgcggctgggcaccagcaccagggagtttctatggcaaccttagtgattattaaggaacactgtcagttttatgaacatatgctcaaatgaaattctactttaggaggaaaggattggaacagcatgtcacaaggctgttaattaacagagagaccttattggatggagatcacatctgttaaatagaatacctcaactctacgttgttttcttggagataaataatagtttcaagtttttgtttgtttgttttacctaattacctgaaagcaaataccaaaggctgatgtctgtatatggggcaaagggtcagtatatttttcagtgtttttttttctaccagctattttgcatttaaagtgaacattgtgtttggaataaatactcttaaaaaata

SEQ ID NO: 12662 - DNA, 1407 bp, Artificial Sequence
  derived and/or modified sequence
atgctggccgtgggctgtgccctgctggccgccctgctggccgcccctggggccgccctggccccccggcgctgcccagcccaggaggtggcccggggcgtgctgaccagcctgcccggggacagcgtgaccctgacctgccctggggtggagccagaagataatgccaccgtgcactgggtgctgaggaagccagctgctggcagccaccccagccgctgggccggcatgggccgccgcctgctgctgcggtctgtgcagctgcatgattctggcaactacagctgctacagagctggccggcctgctggcaccgtgcacctgctggtggatgtgcccccagaggagccccagctgagctgcttcaggaagagccccctgagcaatgtggtgtgtgagtggggccccaggagcacccccagcctgaccaccaaggctgtgctgctggtgaggaagttccagaacagccctgctgaggacttccaggagccctgccagtacagccaggagagccagaagttcagctgccagctggccgtgcctgagggggacagcagcttctacatcgtgtccatgtgtgtggccagctctgtgggcagcaagttcagcaagacccagaccttccagggctgcggcatcctgcagcctgaccccccagccaacatcaccgtgacagctgtggccaggaacccccgctggctgtctgtgacctggcaggacccccacagctggaacagcagcttctaccgcctgcgctttgagctgcgctacagagctgagaggagcaagaccttcaccacctggatggtgaaggacctgcagcaccactgtgtgattcatgatgcctggagcggcctgcggcacgtggtgcagctgcgggcccaggaggagtttggccagggcgagtggagcgagtggagccctgaggccatgggcaccccctggacagagagccgcagccccccagcagaaaatgaggtgtccacccccatgcaggccctgaccaccaacaaggatgatgacaacatcctcttccgggacagcgccaatgccaccagcctgcctgtgcaggacagcagctctgtgcccctgcccaccttcctggtggccggcggcagcctggccttcggcaccctgctgtgcatcgccatcgtgctgcgcttcaagaagacctggaagctgcgggccctgaaggagggcaagacctccatgcaccccccctacagcctgggccagctggtgcctgagcggccccggcccacccctgtgctggtgcccctcatcagcccccctgtgagccccagcagcctgggcagtgacaacaccagcagccacaacagaccagatgcccgggaccccaggagcccctatgacatcagcaacacagactacttcttccccaggtag

SEQ ID NO: 12663 - DNA, 1407 bp, Artificial Sequence
  derived and/or modified sequence
atgctggccgtgggctgcgccctgctggccgccctgctggccgcccccggggcagccctggctccaaggaggtgccccgcccaggaggtggccaggggggtgcttacaagcttgccaggtgactctgttacactcacctgccctggggtggagccagaggacaacgcgacagtacattgggtcttacgcaagcctgcagccggttctcatccttcgcgatgggcggggatgggccggcgcctgttgctacgcagcgtgcagctccacgatagcggcaattatagctgttatagagccgggaggcctgcaggtacagtgcacctgctggtggatgtgccccctgaagagccccagctctcctgttttcgcaagagccccctttctaatgtggtctgcgagtggggacctcggtcaactccaagtctgacaactaaggcggtcctgttagtccgcaaatttcagaactctccagccgaggactttcaggagccttgtcagtacagccaagagagccagaagttttcctgccagctcgctgtgccagaaggtgatagcagtttctacattgtgtcaatgtgcgtggccagctccgttggatctaagtttagcaagactcagacgttccagggatgtggtattctgcaacccgacccacccgccaacatcaccgtaacagcggtggccagaaatccccgctggttgtctgtgacgtggcaagacccgcactcctggaacagctctttttacagattgcgcttcgagctaaggtacagggcggagcggagtaagacctttaccacatggatggtgaaagacttacagcatcattgtgtgatccacgacgcctggtccggccttcgccacgtggttcagttaagggcccaggaggaattcggacagggcgaatggagcgaatggtcacctgaagctatgggcacgccatggacggagagtagatcacctccagccgaaaatgaggtaagcacaccaatgcaggctctcaccacaaacaaagacgatgacaacatcttgtttcgcgactccgcaaacgccacaagcctgcccgttcaggattcctcttccgtgccactgccaaccttcttagtcgccggaggaagcctggcctttgggacattattatgcatcgccatcgttctgcggtttaagaaaacatggaagctacgcgcgctcaaagagggaaagacaagtatgcatccaccttatagcctcggacaactagtgcctgagcggccacgacctacaccagttctcgtgcctctcatctccccacctgtgagccccagcagtctggggtccgacaacacatctagccacaaccgtcctgacgcaagagacccaaggagcccctatgacattagcaacactgattacttctttccgaggtag

SEQ ID NO: 12664 - DNA, 1407 bp, Artificial Sequence
  derived and/or modified sequence
atgctggctgtgggctgcgcactcttggccgcattacttgctgcgcctggagccgctctggcccctcgaagatgtcccgcacaagaggtggcccgaggcgtcctgacctctctcccaggggattctgtaacattaacctgtcctggagtcgaaccagaagacaatgctactgtgcattgggtcttgcgcaagccggcagctggctcccaccccagcagatgggcgggtatgggaaggcggctgctgctcagaagtgtgcaactgcatgattccggtaactacagctgctatagggctggcagacccgctgggacagttcatctgttggtggatgtccctcccgaggaacctcagctgtcctgcttccggaagtcacccttatcgaatgtggtttgtgagtggggccctaggagtactccctcactgactaccaaagccgtgctgctcgtgaggaaatttcaaaatagccccgctgaggacttccaggagccttgccagtactcccaagagagccagaaatttagttgccagctcgcagtgccagaaggcgattcttcattctacattgtgtcaatgtgcgtcgctagtagtgtggggagtaaatttagtaaaactcagacgttccagggttgcggcattctgcagcccgacccacccgcaaatattacggtaacagccgtggcacgtaacccacgctggctatccgtcacttggcaggaccctcactcatggaattccagcttttatcggttacgctttgagctgaggtatagagccgaacggtccaaaacattcacaacttggatggttaaggacttgcaacaccattgtgtcattcacgatgcatggtctgggcttcgtcacgtggttcagctgagagcccaggaagaatttggacagggtgagtggtcggagtggtcccccgaagccatgggcactccctggaccgaaagccgtagccctccggctgaaaacgaggtgtccaccccgatgcaggctctgacaacaaacaaagacgatgataacatcctgttccgggactctgcaaatgcgaccagtctcccggtacaggattctagttccgtcccacttcctacctttctggtggcaggcggtagcttagcctttggcacactgctttgtatcgccatcgttttaaggttcaagaaaacatggaaactccgcgctctcaaggagggtaagaccagcatgcacccaccatacagcctcggccaactggtccccgagcggcctagacccacacccgtcttggtgccgttgatctcaccccctgtgtctccatcttctctagggtcagacaataccagctcccacaaccggccagacgccagggatcccagatcaccttatgatatctcaaataccgactatttctttcctaggtag

SEQ ID NO: 12665 - DNA, 1407 bp, Artificial Sequence
  derived and/or modified sequence
atgctggccgtgggctgcgccctgctggccgccctgctggccgcccccggcgccgccctggcccccagaagatgccccgcccaggaggtggccagaggcgtgctgaccagcctgcccggcgacagcgtgaccctgacctgccccggcgtggagcccgaggacaacgccaccgtgcactgggtgctgagaaagcccgccgccggcagccaccccagcagatgggccggcatgggcagaagactgctgctgagaagcgtgcagctgcacgacagcggcaactacagctgctacagagccggcagacccgccggcaccgtgcacctgctggtggacgtgccccccgaggagccccagctgagctgcttcagaaagagccccctgagcaacgtggtgtgcgagtggggccccagaagcacccccagcctgaccaccaaggccgtgctgctggtgagaaagttccagaacagccccgccgaggacttccaggagccctgccagtacagccaggagagccagaagttcagctgccagctggccgtgcccgagggcgacagcagcttctacatcgtgagcatgtgcgtggccagcagcgtgggcagcaagttcagcaagacccagaccttccagggctgcggcatcctgcagcccgacccccccgccaacatcaccgtgaccgccgtggccagaaaccccagatggctgagcgtgacctggcaggacccccacagctggaacagcagcttctacagactgagattcgagctgagatacagagccgagagaagcaagaccttcaccacctggatggtgaaggacctgcagcaccactgcgtgatccacgacgcctggagcggcctgagacacgtggtgcagctgagagcccaggaggagttcggccagggcgagtggagcgagtggagccccgaggccatgggcaccccctggaccgagagcagaagcccccccgccgagaacgaggtgagcacccccatgcaggccctgaccaccaacaaggacgacgacaacatcctgttcagagacagcgccaacgccaccagcctgcccgtgcaggacagcagcagcgtgcccctgcccaccttcctggtggccggcggcagcctggccttcggcaccctgctgtgcatcgccatcgtgctgagattcaagaagacctggaagctgagagccctgaaggagggcaagaccagcatgcaccccccctacagcctgggccagctggtgcccgagagacccagacccacccccgtgctggtgcccctgatcagcccccccgtgagccccagcagcctgggcagcgacaacaccagcagccacaacagacccgacgccagagaccccagaagcccctacgacatcagcaacaccgactacttcttccccagatag

SEQ ID NO: 12666 - protein, 254 aa, Artificial Sequence
  derived and/or modified sequence
MWQLLLPTALLLLVSAGMRTEDLPKAVVFLEPQWYRVLEKDSVTLKCQGAYSPEDNSTQWFHNESLISSQASSYFIDAATVDDSGEYRCQTNLSTLSDPVQLEVHIGWLLLQAPRWVFKEEDPIHLRCHSWKNTALHKVTYLQNGKGRKYFHHNSDFYIPKATLKDSGSYFCRGLFGSKNVSSETVNITITQGLAVSTISSFFPPGYQVSFCLVMVLLFAVDTGLYFSVKTNIRSSTRDWKDHKFKWRKDPQDK

SEQ ID NO: 12667 - protein, 290 aa, Artificial Sequence
  derived and/or modified sequence
MGGGAGERLFTSSCLVGLVPLGLRISLVTCPLQCGIMWQLLLPTALLLLVSAGMRTEDLPKAVVFLEPQWYRVLEKDSVTLKCQGAYSPEDNSTQWFHNESLISSQASSYFIDAATVDDSGEYRCQTNLSTLSDPVQLEVHIGWLLLQAPRWVFKEEDPIHLRCHSWKNTALHKVTYLQNGKGRKYFHHNSDFYIPKATLKDSGSYFCRGLFGSKNVSSETVNITITQGLAVSTISSFFPPGYQVSFCLVMVLLFAVDTGLYFSVKTNIRSSTRDWKDHKFKWRKDPQDK

SEQ ID NO: 12668 - DNA, 2086 bp, Artificial Sequence
  derived and/or modified sequence
cagatccagtggcccggaggggcctgagctaaatccgcaggacctgggtaacacgaggaagggctccggatatctttggtgacttgtccactccagtgtggcatcatgtggcagctgctcctcccaactgctctgctacttctagtttcagctggcatgcggactgaagatctcccaaaggctgtggtgttcctggagcctcaatggtacagggtgctcgagaaggacagtgtgactctgaagtgccagggagcctactcccctgaggacaattccacacagtggtttcacaatgagagcctcatctcaagccaggcctcgagctacttcattgacgctgccacagtcgacgacagtggagagtacaggtgccagacaaacctctccaccctcagtgacccggtgcagctagaagtccatatcggctggctgttgctccaggcccctcggtgggtgttcaaggaggaagaccctattcacctgaggtgtcacagctggaagaacactgctctgcataaggtcacatatttacagaatggcaaaggcaggaagtattttcatcataattctgacttctacattccaaaagccacactcaaagacagcggctcctacttctgcagggggctttttgggagtaaaaatgtgtcttcagagactgtgaacatcaccatcactcaaggtttggcagtgtcaaccatctcatcattctttccacctgggtaccaagtctctttctgcttggtgatggtactcctttttgcagtggacacaggactatatttctctgtgaagacaaacattcgaagctcaacaagagactggaaggaccataaatttaaatggagaaaggaccctcaagacaaatgacccccatcccatgggggtaataagagcagtagcagcagcatctctgaacatttctctggatttgcaaccccatcatcctcaggcctctctacaagcagcaggaaacatagaactcagagccagatcccttatccaactctcgacttttccttggtctccagtggaagggaaaagcccatgatcttcaagcagggaagccccagtgagtagctgcattcctagaaattgaagtttcagagctacacaaacactttttctgtcccaaccgttccctcacagcaaagcaacaatacaggctagggatggtaatcctttaaacatacaaaaattgctcgtgttataaattacccagtttagaggggaaaaaaaaacaattattcctaaataaatggataagtagaattaatggttgaggcaggaccatacagagtgtgggaactgctggggatctagggaattcagtgggaccaatgaaagcatggctgagaaatagcaggtagtccaggatagtctaagggaggtgttcccatctgagcccagagataagggtgtcttcctagaacattagccgtagtggaattaacaggaaatcatgagggtgacgtagaattgagtcttccaggggactctatcagaactggaccatctccaagtatataacgatgagtcctcttaatgctaggagtagaaaatggtcctaggaaggggactgaggattgcggtggggggtggggtggaaaagaaagtacagaacaaaccctgtgtcactgtcccaagttgctaagtgaacagaactatctcagcatcagaatgagaaagcctgagaagaaagaaccaaccacaagcacacaggaaggaaagcgcaggaggtgaaaatgctttcttggccagggtagtaagaattagaggttaatgcagggactgtaaaaccaccttttctgcttcaatatctaattcctgtgtagctttgttcattgcatttattaaacaaatgttgtataaccaatactaaatgtactactgagcttcgctgagttaagttatgaaactttcaaatccttcatcatgtcagttccaatgaggtggggatggagaagacaattgttgcttatgaaagaaagctttagctgtctctgttttgtaagctttaagcgcaacatttcttggttccaataaagcattttacaagatcttgcatgctactcttagatagaag

SEQ ID NO: 12669 - DNA, 2310 bp, Artificial Sequence
  derived and/or modified sequence
gattctgtgtgtgtcctcagatgctcagccacagacctttgagggagtaaagggggcagacccacccaccttgcctccaggctctttccttcctggtcctgttctatggtggggctcccttgccagacttcagactgagaagtcagatgaagtttcaagaaaaggaaattggtgggtgacagagatgggtggaggggctggggaaaggctgtttacttcctcctgtctagtcggtttggtccctttagggctccggatatctttggtgacttgtccactccagtgtggcatcatgtggcagctgctcctcccaactgctctgctacttctagtttcagctggcatgcggactgaagatctcccaaaggctgtggtgttcctggagcctcaatggtacagggtgctcgagaaggacagtgtgactctgaagtgccagggagcctactcccctgaggacaattccacacagtggtttcacaatgagagcctcatctcaagccaggcctcgagctacttcattgacgctgccacagtcgacgacagtggagagtacaggtgccagacaaacctctccaccctcagtgacccggtgcagctagaagtccatatcggctggctgttgctccaggcccctcggtgggtgttcaaggaggaagaccctattcacctgaggtgtcacagctggaagaacactgctctgcataaggtcacatatttacagaatggcaaaggcaggaagtattttcatcataattctgacttctacattccaaaagccacactcaaagacagcggctcctacttctgcagggggctttttgggagtaaaaatgtgtcttcagagactgtgaacatcaccatcactcaaggtttggcagtgtcaaccatctcatcattctttccacctgggtaccaagtctctttctgcttggtgatggtactcctttttgcagtggacacaggactatatttctctgtgaagacaaacattcgaagctcaacaagagactggaaggaccataaatttaaatggagaaaggaccctcaagacaaatgacccccatcccatgggggtaataagagcagtagcagcagcatctctgaacatttctctggatttgcaaccccatcatcctcaggcctctctacaagcagcaggaaacatagaactcagagccagatcccttatccaactctcgacttttccttggtctccagtggaagggaaaagcccatgatcttcaagcagggaagccccagtgagtagctgcattcctagaaattgaagtttcagagctacacaaacactttttctgtcccaaccgttccctcacagcaaagcaacaatacaggctagggatggtaatcctttaaacatacaaaaattgctcgtgttataaattacccagtttagaggggaaaaaaaaacaattattcctaaataaatggataagtagaattaatggttgaggcaggaccatacagagtgtgggaactgctggggatctagggaattcagtgggaccaatgaaagcatggctgagaaatagcaggtagtccaggatagtctaagggaggtgttcccatctgagcccagagataagggtgtcttcctagaacattagccgtagtggaattaacaggaaatcatgagggtgacgtagaattgagtcttccaggggactctatcagaactggaccatctccaagtatataacgatgagtcctcttaatgctaggagtagaaaatggtcctaggaaggggactgaggattgcggtggggggtggggtggaaaagaaagtacagaacaaaccctgtgtcactgtcccaagttgctaagtgaacagaactatctcagcatcagaatgagaaagcctgagaagaaagaaccaaccacaagcacacaggaaggaaagcgcaggaggtgaaaatgctttcttggccagggtagtaagaattagaggttaatgcagggactgtaaaaccaccttttctgcttcaatatctaattcctgtgtagctttgttcattgcatttattaaacaaatgttgtataaccaatactaaatgtactactgagcttcgctgagttaagttatgaaactttcaaatccttcatcatgtcagttccaatgaggtggggatggagaagacaattgttgcttatgaaagaaagctttagctgtctctgttttgtaagctttaagcgcaacatttcttggttccaataaagcattttacaagatcttgcatgctactcttagatagaagatgggaaaaccatggtaataaaatatgaatgataaaa

SEQ ID NO: 12670 - DNA, 2167 bp, Artificial Sequence
  derived and/or modified sequence
ggagccccggctcctaggctgacagaccagcccagatccagtggcccggaggggcctgagctaaatccgcaggacctgggtaacacgaggaagtcggtttggtccctttagggctccggatatctttggtgacttgtccactccagtgtggcatcatgtggcagctgctcctcccaactgctctgctacttctagtttcagctggcatgcggactgaagatctcccaaaggctgtggtgttcctggagcctcaatggtacagggtgctcgagaaggacagtgtgactctgaagtgccagggagcctactcccctgaggacaattccacacagtggtttcacaatgagagcctcatctcaagccaggcctcgagctacttcattgacgctgccacagtcgacgacagtggagagtacaggtgccagacaaacctctccaccctcagtgacccggtgcagctagaagtccatatcggctggctgttgctccaggcccctcggtgggtgttcaaggaggaagaccctattcacctgaggtgtcacagctggaagaacactgctctgcataaggtcacatatttacagaatggcaaaggcaggaagtattttcatcataattctgacttctacattccaaaagccacactcaaagacagcggctcctacttctgcagggggctttttgggagtaaaaatgtgtcttcagagactgtgaacatcaccatcactcaaggtttggcagtgtcaaccatctcatcattctttccacctgggtaccaagtctctttctgcttggtgatggtactcctttttgcagtggacacaggactatatttctctgtgaagacaaacattcgaagctcaacaagagactggaaggaccataaatttaaatggagaaaggaccctcaagacaaatgacccccatcccatgggggtaataagagcagtagcagcagcatctctgaacatttctctggatttgcaaccccatcatcctcaggcctctctacaagcagcaggaaacatagaactcagagccagatcccttatccaactctcgacttttccttggtctccagtggaagggaaaagcccatgatcttcaagcagggaagccccagtgagtagctgcattcctagaaattgaagtttcagagctacacaaacactttttctgtcccaaccgttccctcacagcaaagcaacaatacaggctagggatggtaatcctttaaacatacaaaaattgctcgtgttataaattacccagtttagaggggaaaaaaaaacaattattcctaaataaatggataagtagaattaatggttgaggcaggaccatacagagtgtgggaactgctggggatctagggaattcagtgggaccaatgaaagcatggctgagaaatagcaggtagtccaggatagtctaagggaggtgttcccatctgagcccagagataagggtgtcttcctagaacattagccgtagtggaattaacaggaaatcatgagggtgacgtagaattgagtcttccaggggactctatcagaactggaccatctccaagtatataacgatgagtcctcttaatgctaggagtagaaaatggtcctaggaaggggactgaggattgcggtggggggtggggtggaaaagaaagtacagaacaaaccctgtgtcactgtcccaagttgctaagtgaacagaactatctcagcatcagaatgagaaagcctgagaagaaagaaccaaccacaagcacacaggaaggaaagcgcaggaggtgaaaatgctttcttggccagggtagtaagaattagaggttaatgcagggactgtaaaaccaccttttctgcttcaatatctaattcctgtgtagctttgttcattgcatttattaaacaaatgttgtataaccaatactaaatgtactactgagcttcgctgagttaagttatgaaactttcaaatccttcatcatgtcagttccaatgaggtggggatggagaagacaattgttgcttatgaaagaaagctttagctgtctctgttttgtaagctttaagcgcaacatttcttggttccaataaagcattttacaagatcttgcatgctactcttagatagaagatgggaaaaccatggtaataaaatatgaatg

SEQ ID NO: 12671 - DNA, 887 bp, Artificial Sequence
  derived and/or modified sequence
tctttggtgacttgtccactccagtgtggcatcatgtggcagctgctcctcccaactgctctgctacttctagtttcagctggcatgcggactgaagatctcccaaaggctgtggtgttcctggagcctcaatggtacagggtgctcgagaaggacagtgtgactctgaagtgccagggagcctactcccctgaggacaattccacacagtggtttcacaatgagagcctcatctcaagccaggcctcgagctacttcattgacgctgccacagtcgacgacagtggagagtacaggtgccagacaaacctctccaccctcagtgacccggtgcagctagaagtccatatcggctggctgttgctccaggcccctcggtgggtgttcaaggaggaagaccctattcacctgaggtgtcacagctggaagaacactgctctgcataaggtcacatatttacagaatggcaaaggcaggaagtattttcatcataattctgacttctacattccaaaagccacactcaaagacagcggctcctacttctgcagggggctttttgggagtaaaaatgtgtcttcagagactgtgaacatcaccatcactcaaggtttggcagtgtcaaccatctcatcattctttccacctgggtaccaagtctctttctgcttggtgatggtactcctttttgcagtggacacaggactatatttctctgtgaagacaaacattcgaagctcaacaagagactggaaggaccataaatttaaatggagaaaggaccctcaagacaaatgacccccatcccatgggggtaataagagcagtagcagcagcatctctgaacatttctctggatttgcaaccccatcatcctcaggcctctc

SEQ ID NO: 12672 - DNA, 2289 bp, Artificial Sequence
  derived and/or modified sequence
agatgctcagccgcagacctttgggagagtaaagggggcacacccacccaccttgcctccaggctctttccttcctattcctgttctatggtggggctccattgcgagacttcagattgagaaatcagatgaagtttcaagaaaaggaaactggcaggtgacagagatgggtggagggactggggaaaggctgtttactccctcctgtctagtcggcttggtccctttagggctccggatatctttggtgacttgtccactccagtgtggcatcatgtggcagctgctcctcccaactgctctgctacttctagtttcagctggcatgcggactgaagatctcccaaaggctgtggtgttcctggagcctcaatggtacagcgtgcttgagaaggacagtgtgactctgaagtgccagggagcctactcccctgaggacaattccacacagtggtttcacaatgagaacctcatctcaagccaggcctcgagctacttcattgacgctgccacagtcaacgacagtggagagtacaggtgccagacaaacctctccaccctcagtgacccggtgcagctagaagtccatatcggctggctgttgctccaggcccctcggtgggtgttcaaggaggaagaccctattcacctgaggtgtcacagctggaagaacactgctctgcataaggtcacatatttacagaatggcaaagacaggaagtattttcatcataattctgacttccacattccaaaagccacactcaaagatagcggctcctacttctgcagggggcttgttgggagtaaaaatgtgtcttcagagactgtgaacatcaccatcactcaaggtttggcagtgtcaaccatctcatcattctctccacctgggtaccaagtctctttctgcttggtgatggtactcctttttgcagtggacacaggactatatttctctgtgaagacaaacatttgaagctcaacaagagactggaaggaccataaacttaaatggagaaaggaccctcaagacacatgacccccatcccatgggggtaataagagcagtggcagcagcatctctgaacatttctctggatttgcaaccccatcatcctcaggcctctctacaagcagcaggaaacatagaactcagagccagatcctttatccaactctcgatttttccttggtctccagtggaagggaaaagcccatgatcttcaagcagggaagccccagtgagtagctgcattcctagaaattgaagtttcagagctacacaaacactttttctgtcccaaccattccctcacagcaaagcaacaatacaggctagggatggtaatcctttaaacatacaaaaattgctcgtattataaattacccagtttagagggaaaaaaagaaaataattattcctaaacaaatggataagtagaattaatggttgaggcaggaccctacagagtgtgggaactgctggggatctagagaattcagtgggaccaatgaaagcatggctgagaaatagcagggtagtccaggatagtctaagggaggtgttcccatctgagcccagagataagggtgtcttcctagaacattagccgtagtggaattaacaggaaatcatgagggtgacgtagaattgagtcttccaggggactctatcagaactggaccatttccaagtatataacgatgagtcctctaatgctaggagtagaaaatggtcctaggaaggggactgaggattggggtgggggtggggtggaaaagaaagtacagaacaaaccctgtgtcactgtctcaagttaagctaagtgaacagaactatctcagcatcagaatgagaaagcctgagaagaaagaaccaaccagaagcacacaggaaggaaagcgcaggaggtgaaaatgctttcttggccggggtagtaagaattagaggttaatgcagggactgtaaaaccaccttttctgcttcaatgtctagttcctgtatagctttgttcattgcatttattaaacaaatgttgtataaccaatactaaatgtactactgagcttcactgagttacgctgtgaaactttcaaatccttcttcatgtcagttccaatgaggtggggatggagaagacaattgttgcttatgaaagaaagctttagctgtctctgttttgtaagctttcagtgcaacatttcttggttccaataaagcattttacaagatcttgcatgctactcttagatagaagatggcaaaaccatggtaataaaatatgaatg

SEQ ID NO: 12673 - DNA, 2143 bp, Artificial Sequence
  derived and/or modified sequence
aggctgacagaccagcccagatccagtggcccggaggggcctgagctaaatccgcaggacctgggtaacacgaggaagggctccggatatctttggtgacttgtccactccagtgtggcatcatgtggcagctgctcctcccaactgctctgctacttctagtttcagctggcatgcggactgaagatctcccaaaggctgtggtgttcctggagcctcaatggtacagcgtgcttgagaaggacagtgtgactctgaagtgccagggagcctactcccctgaggacaattccacacagtggtttcacaatgagaacctcatctcaagccaggcctcgagctacttcattgacgctgccacagtcaacgacagtggagagtacaggtgccagacaaacctctccaccctcagtgacccggtgcagctagaagtccatatcggctggctgttgctccaggcccctcggtgggtgttcaaggaggaagaccctattcacctgaggtgtcacagctggaagaacactgctctgcataaggtcacatatttacagaatggcaaagacaggaagtattttcatcataattctgacttccacattccaaaagccacactcaaagatagcggctcctacttctgcagggggcttgttgggagtaaaaatgtgtcttcagagactgtgaacatcaccatcactcaaggtttggcagtgtcaaccatctcatcattctctccacctgggtaccaagtctctttctgcttggtgatggtactcctttttgcagtggacacaggactatatttctctgtgaagacaaacatttgaagctcaacaagagactggaaggaccataaacttaaatggagaaaggaccctcaagacacatgacccccatcccatgggggtaataagagcagtggcagcagcatctctgaacatttctctggatttgcaaccccatcatcctcaggcctctctacaagcagcaggaaacatagaactcagagccagatcctttatccaactctcgatttttccttggtctccagtggaagggaaaagcccatgatcttcaagcagggaagccccagtgagtagctgcattcctagaaattgaagtttcagagctacacaaacactttttctgtcccaaccattccctcacagcaaagcaacaatacaggctagggatggtaatcctttaaacatacaaaaattgctcgtattataaattacccagtttagagggaaaaaaagaaaataattattcctaaacaaatggataagtagaattaatggttgaggcaggaccctacagagtgtgggaactgctggggatctagagaattcagtgggaccaatgaaagcatggctgagaaatagcagggtagtccaggatagtctaagggaggtgttcccatctgagcccagagataagggtgtcttcctagaacattagccgtagtggaattaacaggaaatcatgagggtgacgtagaattgagtcttccaggggactctatcagaactggaccatttccaagtatataacgatgagtcctctaatgctaggagtagaaaatggtcctaggaaggggactgaggattggggtgggggtggggtggaaaagaaagtacagaacaaaccctgtgtcactgtctcaagttaagctaagtgaacagaactatctcagcatcagaatgagaaagcctgagaagaaagaaccaaccagaagcacacaggaaggaaagcgcaggaggtgaaaatgctttcttggccggggtagtaagaattagaggttaatgcagggactgtaaaaccaccttttctgcttcaatgtctagttcctgtatagctttgttcattgcatttattaaacaaatgttgtataaccaatactaaatgtactactgagcttcactgagttacgctgtgaaactttcaaatccttcttcatgtcagttccaatgaggtggggatggagaagacaattgttgcttatgaaagaaagctttagctgtctctgttttgtaagctttcagtgcaacatttcttggttccaataaagcattttacaagatcttgcatgctactcttagatagaagatggcaaaaccatggtaataaaatatgaatgataaaa

SEQ ID NO: 12674 - DNA, 873 bp, Artificial Sequence
  derived and/or modified sequence
atgggcgggggcgccggggaaagactgtttacatcttcatgtctggtcggccttgtccccttggggctccgcatatccctggtgacctgcccccttcagtgcggtattatgtggcagctgctgctgccgaccgcgctgcttctgctggtcagcgccggaatgagaaccgaggatctccccaaggcagtcgtgttcctggaacctcagtggtatcgggtcctggagaaagatagcgtcacactcaagtgtcaaggcgcgtactccccagaagacaattctacccaatggttccacaacgaatctctaattagcagccaggccagcagctatttcattgatgcagcaacagtggacgatagcggggagtatcggtgccagacaaatctgagcactctttccgaccctgtgcagcttgaggtccacatcggatggctgctactgcaggctccccggtgggtattcaaggaagaagaccctatccaccttcgctgccactcttggaagaacaccgctctccataaggtgacttatctgcaaaatggaaaaggccgaaagtattttcatcataactctgatttttatattcccaaggccactctgaaggactctggatcctatttttgtcgaggactcttcgggagcaagaatgttagctccgagactgtgaacatcaccatcacacaggggttagcggtgagcactattagttcattttttcctcccgggtaccaggttagcttctgcctggtcatggtgctactctttgctgtggacactggattgtatttctcagtgaaaacaaacattcgctccagcacaagagattggaaggaccacaaattcaaatggaggaaggatcctcaggataagtag

SEQ ID NO: 12675 - DNA, 873 bp, Artificial Sequence
  derived and/or modified sequence
atgggcggcggggccggggagcggctcttcaccagcagctgcctggtgggcctggtgcccctgggcctgcgcatcagcctggtgacctgccccctgcagtgtggcatcatgtggcagctgctgctgcccacagccctgctgctgctggtgtctgctggcatgaggacagaggacctgcccaaggctgtggtgttcctggagccccagtggtacagagtgctggagaaggacagcgtgaccctgaagtgccagggcgcctacagccctgaggacaacagcacccagtggttccacaatgaaagcctcatcagcagccaggccagcagctacttcattgatgctgccaccgtggatgacagcggggagtaccgctgccagaccaacctgagcaccctgagtgaccctgtgcagctggaggtgcacatcggctggctgctgctgcaggccccccgctgggtgttcaaggaggaggaccccatccacctgcgctgccacagctggaagaacacagccctgcacaaggtgacctacctgcagaatggcaagggcaggaagtacttccaccacaacagcgacttctacatccccaaggccaccctgaaggacagcggcagctacttctgccggggcctgtttggcagcaagaatgtgtccagtgaaacagtgaacatcaccatcacccagggcctggccgtgtccaccatcagcagcttcttccccccaggctaccaggtgtccttctgcctggtgatggtgctgctgtttgctgtggacaccggcctgtacttctctgtgaagaccaacatccgcagcagcacccgggactggaaggaccacaagttcaagtggaggaaggacccccaggacaagtag

SEQ ID NO: 12676 - DNA, 873 bp, Artificial Sequence
  derived and/or modified sequence
atgggcggcggcgccggcgagcggctgttcaccagcagctgcctggtgggactggtgccgctcgggcttaggatctctcttgttacttgcccgcttcaatgtggtattatgtggcagctgctcctgcctacagccttgcttcttttggtctccgccggaatgagaacagaagacctacccaaggccgtcgtgtttcttgaaccccagtggtatcgcgtcttggagaaagatagcgtaactctgaaatgtcagggcgcatactcccctgaagacaactccacacagtggttccataatgaatccctgatatcttctcaggctagtagctacttcatagatgctgcgaccgtggatgacagcggtgaatatcgttgccagaccaatctgagtactctgagcgatcccgtgcaacttgaagtacacattggctggctcctattgcaagccccaagatgggtgttcaaggaagaagatcccatccatctcaggtgccatagctggaagaataccgctttgcataaagtcacatacctgcagaacggcaaaggccgaaagtattttcaccataactctgacttttacatcccaaaggccacactgaaagattctggctcatacttttgccgcggactattcggaagtaagaacgtgtcttcagagactgtcaacatcaccatcacacagggcttggccgtgtccaccatctcgagcttcttcccccccggctatcaagtctcgttttgcctcgtgatggtactcctgttcgcagttgacaccggactgtatttctccgtgaagaccaacatcaggtcttctaccagagactggaaggaccataaatttaaatggcgaaaggacccgcaggataagtag

SEQ ID NO: 12677 - DNA, 873 bp, Artificial Sequence
  derived and/or modified sequence
atgggcggaggtgcaggagagcgcctgtttacgagctcctgcctggtaggcctggtgcccctgggtctgcggatctcccttgtcacttgtccgctccagtgtggaatcatgtggcaactgctgctccctaccgccttgttgctgctcgtctccgccggaatgagaacagaagacttacctaaggctgtcgtgttcctcgagccccagtggtaccgcgtgctcgagaaagattccgttacactgaaatgccaaggtgcgtattctccggaggacaactccactcagtggtttcataacgaatctctaatttccagccaggcatctagctacttcatcgacgcagccaccgtggacgattctggggaatatcgctgtcaaaccaacctatctaccctgtcggatcccgttcagctagaggtgcatatcggttggttgctcctgcaggctccccgttgggttttcaaggaagaggatcccattcatctccggtgtcattcctggaagaatacggctcttcataaggtgacttacctacagaacggaaagggcagaaagtatttccaccacaattctgacttctatatcccgaaggccaccctgaaagactccggctcctacttctgtcgagggttattcggtagcaagaacgtgtcttccgagactgtcaacattaccattacccaaggactcgccgtgtcgacaattagctcattctttccacccggataccaagtgtcattttgtttggtcatggtccttctgttcgcggttgatacaggattatacttctccgtcaagacaaatatccgcagttccacacgggattggaaagaccacaagttcaagtggcggaaagatcctcaggataaatag

SEQ ID NO: 12678 - DNA, 873 bp, Artificial Sequence
  derived and/or modified sequence
atgggcggcggcgccggcgagagactgttcaccagcagctgcctggtgggcctggtgcccctgggcctgagaatcagcctggtgacctgccccctgcagtgcggcatcatgtggcagctgctgctgcccaccgccctgctgctgctggtgagcgccggcatgagaaccgaggacctgcccaaggccgtggtgttcctggagccccagtggtacagagtgctggagaaggacagcgtgaccctgaagtgccagggcgcctacagccccgaggacaacagcacccagtggttccacaacgagagcctgatcagcagccaggccagcagctacttcatcgacgccgccaccgtggacgacagcggcgagtacagatgccagaccaacctgagcaccctgagcgaccccgtgcagctggaggtgcacatcggctggctgctgctgcaggcccccagatgggtgttcaaggaggaggaccccatccacctgagatgccacagctggaagaacaccgccctgcacaaggtgacctacctgcagaacggcaagggcagaaagtacttccaccacaacagcgacttctacatccccaaggccaccctgaaggacagcggcagctacttctgcagaggcctgttcggcagcaagaacgtgagcagcgagaccgtgaacatcaccatcacccagggcctggccgtgagcaccatcagcagcttcttcccccccggctaccaggtgagcttctgcctggtgatggtgctgctgttcgccgtggacaccggcctgtacttcagcgtgaagaccaacatcagaagcagcaccagagactggaaggaccacaagttcaagtggagaaaggacccccaggacaagtag

SEQ ID NO: 12679 - protein, 233 aa, Artificial Sequence
  derived and/or modified sequence
MWQLLLPTALLLLVSAGMRTEDLPKAVVFLEPQWYSVLEKDSVTLKCQGAYSPEDNSTQWFHNENLISSQASSYFIDAATVNDSGEYRCQTNLSTLSDPVQLEVHIGWLLLQAPRWVFKEEDPIHLRCHSWKNTALHKVTYLQNGKDRKYFHHNSDFHIPKATLKDSGSYFCRGLVGSKNVSSETVNITITQGLAVSTISSFSPPGYQVSFCLVMVLLFAVDTGLYFSVKTNI

SEQ ID NO: 12680 - DNA, 702 bp, Artificial Sequence
  derived and/or modified sequence
atgtggcagctgctcctacctaccgcgctcctgcttcttgtgtctgcaggcatgcggactgaagacctgccaaaggctgtagtattcttggagccgcagtggtactcagtactggagaaagactcggtgacactcaagtgtcagggggcatactccccggaggataattccactcagtggtttcacaacgaaaacctgatcagctcccaggcctccagctatttcattgatgctgctacagtgaacgactcaggcgagtatagatgccagactaatctgtccaccctttcagaccccgtgcagctcgaagtccatattgggtggttattgctgcaagcccccaggtgggtgttcaaggaggaggaccccattcatctgcggtgtcacagttggaagaacactgctctccacaaggtgacctatcttcaaaacggtaaggatcgcaagtattttcatcacaacagtgatttccacattcccaaagccaccctaaaggactccggttcttacttttgcagaggactcgtggggtccaagaatgtcagcagtgagacagtgaacattactataacgcagggcttggcagtttctaccatttcttcattcagtccgcctggctaccaggtctctttctgtctggttatggtcctgttattcgctgtggacacggggctgtattttagcgtaaaaaccaatatctag

SEQ ID NO: 12681 - DNA, 702 bp, Artificial Sequence
  derived and/or modified sequence
atgtggcagctgttgttgccgacagctttgcttcttctggtgtcagcgggaatgcggactgaagacctacctaaagcggtagtgtttttagagcctcagtggtatagcgtcttggaaaaggatagcgtaaccctgaagtgtcagggtgcctactccccggaggacaattcaacacaatggttccacaacgaaaacctgatctcgagccaggccagctcctacttcatcgatgccgccaccgtgaatgacagcggcgagtatcggtgtcaaacgaatctgagtaccctgagcgaccccgtacagctggaggttcatataggctggctacttctacaggcaccacgctgggtctttaaagaggaagatcctattcatctgagatgtcactcttggaaaaataccgcgttgcacaaagtaacctatctccaaaatggtaaagatcggaaatattttcaccataattctgacttccacataccaaaagccaccctgaaagatagcggcagctacttttgtagagggctcgtaggctctaaaaacgtcagttccgagaccgttaacattacaatcacccaggggctggcggtgagcactatctcgagcttcagcccccccggttatcaggtttccttttgcctcgtcatggtgctgttgttcgccgttgacacaggcctgtatttctctgttaaaaccaacatctag

SEQ ID NO: 12682 - DNA, 702 bp, Artificial Sequence
  derived and/or modified sequence
atgtggcagctgctgctgcccacagccctgctgctgctggtgtctgctggcatgaggacagaggacctgcccaaggctgtggtgttcctggagccccagtggtacagcgtgctggagaaggacagcgtgaccctgaagtgccagggcgcctacagccctgaggacaacagcacccagtggttccacaatgaaaacctgatcagcagccaggccagcagctacttcattgatgctgccaccgtgaatgacagcggggagtaccgctgccagaccaacctgagcaccctgagtgaccctgtgcagctggaggtgcacatcggctggctgctgctgcaggccccccgctgggtgttcaaggaggaggaccccatccacctgcgctgccacagctggaagaacacagccctgcacaaggtgacctacctgcagaatggcaaggacaggaagtacttccaccacaacagcgacttccacatccccaaggccaccctgaaggacagcggcagctacttctgccggggcctggtgggcagcaagaatgtgtccagtgaaacagtgaacatcaccatcacccagggcctggccgtgtccaccatcagcagcttcagccccccaggctaccaggtgtccttctgcctggtgatggtgctgctgtttgctgtggacaccggcctgtacttctctgtgaagaccaacatctag

SEQ ID NO: 12683 - DNA, 702 bp, Artificial Sequence
  derived and/or modified sequence
atgtggcagctgctgctgcccaccgccctgctgctgctggtgagcgccggaatgaggaccgaagatctgcccaaggcggtggtgttccttgagccccagtggtatagcgttcttgaaaaggatagcgtgaccctgaagtgtcagggagcatatagccccgaggacaattctacacagtggtttcataacgagaatctgatctccagtcaagcctcctcgtactttatagatgccgctactgtgaatgattcaggagagtaccgatgtcagaccaatctctccaccctcagcgacccagtgcaactggaggtccatatcggctggttgttactgcaagcacccagatgggtttttaaggaggaggaccccattcacctgagatgccattcgtggaaaaacaccgctctgcataaggtcacatatctccagaatggcaaagatcggaaatactttcaccataatagcgacttccacatccccaaagcaaccctgaaggattccggctcatacttttgcagaggcctggtcggcagtaaaaatgtaagttccgagactgtcaacattaccataactcaaggacttgcggttagcaccatctccagcttctcgccccctggttatcaggtgagtttttgcctcgtgatggtgctattattcgccgttgacacgggtttgtatttttccgtgaagactaatatctag

SEQ ID NO: 12684 - DNA, 702 bp, Artificial Sequence
  derived and/or modified sequence
atgtggcagctgctgctgcccaccgccctgctgctgctggtgagcgccgggatgagaactgaagacttacccaaggccgtggtgtttctggaacctcagtggtatagtgttctagaaaaagattccgtgaccttgaagtgtcagggagcctactctccagaggacaactccactcagtggttccacaacgaaaatctcattagttctcaggcatcctcatattttatcgacgcagctacagtgaatgacagcggcgaataccgctgccagaccaacctgtccacactgtccgaccccgtgcagttggaggtgcacattggttggttactcctgcaggcccccaggtgggtcttcaaggaagaagacccaatacatctccggtgccattcctggaaaaacaccgcactccacaaggtcacatacttgcagaacggcaaggaccggaaatactttcatcacaattcagactttcacatccccaaagctaccttgaaagattccgggagctatttctgcaggggactggtgggctcaaagaacgtgtcttcggagacagtgaacatcaccatcacccagggcctggctgtgagcacaattagctccttttcccctcctggctaccaggtctccttttgcctggtaatggtgttgctattcgccgtagacactggactctacttctccgtgaagacgaacatatag

SEQ ID NO: 12685 - DNA, 702 bp, Artificial Sequence
  derived and/or modified sequence
atgtggcaactgctgcttcccactgccctcctactcttagttagcgctggcatgcggactgaggacctgccaaaagcggtagtgtttcttgagccacagtggtatagcgtgctggaaaaggattcggtgactctgaagtgccagggtgcgtactcgccagaggataactctacgcagtggttccataacgagaacctgatttctagccaagcatcctcatacttcattgacgccgctacggtgaacgattctggagagtatcgctgccagactaacctgtccactctgtctgaccccgtgcagctcgaagtgcatatcggatggctgctgcttcaggctcctcgctgggtattcaaagaggaggacccaatccacctgcgatgccactcatggaagaacacagccctgcataaggtcacttaccttcaaaacggaaaagacagaaagtacttccaccataattcggatttccacataccaaaggcaactctcaaggactctggttcttatttctgcaggggcctggtcgggagcaagaatgtgagttctgagactgtcaatatcactatcacgcaaggacttgccgtaagtaccatttcaagcttctccccacccggatatcaggtcagtttttgccttgtaatggtccttctattcgctgtggacacaggcttgtatttctccgttaagaccaacatctag

SEQ ID NO: 12686 - DNA, 702 bp, Artificial Sequence
  derived and/or modified sequence
atgtggcagctcctgctacctaccgccctccttttgctggttagcgctggcatgaggaccgaggatctcccaaaagccgtcgttttcttagagccccaatggtacagcgtgctggagaaagactctgtgactctaaagtgccagggggcttactcgcctgaggataatagcacgcagtggtttcacaatgagaatcttatatcctctcaagcctcttcatacttcattgacgctgccaccgtcaacgactccggagaatatcgttgtcagaccaacctgagcaccctgtctgatccagtccagcttgaggttcacatcggctggctgctgctccaggcaccgcgatgggtctttaaggaggaggatcccatccacctgcggtgtcactcatggaagaacacggcactgcataaagtcacgtatctccagaatggcaaggaccgcaaatatttccatcacaatagcgattttcatatcccaaaggccactctgaaggatagcggctcttatttttgtcgaggcctggtcgggagtaagaatgtctcctccgaaactgtgaacattactatcacccagggtctcgctgttagcacaatttctagcttttccccacctggttaccaggtgagcttctgtctcgttatggtactgctgttcgcagttgatactggtttgtatttcagcgtgaagacgaatatatag

SEQ ID NO: 12687 - DNA, 702 bp, Artificial Sequence
  derived and/or modified sequence
atgtggcagctgctgctgcccaccgccctgctgctgctggtgagcgccggcatgagaaccgaggacctgcccaaggccgtggtgttcctggagccccagtggtacagcgtgctggagaaggacagcgtgaccctgaagtgccagggcgcctacagccccgaggacaacagcacccagtggttccacaacgagaacctgatcagcagccaggccagcagctacttcatcgacgccgccaccgtgaacgacagcggcgagtacagatgccagaccaacctgagcaccctgagcgaccccgtgcagctggaggtgcacatcggctggctgctgctgcaggcccccagatgggtgttcaaggaggaggaccccatccacctgagatgccacagctggaagaacaccgccctgcacaaggtgacctacctgcagaacggcaaggacagaaagtacttccaccacaacagcgacttccacatccccaaggccaccctgaaggacagcggcagctacttctgcagaggcctggtgggcagcaagaacgtgagcagcgagaccgtgaacatcaccatcacccagggcctggccgtgagcaccatcagcagcttcagcccccccggctaccaggtgagcttctgcctggtgatggtgctgctgttcgccgtggacaccggcctgtacttcagcgtgaagaccaacatctag

SEQ ID NO: 12688 - protein, 2039 aa, Artificial Sequence
  derived and/or modified sequence
MGASSPRSPEPVGPPAPGLPFCCGGSLLAVVVLLALPVAWGQCNAPEWLPFARPTNLTDEFEFPIGTYLNYECRPGYSGRPFSIICLKNSVWTGAKDRCRRKSCRNPPDPVNGMVHVIKGIQFGSQIKYSCTKGYRLIGSSSATCIISGDTVIWDNETPICDRIPCGLPPTIANGDFISTNRENFHYGSVVTYRCNPGSGGRKVFELVGEPSIYCTSNDDQVGIWSGPAPQCIIPNKCTPPNVENGILVSDNRSLFSLNEVVEFRCQPGFVMKGPRRVKCQALNKWEPELPSCSRVCQPPPDVLHAERTQRDKDNFSPGQEVFYSCEPGYDLRGAASMRCTPQGDWSPAAPTCEVKSCDDFMGQLLNGRVLFPVNLQLGAKVDFVCDEGFQLKGSSASYCVLAGMESLWNSSVPVCEQIFCPSPPVIPNGRHTGKPLEVFPFGKTVNYTCDPHPDRGTSFDLIGESTIRCTSDPQGNGVWSSPAPRCGILGHCQAPDHFLFAKLKTQTNASDFPIGTSLKYECRPEYYGRPFSITCLDNLVWSSPKDVCKRKSCKTPPDPVNGMVHVITDIQVGSRINYSCTTGHRLIGHSSAECILSGNAAHWSTKPPICQRIPCGLPPTIANGDFISTNRENFHYGSVVTYRCNPGSGGRKVFELVGEPSIYCTSNDDQVGIWSGPAPQCIIPNKCTPPNVENGILVSDNRSLFSLNEVVEFRCQPGFVMKGPRRVKCQALNKWEPELPSCSRVCQPPPDVLHAERTQRDKDNFSPGQEVFYSCEPGYDLRGAASMRCTPQGDWSPAAPTCEVKSCDDFMGQLLNGRVLFPVNLQLGAKVDFVCDEGFQLKGSSASYCVLAGMESLWNSSVPVCEQIFCPSPPVIPNGRHTGKPLEVFPFGKAVNYTCDPHPDRGTSFDLIGESTIRCTSDPQGNGVWSSPAPRCGILGHCQAPDHFLFAKLKTQTNASDFPIGTSLKYECRPEYYGRPFSITCLDNLVWSSPKDVCKRKSCKTPPDPVNGMVHVITDIQVGSRINYSCTTGHRLIGHSSAECILSGNTAHWSTKPPICQRIPCGLPPTIANGDFISTNRENFHYGSVVTYRCNLGSRGRKVFELVGEPSIYCTSNDDQVGIWSGPAPQCIIPNKCTPPNVENGILVSDNRSLFSLNEVVEFRCQPGFVMKGPRRVKCQALNKWEPELPSCSRVCQPPPEILHGEHTPSHQDNFSPGQEVFYSCEPGYDLRGAASLHCTPQGDWSPEAPRCAVKSCDDFLGQLPHGRVLFPLNLQLGAKVSFVCDEGFRLKGSSVSHCVLVGMRSLWNNSVPVCEHIFCPNPPAILNGRHTGTPSGDIPYGKEISYTCDPHPDRGMTFNLIGESTIRCTSDPHGNGVWSSPAPRCELSVRAGHCKTPEQFPFASPTIPINDFEFPVGTSLNYECRPGYFGKMFSISCLENLVWSSVEDNCRRKSCGPPPEPFNGMVHINTDTQFGSTVNYSCNEGFRLIGSPSTTCLVSGNNVTWDKKAPICEIISCEPPPTISNGDFYSNNRTSFHNGTVVTYQCHTGPDGEQLFELVGERSIYCTSKDDQVGVWSSPPPRCISTNKCTAPEVENAIRVPGNRSFFTLTEIIRFRCQPGFVMVGSHTVQCQTNGRWGPKLPHCSRVCQPPPEILHGEHTLSHQDNFSPGQEVFYSCEPSYDLRGAASLHCTPQGDWSPEAPRCTVKSCDDFLGQLPHGRVLLPLNLQLGAKVSFVCDEGFRLKGRSASHCVLAGMKALWNSSVPVCEQIFCPNPPAILNGRHTGTPFGDIPYGKEISYACDTHPDRGMTFNLIGESSIRCTSDPQGNGVWSSPAPRCELSVPAACPHPPKIQNGHYIGGHVSLYLPGMTISYICDPGYLLVGKGFIFCTDQGIWSQLDHYCKEVNCSFPLFMNGISKELEMKKVYHYGDYVTLKCEDGYTLEGSPWSQCQADDRWDPPLAKCTSRTHDALIVGTLSGTIFFILLIIFLSWIILKHRKGNNAHENPKEVAIHLHSQGGSSVHPRTLQTNEENSRVLP

SEQ ID NO: 12689 - protein, 2039 aa, Artificial Sequence
  derived and/or modified sequence
MGASSPRSPEPVGPPAPGLPFCCGGSLLAVVVLLALPVAWGQCNAPEWLPFARPTNLTDEFEFPIGTYLNYECRPGYSGRPFSIICLKNSVWTGAKDRCRRKSCRNPPDPVNGMVHVIKGIQFGSQIKYSCTKGYRLIGSSSATCIISGDTVIWDNETPICDRIPCGLPPTITNGDFISTNRENFHYGSVVTYRCNPGSGGRKVFELVGEPSIYCTSNDDQVGIWSGPAPQCIIPNKCTPPNVENGILVSDNRSLFSLNEVVEFRCQPGFVMKGPRRVKCQALNKWEPELPSCSRVCQPPPDVLHAERTQRDKDNFSPGQEVFYSCEPGYDLRGAASMRCTPQGDWSPAAPTCEVKSCDDFMGQLLNGRVLFPVNLQLGAKVDFVCDEGFQLKGSSASYCVLAGMESLWNSSVPVCEQIFCPSPPVIPNGRHTGKPLEVFPFGKTVNYTCDPHPDRGTSFDLIGESTIRCTSDPQGNGVWSSPAPRCGILGHCQAPDHFLFAKLKTQTNASDFPIGTSLKYECRPEYYGRPFSITCLDNLVWSSPKDVCKRKSCKTPPDPVNGMVHVITDIQVGSRINYSCTTGHRLIGHSSAECILSGNAAHWSTKPPICQRIPCGLPPTIANGDFISTNRENFHYGSVVTYRCNPGSGGRKVFELVGEPSIYCTSNDDQVGIWSGPAPQCIIPNKCTPPNVENGILVSDNRSLFSLNEVVEFRCQPGFVMKGPRRVKCQALNKWEPELPSCSRVCQPPPDVLHAERTQRDKDNFSPGQEVFYSCEPGYDLRGAASMRCTPQGDWSPAAPTCEVKSCDDFMGQLLNGRVLFPVNLQLGAKVDFVCDEGFQLKGSSASYCVLAGMESLWNSSVPVCEQIFCPSPPVIPNGRHTGKPLEVFPFGKTVNYTCDPHPDRGTSFDLIGESTIRCTSDPQGNGVWSSPAPRCGILGHCQAPDHFLFAKLKTQTNASDFPIGTSLKYECRPEYYGRPFSITCLDNLVWSSPKDVCKRKSCKTPPDPVNGMVHVITDIQVGSRINYSCTTGHRLIGHSSAECILSGNTAHWSTKPPICQRIPCGLPPTIANGDFISTNRENFHYGSVVTYRCNLGSRGRKVFELVGEPSIYCTSNDDQVGIWSGPAPQCIIPNKCTPPNVENGILVSDNRSLFSLNEVVEFRCQPGFVMKGPRRVKCQALNKWEPELPSCSRVCQPPPEILHGEHTPSHQDNFSPGQEVFYSCEPGYDLRGAASLHCTPQGDWSPEAPRCAVKSCDDFLGQLPHGRVLFPLNLQLGAKVSFVCDEGFRLKGSSVSHCVLVGMRSLWNNSVPVCEHIFCPNPPAILNGRHTGTPSGDIPYGKEISYTCDPHPDRGMTFNLIGESTIRCTSDPHGNGVWSSPAPRCELSVRAGHCKTPEQFPFASPTIPINDFEFPVGTSLNYECRPGYFGKMFSISCLENLVWSSVEDNCRRKSCGPPPEPFNGMVHINTDTQFGSTVNYSCNEGFRLIGSPSTTCLVSGNNVTWDKKAPICEIISCEPPPTISNGDFYSNNRTSFHNGTVVTYQCHTGPDGEQLFELVGERSIYCTSKDDQVGVWSSPPPRCISTNKCTAPEVENAIRVPGNRSFFTLTEIIRFRCQPGFVMVGSHTVQCQTNGRWGPKLPHCSRVCQPPPEILHGEHTLSHQDNFSPGQEVFYSCEPSYDLRGAASLHCTPQGDWSPEAPRCTVKSCDDFLGQLPHGRVLLPLNLQLGAKVSFVCDEGFRLKGRSASHCVLAGMKALWNSSVPVCEQIFCPNPPAILNGRHTGTPFGDIPYGKEISYACDTHPDRGMTFNLIGESSIRCTSDPQGNGVWSSPAPRCELSVPAACPHPPKIQNGHYIGGHVSLYLPGMTISYICDPGYLLVGKGFIFCTDQGIWSQLDHYCKEVNCSFPLFMNGISKELEMKKVYHYGDYVTLKCEDGYTLEGSPWSQCQADDRWDPPLAKCTSRTHDALIVGTLSGTIFFILLIIFLSWIILKHRKGNNAHENPKEVAIHLHSQGGSSVHPRTLQTNEENSRVLP

SEQ ID NO: 12690 - protein, 2039 aa, Artificial Sequence
  derived and/or modified sequence
MGASSPRSPEPVGPPAPGLPFCCGGSLLAVVVLLALPVAWGQCNAPEWLPFARPTNLTDEFEFPIGTYLNYECRPGYSGRPFSIICLKNSVWTGAKDRCRRKSCRNPPDPVNGMVHVIKGIQFGSQIKYSCTKGYRLIGSSSATCIISGDTVIWDNETPICDRIPCGLPPTITNGDFISTNRENFHYGSVVTYRCNPGSGGRKVFELVGEPSIYCTSNDDQVGIWSGPAPQCIIPNKCTPPNVENGILVSDNRSLFSLNEVVEFRCQPGFVMKGPRRVKCQALNKWEPELPSCSRVCQPPPDVLHAERTQRDKDNFSPGQEVFYSCEPGYDLRGAASMRCTPQGDWSPAAPTCEVKSCDDFMGQLLNGRVLFPVNLQLGAKVDFVCDEGFQLKGSSASYCVLAGMESLWNSSVPVCEQIFCPSPPVIPNGRHTGKPLEVFPFGKTVNYTCDPHPDRGTSFDLIGESTIRCTSDPQGNGVWSSPAPRCGILGHCQAPDHFLFAKLKTQTNASDFPIGTSLKYECRPEYYGRPFSITCLDNLVWSSPKDVCKRKSCKTPPDPVNGMVHVITDIQVGSRINYSCTTGHRLIGHSSAECILSGNAAHWSTKPPICQRIPCGLPPTIANGDFISTNRENFHYGSVVTYRCNPGSGGRKVFELVGEPSIYCTSNDDQVGIWSGPAPQCIIPNKCTPPNVENGILVSDNRSLFSLNEVVEFRCQPGFVMKGPRRVKCQALNKWEPELPSCSRVCQPPPDVLHAERTQRDKDNFSPGQEVFYSCEPGYDLRGAASMRCTPQGDWSPAAPTCEVKSCDDFMGQLLNGRVLFPVNLQLGAKVDFVCDEGFQLKGSSASYCVLAGMESLWNSSVPVCEQIFCPSPPVIPNGRHTGKPLEVFPFGKAVNYTCDPHPDRGTSFDLIGESTIRCTSDPQGNGVWSSPAPRCGILGHCQAPDHFLFAKLKTQTNASDFPIGTSLKYECRPEYYGRPFSITCLDNLVWSSPKDVCKRKSCKTPPDPVNGMVHVITDIQVGSRINYSCTTGHRLIGHSSAECILSGNTAHWSTKPPICQRIPCGLPPTIANGDFISTNRENFHYGSVVTYRCNLGSRGRKVFELVGEPSIYCTSNDDQVGIWSGPAPQCIIPNKCTPPNVENGILVSDNRSLFSLNEVVEFRCQPGFVMKGPRRVKCQALNKWEPELPSCSRVCQPPPEILHGEHTPSHQDNFSPGQEVFYSCEPGYDLRGAASLHCTPQGDWSPEAPRCAVKSCDDFLGQLPHGRVLFPLNLQLGAKVSFVCDEGFRLKGSSVSHCVLVGMRSLWNNSVPVCEHIFCPNPPAILNGRHTGTPSGDIPYGKEISYTCDPHPDRGMTFNLIGESTIRCTSDPHGNGVWSSPAPRCELSVRAGHCKTPEQFPFASPTIPINDFEFPVGTSLNYECRPGYFGKMFSISCLENLVWSSVEDNCRRKSCGPPPEPFNGMVHINTDTQFGSTVNYSCNEGFRLIGSPSTTCLVSGNNVTWDKKAPICEIISCEPPPTISNGDFYSNNRTSFHNGTVVTYQCHTGPDGEQLFELVGERSIYCTSKDDQVGVWSSPPPRCISTNKCTAPEVENAIRVPGNRSFFTLTEIIRFRCQPGFVMVGSHTVQCQTNGRWGPKLPHCSRVCQPPPEILHGEHTLSHQDNFSPGQEVFYSCEPSYDLRGAASLHCTPQGDWSPEAPRCTVKSCDDFLGQLPHGRVLLPLNLQLGAKVSFVCDEGFRLKGRSASHCVLAGMKALWNSSVPVCEQIFCPNPPAILNGRHTGTPFGDIPYGKEISYACDTHPDRGMTFNLIGESSIRCTSDPQGNGVWSSPAPRCELSVPAACPHPPKIQNGHYIGGHVSLYLPGMTISYICDPGYLLVGKGFIFCTDQGIWSQLDHYCKEVNCSFPLFMNGISKELEMKKVYHYGDYVTLKCEDGYTLEGSPWSQCQADDRWDPPLAKCTSRTHDALIVGTLSGTIFFILLIIFLSWIILKHRKGNNAHENPKEVAIHLHSQGGSSVHPRTLQTNEENSRVLP

SEQ ID NO: 12691 - DNA, 6120 bp, Artificial Sequence
  derived and/or modified sequence
atgggcgcgtctagcccacgttctcccgagcccgtcggaccccctgcccctgggttacccttttgttgcggaggttctttattagccgttgtcgtgctcctcgccctgccagtcgcctgggggcaatgtaatgctcccgaatggctgcccttcgctcgacctaccaacctgaccgatgagtttgagtttcctataggcacctacctaaactatgagtgtcgcccagggtattcaggacggccgttcagcataatttgccttaaaaattcggtgtggacgggcgccaaagatcgctgtagaaggaagtcatgtcgaaaccctcccgatccagtcaatggaatggtgcacgttatcaaaggcattcagttcggcagccagatcaagtacagctgtacaaagggataccgtctcattggctcttctagtgctacttgcataatctctggcgataccgtgatctgggataacgaaacacctatttgtgacaggatcccatgcggattgcccccaacaattgctaatggggacttcatcagcacaaatagagaaaactttcactacgggtctgtggtcacttacaggtgcaaccccggtagcggtggccgcaaggtgtttgaactggtgggggaaccatccatttactgcacctccaacgacgatcaagtgggcatttggtcgggccccgcaccacagtgcataatacctaataaatgcacgccgccaaacgtcgaaaacggcattctggtgtccgataatcggtcgctgtttagcctgaatgaggtggtggaatttcggtgtcagccagggttcgtcatgaaaggccctcgtcgcgtcaaatgccaggccctcaataagtgggagcctgagctcccaagctgtagcagggtctgccagccccctcctgatgtgctgcatgcagaaagaacacagagagacaaggataatttctctcccggtcaggaggtgttttactcttgtgagcccggttacgatctaaggggcgccgctagtatgaggtgtactcctcagggtgactggtcccccgccgctcccacttgtgaagtaaagagctgcgacgatttcatggggcaactgctaaacggccgagttctcttcccggtcaatctgcagttaggcgccaaggtggattttgtctgtgatgaggggtttcagctgaagggatcaagtgccagctattgcgtgcttgccggcatggaatccttgtggaattcctccgtgcctgtgtgtgagcagatattttgccccagcccgcctgtaatcccaaatggtcgacacacaggaaagcctctggaggtgttcccgtttgggaaaactgtgaactatacatgtgacccacaccccgatcggggtacttctttcgatctcattggcgagtcgacgatccgctgcacatccgacccccagggcaatggagtctggagcagtcctgctccccgttgcgggatccttggacattgccaggcccccgaccacttcctgtttgctaaactcaaaacccagactaatgcctctgattttccaatcggcacctctctcaaatacgagtgccggccagaatattatggtcgtcccttctctatcacatgcctggataacctagtgtggtctagccctaaagacgtttgcaagcggaaatcatgcaagacaccacctgatcctgtgaatggcatggtacatgtgatcacggacatccaggttggctccagaatcaactactcttgcacaacaggtcaccggctcatcgggcactcttccgccgagtgtatactgagtggtaacgcagctcactggtcaacaaaacctcctatctgccagcgtatcccttgcggactgcctcccaccatcgcaaatggcgactttatcagcacaaatagggagaatttccactatgggagcgtcgtcacctacagatgcaatcctggaagcggcggacgtaaagtcttcgagctcgttggagagccgtcaatctactgcactagcaatgacgatcaggttggcatatggagtggaccagcacctcaatgcataatcccaaacaagtgtacgccacctaacgtcgagaatggaattctggtgtccgataacaggtcgctcttttctctcaacgaggtggttgagttccgctgtcaaccagggttcgttatgaaaggaccccgccgggttaagtgccaggccctcaataaatgggagccagaattgcctagttgctcccgggtctgtcagccgcctccagatgtattacacgctgagcgcacccagagagataaagacaatttcagcccaggccaggaggtattttactcctgcgagcccggctatgacctgaggggcgctgctagtatgcgatgcacgccgcaaggtgattggagcccagctgccccgacgtgtgaggtgaaatcctgtgatgactttatgggtcagttgttaaacggcagagtgctgttcccagtcaacctccagctgggtgctaaagtggactttgtttgcgacgagggatttcaactcaagggatcatcagcttcgtactgtgttctcgccgggatggaatccttatggaattcttcagttcccgtctgcgaacagattttctgcccctccccccccgtcattccaaatgggcgacacacagggaagccactggaagtttttccattcggaaaggccgttaactatacttgtgaccctcacccagaccgaggaacatcttttgacctgattggtgaaagtactatccggtgcactagcgacccccagggcaacggggtttggtcgagccctgctccccgctgcgggatcctcggacattgccaggccccagatcactttctttttgcaaagctgaaaacacaaactaacgcatcagacttccctattgggacgtccctcaaatacgagtgtaggccagaatactatgggagaccttttagcataacatgtttggataacctggtatggtctagtccaaaagacgtatgtaaaaggaagagttgcaagactccacccgatcccgtgaacggcatggtccacgtgatcacagatatccaggttggaagtagaatcaattatagctgtacaaccggccataggttgatcgggcacagctccgcagagtgcatcctctccggcaacactgctcactggagcactaaaccacctatctgtcaaaggattccttgcggactcccaccgacgattgccaatggcgattttatatccacgaatagagagaattttcattacggctccgttgttacatatagatgtaacctcgggtcgagaggcaggaaggtctttgaacttgtcggagaacctagcatctactgcacatctaacgatgaccaggtggggatttggtcaggtcctgccccccagtgcattattcccaataagtgtacccctcctaatgtggaaaatggcatcctggtaagtgataaccgttcattgttctccttgaacgaagttgtagagtttagatgccagcccggattcgttatgaaggggccaagacgggtgaagtgtcaagctcttaacaagtgggaacccgagctcccctcctgctctcgcgtctgccaaccccctcccgagatcctgcatggagagcacactccctctcatcaagataacttctccccagggcaggaagtcttttactcttgtgaacctggatacgacctacggggagccgcttcgttacactgtactccacagggcgactggtctcccgaggcccctaggtgtgcggttaaatcctgtgatgactttctgggacagttacctcacggccgagtgctgtttcccctcaacctgcaactcggcgccaaggtttcatttgtttgcgacgaaggctttcggttgaaaggatcctccgtttcgcactgcgttcttgttgggatgagatcactgtggaacaactccgttccagtttgcgagcacatcttctgtcctaatccaccagcaattctaaatggacgccataccggcacgccctccggcgacattccatatggcaaggagatatcctacacatgcgacccccaccctgacaggggcatgacctttaatctcatcggtgaatctaccattagatgcactagcgacccccatggaaacggagtgtggtcttcccccgccccccgatgtgagctgagtgtgagggcggggcactgtaagacccctgaacaatttccttttgcctctccaacaatccccattaacgactttgaattccccgtggggacttcactgaactatgagtgccgtcctggctactttggaaagatgttttccatctcttgcctggagaacctggtctggtcaagcgtggaagataactgccgccgaaagtcctgtggcccccctccggagccattcaacgggatggtgcacatcaatacagacacccaattcggctccacagtcaactacagctgtaacgaggggttcagactgatcggtagcccaagtaccacttgtcttgttagtgggaacaacgtgacgtgggacaagaaggcgcccatatgtgagattatttcctgcgaaccaccaccgacgatttcaaacggtgacttttactcgaataacagaacgagcttccacaatggtactgtagtcacttaccagtgccatactgggccagatggtgaacagctcttcgagttggtgggagagcgttctatttattgcacaagcaaagatgaccaggtcggtgtgtggtctagtcccccgcctcgctgtatctccaccaataagtgtaccgctcccgaggtcgaaaatgcaatcagggtgccaggaaatagaagtttcttcacacttacggaaataataaggtttcgctgtcaaccagggtttgtcatggtcggttctcacacggttcagtgtcagacaaacggaaggtgggggcccaagttgccccactgttcacgcgtttgtcagcctccaccagagatcctgcacggggagcacacactctcccatcaagataatttttccccaggacaggaggtattctactcctgtgagccatcttacgatttgcgaggagcagcaagcctccattgtacgccccagggcgactggagccccgaagccccacggtgtaccgtgaagagttgcgatgattttctgggacagctaccccatggtagagtgcttctccctctcaatctccagcttggcgccaaagtgagtttcgtatgcgatgaaggattccgcctaaagggccggtctgcatctcactgtgtgttggcaggtatgaaggctctgtggaatagcagcgtccccgtttgcgagcagatattctgcccaaaccctcctgcaatcctcaacggcaggcacactgggacgccattcggcgatataccttatggaaaagagataagttacgcctgcgatacgcatcccgatcgagggatgactttcaatctaatcggcgaaagctcaataaggtgcacaagcgatcctcaaggtaacggggtgtggagctcacctgcccctcggtgtgaattatctgttcctgcagcgtgtccccaccctccgaaaatccaaaatgggcactatattggaggacacgttagtctctaccttcccgggatgactatttcctatatctgcgatccaggctacctgctggtgggaaaggggtttattttttgcacggatcagggaatctggtcccaactggaccactactgtaaagaagttaattgttcttttccactattcatgaatgggatcagcaaggaactggagatgaagaaggtgtaccactacggagattatgttaccctcaaatgcgaagatggatataccctggaggggtcaccctggtctcagtgtcaggcagacgacaggtgggacccaccgctggccaaatgtacgagtcggacgcatgatgccctcattgttggtaccctttctggaaccatatttttcatactgcttattatcttcctgtcttggataattctgaaacatagaaaggggaataacgcccacgagaatcctaaggaggtggccatccacctgcattcacaaggtgggtcatccgtccatcccaggactctccagactaacgaagagaacagtagggtgttgccttag

SEQ ID NO: 12692 - DNA, 6120 bp, Artificial Sequence
  derived and/or modified sequence
atgggagcctcatcacccaggtcgccagaacccgtaggtccccccgctccaggactaccattctgttgcgggggcagcctgctggccgtggtggtgctcctggcacttccagtggcatgggggcagtgcaacgctcccgagtggttgcctttcgcaaggcctacaaacctcacagatgagtttgagttcccaataggaacttaccttaattacgagtgtcgcccagggtacagtggccggccgtttagcattatctgcttgaaaaatagcgtttggacaggagccaaagatcgctgtagaagaaaaagctgtagaaatccgcctgacccagtgaacgggatggtccatgtgatcaaggggatacaattcggcagtcaaatcaagtattcttgcacaaaaggttatagactcattgggagttctagcgcaacatgcatcatctcgggtgacaccgtgatctgggacaacgagacacctatttgtgatcgaattccatgcgggctgccacctaccatcaccaatggagactttatatccacaaatcgagaaaacttccattatggtagtgtcgtgacatatagatgcaaccctggttcaggtggcagaaaggttttcgaacttgtgggggaaccttccatctactgtacaagcaacgatgatcaagtgggaatctggtcgggacctgctccacagtgcatcatccccaataagtgcactccccccaacgtggagaacggcatcctcgtgtcagataatcgcagcttgttctcactgaatgaggtcgtggaatttcgatgccagcccggttttgttatgaagggcccaaggagggtgaagtgccaagctttgaataagtgggaacccgaattgcccagctgttccagggtatgccaaccgccccctgacgtcctccacgccgaaagaacccagagggacaaggacaacttcagtccaggacaggaggtcttttacagttgtgaacccggatacgatctgcggggagcagcatcgatgaggtgtacccctcaaggcgactggagcccagcagcacccacatgtgaggtcaagagttgcgatgattttatggggcagcttctgaacggtcgtgtgctgtttccagtgaatctacaattgggtgctaaggtggacttcgtgtgcgatgaaggattccagctgaagggttcttcagcttcatattgcgtgctggccggcatggaatcactctggaactcctctgttcccgtgtgcgagcagattttttgtcctagcccacccgtcatcccgaacggtagacatactgggaagccactggaggtgttccccttcggcaagactgtcaattacacttgtgatccacacccagaccggggaacatccttcgatttaatcggtgagtcaacaattcgttgcacaagtgatcctcaaggtaacggagtatggtcttctcccgccccccgctgcggaattctgggccactgccaggcccctgatcactttctttttgccaagttgaagacccagacaaatgcctctgatttcccaattggaacatcactaaagtacgagtgccgacccgaatactacggccgccccttcagcattacctgtctggacaatctcgtttggtctagccccaaggatgtgtgtaaaaggaagagttgtaagactccccctgacccagtgaacgggatggtccacgtgatcacggacatccaggttggctcaaggattaactattcatgtacaacaggccatcgcctgattggacactcctccgctgaatgtattctgtctgggaacgctgcccattggagcaccaagccccccatttgccagcggattccctgcgggctccctcctacaattgctaacggcgatttcatttctaccaatagggagaacttccattacggatcagtggtgacatatcgatgcaacccaggctctgggggccgaaaagtgtttgaactcgtcggtgaaccatcgatctattgtacttccaatgacgaccaagttgggatctggagcggcccagctccacagtgcattatccctaacaagtgcacccctccaaatgttgaaaatggaatcctggtaagcgataatagatcactgttctcactcaacgaggtggtggagttccggtgccagccagggttcgtgatgaaagggccacgacgtgtcaaatgccaggctctgaacaagtgggaaccagaacttccttcttgcagtcgcgtgtgtcagcctcctcccgatgtacttcacgccgagaggacacaaagggataaagacaattttagccctggtcaagaagtgttctacagctgtgaaccagggtacgatctcagaggggccgcttccatgcgatgtacccctcaaggggattggagccctgccgctccgacttgcgaggttaagtcttgcgacgatttcatggggcagctacttaatgggcgagtactgttccctgtcaatctgcaactgggtgctaaggtggacttcgtgtgtgacgaaggtttccaactgaaggggagtagcgcttcttactgcgtgttggctgggatggagagcttgtggaatagcagcgtgccggtgtgtgaacagatattctgcccctccccgcctgtaattccaaatggcagacatactgggaaacctctcgaggtttttcctttcggtaagaccgtgaactacacctgtgatccccatccggacaggggaacttctttcgatctcatcggagagtcaactattcggtgcactagcgatccccagggaaatggggtgtggagcagccccgccccgcgctgtgggatactggggcattgtcaggcaccggatcatttcctcttcgccaagctgaagacacagaccaatgcatccgattttccaataggcacatcacttaagtatgagtgcagacccgaatattacggccggcccttttccattacttgtctcgataatctagtttggagcagccccaaagacgtgtgtaagagaaagagctgcaagacccctcctgatcccgtgaacgggatggtgcatgttattacggacatccaagtggggagccggataaactacagctgtacaacaggccaccgcttgatcgggcactcctccgccgaatgcatcctgagcggaaatacagcccactggagcactaagccaccaatctgccagcgaatcccctgtggactccccccaaccatcgccaatggggattttatatcaactaatagggaaaatttccattatgggagtgtggtgacttaccggtgcaacctgggaagccgcggaaggaaggtctttgagctggtcggcgagccctcaatatactgtacatctaacgatgaccaagtgggtatttggtccggccccgccccacagtgcataattcccaacaagtgtaccccccctaatgtggaaaatggtatcttggtttccgacaatagatctctgttctccctgaatgaagtggtggaattcagatgtcaacctggattcgttatgaagggacctcggcgcgtcaagtgccaggctcttaataagtgggaacccgaattaccctcttgctcaagagtgtgccagccaccacctgaaatactgcacggcgagcacacccctagccaccaggacaattttagccctggccaggaggtcttctacagttgtgaaccaggctatgatctgcgcggcgcggcatccttacactgtacaccacagggagattggtcccccgaagctcctcgatgcgcggtaaaatcttgcgacgatttcttgggccagctcccacacgggagagtgctcttcccactgaacttgcagcttggcgccaaggtttccttcgtgtgcgacgagggctttagactaaaggggtcatcggtgagccattgtgttctggtggggatgcgcagcttatggaataactccgtgccggtgtgtgaacacatcttctgtccaaatccacctgcgatcttgaatggtcggcatactggtacccctagtggcgatattccctacggcaaagagatttcctacacctgtgacccacatcctgaccgagggatgaccttcaatctgatcggggagagcactatacgctgcaccagcgacccgcacgggaatggtgtctggtcaagcccggcccccagatgtgaactgtcagtgagagcaggacattgcaagacacccgaacagtttccatttgccagtcccactattccaatcaatgattttgaattccctgtgggtacgtccctcaactacgaatgtcgccctggctactttggaaaaatgttcagcatctcctgcctcgagaacctggtgtggagcagcgtagaggataattgtagaaggaagtcatgcgggccgccgcccgaacctttcaatggcatggttcacatcaacacggatactcagtttgggtctaccgttaattactcttgtaacgaggggttccgcctgatcggctctccctctactacatgtctggtatccggaaacaatgtgacctgggataaaaaagcccccatatgtgagatcatctcatgcgagcctcctccaactatctcaaatggcgacttctattcgaacaaccgtacctcttttcataatgggacagtcgtcacataccagtgccatactggcccggacggtgagcaactgtttgagctcgtgggcgagcgttcaatctattgcacaagcaaggatgatcaggttggagtttggtcaagtccacccccccgttgcatcagtacaaataaatgtactgcccctgaagtggagaacgcaatccgggtccccggcaacaggtccttttttactcttactgagatcataagatttaggtgccagccggggtttgtcatggttggcagccatacggtgcagtgtcagactaatgggcgctgggggcctaaactccctcactgctcacgcgtttgtcagccccccccagaaatcttgcacggggaacacaccctctcacaccaggataatttttctccaggccaggaagtgttttactcatgcgaaccaagctatgatcttagaggggccgcctctttacattgcacccctcagggcgattggagtcctgaggcccccagatgtaccgttaagagctgcgatgacttcctcggccagctgccccacggccgtgttctgctaccgctgaatctgcagctgggggccaaggttagcttcgtgtgcgatgaggggttccgtctcaagggaaggtctgcctcccactgcgtgctcgctggcatgaaggcattatggaattcaagcgtgcctgtgtgcgagcagattttttgtcccaatcccccagcaattttaaacgggcgtcacaccggcactcctttcggagatatcccatatgggaaggagattagctacgcctgcgatacccacccggacagggggatgacatttaacctgataggagagagctccatccgctgcacaagcgacccacaaggtaatggtgtctggtcgagtccagctccgcgttgtgagctgtcggtgccagccgcgtgtccacaccccccaaaaatccaaaatggccattacattgggggccacgtaagcctctatctgcccggcatgacgatatcctacatctgtgaccccggctatttgctggtgggcaaggggttcatcttttgcaccgaccaggggatctggtcccaactggatcactattgcaaagaagtgaactgtagctttcccctgtttatgaatggaatctcaaaggagctggaaatgaagaaggtgtaccactacggagattacgttacacttaagtgtgaagatggatacaccctggaaggatcaccatggtcccaatgccaggccgacgaccggtgggaccctcccctggctaaatgtacttcacgcacccatgacgccttaatcgtcggtaccctgtccggcaccatcttctttatcttgttaattattttccttagttggattatcctgaagcaccgtaagggcaataacgcacatgagaaccccaaggaagtggcgatccacctacactctcaggggggctccagtgttcaccctcggacccttcaaacgaacgaagagaacagccgcgttttaccctag

SEQ ID NO: 12693 - DNA, 6120 bp, Artificial Sequence
  derived and/or modified sequence
atgggggccagtagtcctcggtctcccgagcccgtgggaccacctgcccccggcctccctttctgttgtgggggcagtctcctggcggtcgtagtgctgctagctctcccggtcgcatggggacagtgtaatgcacctgagtggctcccttttgcccgcccaacaaatctgacagatgagttcgagttcccgatcggcacttacctcaattatgaatgccgccccgggtatagtggtagacctttcagcatcatctgcttgaaaaattctgtctggaccggagcgaaagatcgttgcaggaggaagtcgtgtaggaatccgcctgatcctgtgaatggtatggtgcacgtgatcaagggaatccaatttgggagccaaatcaaatacagctgtacaaagggatacaggttgatagggagctcctccgccacgtgtatcatctcaggggataccgttatctgggataatgaaacaccgatctgcgatcggatcccatgtgggctgccgcctactatcacgaatggcgacttcatttcaactaacagggaaaatttccattatggatcagttgtgacctatcgctgtaatcccggtagtggcggccgtaaggtgttcgagctcgtcggcgaaccctctatatactgcaccagcaatgatgaccaggtcggcatctggtctggtccggccccacaatgtatcataccaaacaaatgcacgccaccaaacgttgaaaacgggatcctggtaagtgacaacagatctctattcagcctcaatgaggttgttgagttccgatgccaacctggcttcgttatgaagggccccagacgagtcaaatgtcaggccttgaacaagtgggagccagaacttccaagttgttcacgggtgtgccagcccccgccagatgtgctgcatgccgaacgtacgcagcgcgacaaggacaacttctcccctggacaggaggttttctatagctgtgaacccggctacgaccttcgtggtgctgcctctatgcgttgtactcctcagggagactggagtcctgcggccccaacctgtgaggttaaatcttgcgatgattttatgggacaactccttaatggcagggtcttgttcccagtaaacctccagcttggagccaaagttgattttgtttgcgacgagggtttccaactgaaagggtcaagcgcatcttattgcgtgttggcagggatggagagcctctggaactctagtgtgcccgtgtgcgaacagattttctgcccttcacccccagttattcctaacggcagacacaccggcaagccacttgaggtgttccccttcgggaaaaccgtcaattatacatgcgacccccaccccgacagaggaaccagtttcgatctaattggggagtcgactattagatgtacctccgacccccaaggcaacggcgtgtggagctcacctgcaccacgatgtggcattttaggccactgccaagctcccgaccattttcttttcgccaagctgaagactcaaacgaacgcatccgactttcctatcgggacaagtttaaagtatgaatgcagacctgaatattacggtcggccctttagcatcacatgcctggacaacttggtctggtcctcccctaaggatgtgtgtaaacgaaaatcatgcaaaacaccgcctgaccctgtgaatggaatggtccacgttattacggatattcaagttggtagcaggataaattactcctgcaccacggggcacagactgatcggccattcatctgctgaatgtattctcagcgggaatgccgcccactggtccacgaaaccccctatatgccagcgcatcccgtgtggcctaccacctacaattgctaatggcgactttatcagcaccaaccgggaaaattttcactatggaagtgtcgttacttacagatgtaatcctggctctggcggacgaaaggtcttcgagctagtgggggagccgagcatttactgcacgtctaatgacgatcaagtggggatctggtccggccccgcacctcaatgtatcattccaaataaatgcactccccccaacgtcgagaacggcattttggtgtctgataatcgcagtctgtttagccttaacgaggtagtggagttccggtgccagccaggatttgtgatgaagggacccagaagggtgaagtgtcaggctttgaacaaatgggagcctgagttaccctcctgttcacgcgtatgtcagccaccaccagacgtgctccatgcagagcgcacacagcgggacaaagataatttctcccccggtcaagaggtgttctattcgtgcgagcctggctacgacttacggggcgcagcatccatgagatgcaccccccagggcgactggtccccagccgcccccacctgtgaagttaagtcctgcgacgatttcatggggcaattattaaacggacgggtgctctttcctgtcaatttacagttaggagcaaaggtggattttgtgtgcgatgaaggttttcagctcaagggcagtagcgcctcgtactgcgttttggccggcatggaatcactgtggaatagcagcgtcccagtctgtgagcaaatcttctgtccctcgccaccagtgattccaaacggcagacatacagggaaaccactcgaagttttcccattcggaaaagcggtaaactacacctgcgatccgcaccctgatcgtggaactagcttcgacttgattggcgagagcacaattaggtgtacctccgacccccaagggaatggagtgtggtcgagccccgctccacggtgtgggattctaggacattgccaggcccctgaccattttctgttcgcgaagttgaaaactcaaaccaatgccagcgacttccccatcggtacaagcttgaagtacgagtgccggccagaatattacgggcgacccttcagtataacttgtctagataacctcgtctggtcttctccgaaggatgtatgtaagcggaagagctgcaagacgcctccagatccagttaacggaatggttcacgtgattacggacattcaggtcggatccagaattaactacagctgtaccactggccacaggctgatcgggcacagctccgccgaatgcatactgtccgggaatacggctcactggtccactaagcctcctatatgtcagaggatcccatgcggcttgcccccaactatagccaatggtgacttcatttctaccaatagggagaactttcattacggctctgtggtgacttacagatgcaatctcggaagccgcgggagaaaagtgttcgagctagttggcgaaccttcaatctattgtacttctaacgacgaccaggtagggatctggagcggcccagccccgcaatgtattattccaaataagtgcacgccaccaaatgttgaaaatggcattctcgtgtccgacaaccgatccctatttagtttaaacgaggttgtggagttcaggtgtcagcccggattcgtcatgaagggacccaggagggtgaagtgccaggctctaaataagtgggagccggagctgccttcttgtagccgggtgtgccaacccccccccgagattctgcacggcgagcacactccttcacaccaggacaatttctcgcccggccaggaagtattttacagctgcgagcccgggtatgatcttcgcggcgcagcgagtctccactgtacccctcagggcgattggtcgccagaagccccccggtgcgccgtgaagtcatgcgatgactttttgggacagcttccacacggcagagtccttttccccctcaatctgcagttaggagctaaggtaagtttcgtttgcgacgagggatttaggctcaagggttctagtgttagccactgcgtgctcgtaggcatgcgatccctttggaataattctgtgcccgtgtgcgagcatattttctgcccaaatccccccgctatactcaacggcagacataccggaactcccagcggagacatcccatacggtaaggaaatcagctatacttgcgatccacatcccgatcggggaatgacctttaacttgattggggaaagcacgatcagatgtacttctgatccgcacgggaacggggtgtggtccagtcctgccccacgctgtgaactgtcggtccgggcaggccattgtaagacccccgagcagtttccgtttgctagcccaaccattccgatcaacgattttgaatttccagtagggactagtcttaactacgaatgtcggcctggatactttggcaagatgttttcaatcagctgtctggaaaaccttgtctggagctctgtagaggacaattgccgtcgcaagtcttgtggccctccaccagagccgttcaatggcatggtgcatatcaataccgatacgcagttcggcagcaccgtgaactattcatgcaacgaaggcttcaggctgattgggtcacctagcaccacttgtttggtcagtggaaataatgtaacttgggacaagaaggcgccaatctgcgagatcatctcttgcgagcccccccctaccattagcaacggcgacttttatagcaacaatcgaacttcctttcacaacggcactgttgtaacctatcagtgccacaccgggccagatggtgagcagctctttgagctggtcggcgagaggtcgatttactgtacaagcaaggacgaccaggtgggcgtgtggtcctcccctccacctagatgcatcagcactaacaagtgtaccgcccctgaggttgaaaacgccatacgggttccagggaacagatcatttttcacactgaccgagatcattcgctttagatgccaaccaggattcgtaatggttggaagccacacagtgcaatgccagactaatggccggtggggtccaaaactgccacattgttcgcgcgtttgtcagccaccccctgagatccttcacggcgagcatacactttcccaccaagacaacttcagtccaggtcaggaggttttttacagctgcgagccctcctacgatctgaggggagcagcttcactgcattgtaccccacagggggactggtcccctgaggctccacgctgcacagttaagagctgcgacgatttcctggggcagttgcctcacgggagggttctcctgccactgaatttgcagctaggtgccaaagtgagcttcgtgtgcgacgaggggtttcgtttgaaggggcgcagtgctagccactgcgttctcgcagggatgaaggcactgtggaattcatctgtgccagtctgtgagcagatcttctgcccgaatcccccggccattctcaacggcagacacacaggcacgccatttggcgatatcccatatgggaaggaaatctcgtacgcgtgtgacactcaccctgatcggggaatgaccttcaacctgatcggagaaagcagcatcaggtgcacatctgatccccagggaaatggtgtgtggtcttcccccgcgcctcgatgcgagttgagtgtgcccgctgcctgtcctcatccccccaagatacagaatgggcactacatcggaggccatgttagcctatatctgcctggcatgactatctcctatatttgcgatcccgggtatcttctggtaggcaagggctttattttttgcactgaccaggggatctggtctcaactagatcattattgtaaggaggtgaactgctcatttcccctgtttatgaacggaatttcaaaagagttggagatgaagaaggtgtatcactacggcgattacgttaccttgaaatgcgaggacgggtacacactcgaggggagtccttggagccagtgccaggcggacgatagatgggatccgcccctggctaaatgtacgtcacgaacccatgatgccttaattgtgggtactttatcaggcactatcttcttcatcttgctgattatttttctgtcctggataattcttaagcacagaaaaggtaacaacgcccacgagaatcctaaggaggtggccattcacttacacagccagggcggcagctctgtgcatccccgcacactccaaacgaatgaagaaaacagtagagtgttaccttag

SEQ ID NO: 12694 - DNA, 6120 bp, Artificial Sequence
  derived and/or modified sequence
atgggtgcctcttctccacggtctccagagccagtggggccaccagcaccgggattgccattctgttgtggtggatcactgttggccgttgtggtgctcttggccctccccgtggcctggggtcagtgcaatgctccagaatggctgcccttcgctcgacccaccaatttgacggacgaatttgagttccctatcggaacctatctcaactacgagtgcagaccgggctacagtggtagacctttctccatcatctgcctgaagaactcggtgtggaccggtgcaaaggacaggtgtcgtagaaaatcctgtcgaaaccccccggaccccgtgaacggcatggtgcatgtgatcaagggaattcagtttggcagccagattaaatacagctgtaccaagggatatcgcttaatcggaagttcctccgctacttgcatcattagcggggatacagtgatttgggacaacgagaccccgatctgtgaccggatcccctgcggtcttccacccacaattactaatggagactttatctctacaaatcgtgagaattttcactacggatcggttgtgacatatcggtgtaaccctgggtcggggggacggaaagtttttgaactcgtcggggagccctcaatctactgcacatcgaatgatgatcaggtgggtatttggtcgggacctgcccctcaatgcatcatcccaaataagtgcacaccacccaacgttgaaaatggtatactggtttctgacaacagatctttgttctcgctgaacgaagttgtagagttccgttgtcaacccggctttgtcatgaagggcccccggagggtcaagtgtcaagccctgaataaatgggaacctgagctgccaagttgtagcagagtgtgccagcccccacccgatgtgctgcatgccgaacgcacccagcgcgataaggacaatttttcacctggccaggaggttttttattcctgtgagccgggatatgatctgagaggtgcggcttctatgaggtgcacaccgcagggagattggtcccccgccgctccaacgtgcgaggtgaaatcatgcgatgattttatgggacagctgctcaatgggcgtgtgctatttccagtcaacctccagctgggcgccaaggtagatttcgtgtgtgatgaagggttccagctgaagggctcctcagcatcatactgcgtactcgccggcatggaatcactctggaattcaagcgtgccggtctgcgaacagattttttgcccctcacctccagttatccccaacgggcggcataccggcaagcccttggaggttttcccttttgggaaaactgtgaattacacctgcgaccctcatccagaccggggtacgtccttcgatctcatcggggagtctacaattcgctgtacttctgatccccaggggaatggggtttggtcgagccctgcccctagatgtggaattctcggccattgtcaggcccctgaccactttttgttcgctaagttaaagacacaaaccaatgcgtcagatttcccaattggaacctctcttaagtatgagtgcaggcctgagtactacggaaggcccttttcaattacttgcctggataacttggtgtggtcttctcctaaggatgtgtgcaagcggaagagctgtaagaccccgcctgatcctgttaatgggatggtgcacgttataactgatattcaagtgggttcaagaatcaattactcttgtacaaccggacacaggctgattggacactcctctgcagaatgcatactttcaggcaatgccgctcactggtccaccaagcctccaatttgtcagcggatcccctgcggtctccccccaactatcgccaacggagacttcattagcactaatagagaaaacttccattacggaagtgtggttacttatcgatgcaaccccgggtccggaggtcggaaggtctttgagcttgtgggtgaacccagcatctactgcacatcaaacgatgatcaggttggcatctggtccggaccagcacctcagtgcatcataccaaacaagtgtacccctcctaacgtggagaacgggattttggtttctgataacagaagtctgttttccctgaacgaggtggtggagttccgctgccagccgggatttgttatgaagggtcctcgcagagttaagtgccaagcattgaataaatgggagcccgagttgccaagctgcagtagggtgtgccaacctccacctgacgtgctgcacgcagaacggacccagcgagataaggacaacttctctccagggcaggaggttttctactcctgcgagccgggctacgacctcaggggggccgcctccatgcgctgcaccccgcagggcgattggagcccagctgctcctacttgtgaggtgaagagctgcgacgatttcatgggtcagttgctcaacggcagggtcttatttcctgtcaacctgcagctgggagccaaggtagatttcgtctgcgatgaaggctttcagcttaagggaagctcagcgagttactgcgtgctggctggcatggaaagtctctggaattcatccgtgccagtttgtgagcaaatcttttgcccttctcctccagtcatccccaacggtagacatacaggcaagccgctcgaggtcttccccttcggtaaagctgttaattatacttgcgatcctcatcctgacaggggaacctcattcgatttgattggtgagagtactattaggtgtacttccgatcctcaggggaatggagtgtggagctcgcctgctcccagatgcgggatcctcggacactgtcaggcgccagaccatttcctgtttgccaaattgaaaacccaaacgaatgcttcagactttccaataggaactagcctcaaatatgagtgcaggcctgagtactatggcaggcctttctctatcacctgcctggataacctggtctggtcttctcccaaagacgtctgcaagagaaagtcttgcaagacacccccggaccccgtaaatggaatggttcacgtcatcaccgacatccaggtgggctctcggatcaattatagttgcacgactggccatagattgatcggtcactcctccgctgaatgcatcttgagcggcaacactgcccattggtcaaccaagccacccatttgtcagcgcatcccttgtggccttccccccaccattgccaatggcgattttatcagtaccaacagggaaaacttccattatggctctgtcgtgacctatcgctgtaacttggggtctcgaggcagaaaagtctttgaactggtgggagaaccctcaatttattgcacctctaatgacgatcaggtcggcatctggagcggccccgctcctcaatgcatcatccctaataagtgcaccccaccaaatgtcgagaatggcatattggtttctgataaccgctccctgttcagtctcaatgaggtggtcgaattcagatgccagcccggatttgtgatgaaaggcccaagacgcgttaaatgccaggccctgaataagtgggagccagagctcccttcctgctcgagggtgtgtcagcccccccctgaaatcctccatggggaacataccccttcacatcaggacaatttctctcctggacaggaagtattctactcgtgcgagccaggttatgatttgcgaggagccgcctctctccattgcacgccacaaggcgattggagtcctgaggcacctcggtgcgcagtcaaaagctgcgacgacttcctcggacagctgccccacgggagggtgctatttcctttgaacttacagctgggcgccaaggtatcattcgtgtgcgacgaggggttccgcctgaaaggctcatcagtgtcacattgtgtactggtgggaatgcgcagcctgtggaataactccgtgcccgtttgtgaacatattttttgtcctaacccacctgcaattctgaacggccggcacacagggacgccctccggggatataccctatggcaaggagatcagctacacatgtgacccgcatccagacaggggtatgacctttaatcttattggagaatccactatacgatgcacatcagatcctcacggtaacggcgtctggagttctcctgctcccagatgcgagttgtccgtgagagcaggccactgtaaaacccctgaacagttccccttcgcttcccccactatccccataaacgatttcgaatttccagtcggtacttctctcaactatgagtgcagacccgggtactttggcaagatgttcagtatctcctgcctcgagaacctggtatggagctcagttgaggataactgtaggagaaagtcctgtggtcctcctcccgagcccttcaacggcatggtgcacattaacacagacacccaattcggctctaccgtgaactattcttgcaatgaagggtttcgccttattgggtcacccagcacaacctgcctggtatccggtaacaatgtcacgtgggataagaaggcacccatctgtgagattatcagctgcgagcctccacctactatctccaatggtgatttctatagtaacaacaggacgtcctttcacaatggaacagtagttacgtatcagtgtcatacaggaccagatggtgagcagctgttcgagctggtgggcgagaggtccatctactgtacttccaaagacgaccaagtgggagtgtggagttcccccccacctagatgcatctctacaaacaaatgcactgccccagaggtggagaacgcaatacgcgtaccaggaaacaggtcttttttcaccctgacagagattattcgtttccgttgtcagccaggtttcgtgatggtgggtagtcacaccgtgcagtgccagaccaacgggcgttggggacccaaactgcctcattgtagcagggtgtgtcagcccccccctgagatcctgcacggggagcacaccttgtcgcaccaggacaacttctcgcccgggcaggaggtgttctattcctgtgagccaagttatgacttgcgaggtgcagcgtccctacattgcacgcctcaaggggactggagtccggaagcacctagatgcacagtgaagtcgtgcgacgatttcctggggcagctgccgcacgggcgggtcctgctgcctctgaatctacagctcggagcgaaagtgagctttgtgtgcgatgagggctttaggctcaagggacggagtgcttcacactgtgtgcttgctgggatgaaggctctctggaactctagcgtcccagtctgcgaacaaattttctgcccaaacccacccgctatactcaatggacgccatacagggacccctttcggggacatcccgtatgggaaagaaattagttacgcatgtgatactcatcccgatagaggtatgactttcaaccttatcggggagagtagcattaggtgcacttcggatccccaaggaaacggtgtttggtcctcgcctgctccccggtgcgagctgagcgtacctgccgcctgtccacacccacccaaaatccagaacgggcattacattgggggacatgtctcactctacctccccggcatgactatatcatatatttgcgatccgggctacctcctggtcggcaagggatttatattttgcaccgaccagggtatctggtcacagctcgaccactattgtaaagaggttaactgctcatttcccctgtttatgaacgggatctcaaaggaactggaaatgaagaaggtgtatcattacggcgattatgtaacactcaaatgtgaagatggttacaccctagagggcagcccctggtcacagtgccaggccgatgataggtgggatccgcctctagccaagtgcacatctagaactcatgatgctctgatcgtgggtacactgagcggaacaatattctttatcctgctgattatttttctgtcatggatcatactgaaacacagaaaggggaataatgcccatgagaacccaaaggaagtggcaatccacctacactcccagggaggcagttccgtccaccccagaacactgcagaccaatgaggaaaatagtcgtgtgttaccttag

SEQ ID NO: 12695 - DNA, 6120 bp, Artificial Sequence
  derived and/or modified sequence
atgggcgccagcagccccaggagccctgagcctgtgggccccccagcccctggcctgcccttctgctgcggcggcagcctgctggccgtggtggtgctgctggccctgcctgtggcctggggccagtgcaatgcccctgagtggctgccctttgcccggcccaccaacctgacagatgaatttgagttccccatcggcacctacctgaactatgagtgcaggcctggctacagcggccggcccttcagcatcatctgcctgaagaacagcgtgtggacaggagccaaggaccgctgcaggaggaagagctgcagaaatcctccagaccctgtgaatggcatggtgcacgtgatcaagggcatccagtttggcagccagatcaagtacagctgcaccaagggctaccgcctcatcggcagcagcagcgccacctgcatcatcagcggggacaccgtcatctgggacaatgagacccccatctgtgaccgcatcccctgtggcctgccccccaccatcgccaacggggacttcatcagcaccaaccgggagaacttccactacggctctgtggtgacctaccgctgcaaccctggcagcggcggcaggaaggtgtttgagctggtgggggagcccagcatctactgcaccagcaatgatgaccaggtgggcatctggagcggccctgccccccagtgcatcatccccaacaagtgcaccccacccaacgtggagaatggcatcctggtgtctgacaacagaagcctcttcagcctgaatgaggtggtggagttccgctgccagcccggctttgtgatgaagggcccccggcgggtgaagtgccaggccctgaacaagtgggagcctgagctgcccagctgcagccgggtgtgccagcccccaccagatgtgctgcacgccgagaggacccagagggacaaggacaacttcagccctggccaggaggtgttctacagctgtgagcccggctatgacctgcggggagctgcctccatgcgctgcaccccccagggcgactggagccctgctgcccccacctgtgaggtgaagagctgtgatgacttcatgggccagctgctgaatggccgggtgctcttccctgtgaacctgcagctgggcgccaaggtggactttgtgtgtgatgagggcttccagctgaagggcagcagcgccagctactgtgtgctggccggcatggagagcctgtggaacagctctgtgcctgtgtgtgagcagatcttctgccccagcccccctgtgatccccaacggccgccacacaggcaagcccctggaggtgttcccctttgggaagacagtgaactacacctgtgacccccacccagaccggggcaccagctttgacctgattggagagagcaccatccgctgcaccagtgacccccagggcaatggagtgtggagcagccctgccccccgctgtggcatcctgggccactgccaggccccagaccacttcctgtttgccaagctgaagacccagaccaatgccagtgacttccccatcggcaccagcctgaagtatgagtgcaggcctgagtactacggccggcccttcagcatcacctgcctggacaacctggtgtggagcagccccaaggatgtgtgcaagaggaagagctgcaagaccccaccagaccctgtgaatggcatggtgcacgtgatcacagacatccaggtgggcagccgcatcaactacagctgcaccaccggccacaggctcatcggccacagcagcgctgagtgcatcctgtctggaaatgctgcccactggagcaccaagccacccatctgccagaggatcccctgtggcctgccccccaccatcgccaacggggacttcatcagcaccaaccgggagaacttccactacggctctgtggtgacctaccgctgcaaccctggcagcggcggcaggaaggtgtttgagctggtgggggagcccagcatctactgcaccagcaatgatgaccaggtgggcatctggagcggccctgccccccagtgcatcatccccaacaagtgcaccccacccaacgtggagaatggcatcctggtgtctgacaacagaagcctcttcagcctgaatgaggtggtggagttccgctgccagcccggctttgtgatgaagggcccccggcgggtgaagtgccaggccctgaacaagtgggagcctgagctgcccagctgcagccgggtgtgccagcccccaccagatgtgctgcacgccgagaggacccagagggacaaggacaacttcagccctggccaggaggtgttctacagctgtgagcccggctatgacctgcggggagctgcctccatgcgctgcaccccccagggcgactggagccctgctgcccccacctgtgaggtgaagagctgtgatgacttcatgggccagctgctgaatggccgggtgctcttccctgtgaacctgcagctgggcgccaaggtggactttgtgtgtgatgagggcttccagctgaagggcagcagcgccagctactgtgtgctggccggcatggagagcctgtggaacagctctgtgcctgtgtgtgagcagatcttctgccccagcccccctgtgatccccaacggccgccacacaggcaagcccctggaggtgttcccctttgggaaggctgtgaactacacctgtgacccccacccagaccggggcaccagctttgacctgattggagagagcaccatccgctgcaccagtgacccccagggcaatggagtgtggagcagccctgccccccgctgtggcatcctgggccactgccaggccccagaccacttcctgtttgccaagctgaagacccagaccaatgccagtgacttccccatcggcaccagcctgaagtatgagtgcaggcctgagtactacggccggcccttcagcatcacctgcctggacaacctggtgtggagcagccccaaggatgtgtgcaagaggaagagctgcaagaccccaccagaccctgtgaatggcatggtgcacgtgatcacagacatccaggtgggcagccgcatcaactacagctgcaccaccggccacaggctcatcggccacagcagcgctgagtgcatcctgagcggcaacacagcccactggagcaccaagccacccatctgccagaggatcccctgtggcctgccccccaccatcgccaacggggacttcatcagcaccaaccgggagaacttccactacggctctgtggtgacctaccgctgcaacctgggcagccggggcaggaaggtgtttgagctggtgggggagcccagcatctactgcaccagcaatgatgaccaggtgggcatctggagcggccctgccccccagtgcatcatccccaacaagtgcaccccacccaacgtggagaatggcatcctggtgtctgacaacagaagcctcttcagcctgaatgaggtggtggagttccgctgccagcccggctttgtgatgaagggcccccggcgggtgaagtgccaggccctgaacaagtgggagcctgagctgcccagctgcagccgggtgtgccagcccccacctgagatcctgcatggagagcacacccccagccaccaggacaacttcagccctggccaggaggtgttctacagctgtgagcccggctatgacctgcggggagctgccagcctgcactgcaccccccagggcgactggagccctgaggccccccgctgtgctgtgaagagctgtgatgacttcctgggccagctgccccacggccgggtgctcttccccctgaacctgcagctgggcgccaaggtgtcctttgtgtgtgatgagggcttccggctgaagggcagctctgtgagccactgtgtgctggtgggcatgaggagcctgtggaacaacagcgtgcctgtgtgtgagcacatcttctgccccaaccccccagccatcctgaatggccgccacacaggcaccccatctggggacatcccctacggcaaggagatctcctacacctgtgacccccacccagaccggggcatgaccttcaacctgattggagagagcaccatccgctgcaccagtgacccccatggaaatggagtgtggagcagccctgccccccgctgtgagctgtctgtgcgggccggccactgcaagaccccagagcagttcccctttgccagccccaccatccccatcaatgactttgagttccctgtgggcaccagcctgaactatgaatgtcggcccggctactttgggaagatgttcagcatcagctgcctggagaacctggtgtggagctctgtggaggacaactgcaggaggaagagctgtggccccccacctgagcccttcaacggcatggtgcacatcaacacagacacccagtttggcagcacagtgaactacagctgcaatgaaggcttccggctgattggcagccccagcaccacctgcctggtgtctggcaacaacgtgacctgggacaagaaggcccccatctgtgagatcatcagctgtgagcccccacccaccatcagcaatggagacttctacagcaacaacagaaccagcttccacaacggcaccgtggtgacctaccagtgccacacaggcccagatggagagcagctgtttgagctggtgggggagaggagcatctactgcaccagcaaggatgaccaggtgggcgtgtggagcagccccccaccccgctgcatcagcaccaacaagtgcacagcccctgaggtggagaatgccatccgggtgcccggcaacagaagcttcttcaccctgacagagatcatccgcttccgctgccagcccggctttgtgatggtgggcagccacacagtgcagtgccagaccaacggccgctggggccccaagctgccccactgcagccgggtgtgccagcccccacctgagatcctgcacggggagcacaccctgagccaccaggacaacttcagccctggccaggaggtgttctacagctgtgagcccagctatgacctgcggggggccgccagcctgcactgcaccccccagggcgactggagccctgaggccccccgctgcaccgtgaagagctgtgatgacttcctgggccagctgccccacggccgggtgctgctgcccctgaacctgcagctgggcgccaaggtgtcctttgtgtgtgatgagggcttccggctgaagggccgcagcgccagccactgtgtgctggccggcatgaaggccctgtggaacagctctgtgcctgtgtgtgagcagatcttctgccccaaccccccagccatcctgaatggccgccacacaggcaccccatttggagacatcccctacggcaaggagatctcctatgcctgtgacacccacccagaccggggcatgaccttcaacctgattggagagagcagcatccgctgcaccagtgacccccagggcaatggagtgtggagcagccctgccccccgctgtgagctgtctgtgcctgctgcctgcccccacccccccaagatccagaatggccactacatcggcggccacgtgtccctgtacctgcccggcatgaccatctcctacatctgtgaccccggctacctgctggtgggcaagggcttcatcttctgcacagaccagggcatctggagccagctggaccactactgcaaggaggtgaactgcagcttccccctcttcatgaatggcatcagcaaggagctggagatgaagaaggtgtaccactacggggactatgtgaccctgaagtgtgaagatggctacaccctggagggcagcccctggagccagtgccaggctgatgaccgctgggacccccccctggccaagtgcaccagcaggacccatgatgccctgattgtgggcaccctgagcggcaccatcttcttcatcctgctgatcatcttcctgtcctggatcatcctgaagcacaggaagggcaacaatgcccacgagaaccccaaggaggtggccatccacctgcacagccagggcggcagctctgtgcaccccaggaccctgcagaccaatgaggagaacagccgggtgctgccctag

SEQ ID NO: 12696 - DNA, 6120 bp, Artificial Sequence
  derived and/or modified sequence
atgggcgccagcagccccaggagccctgagcctgtgggccccccagcccctggcctgcccttctgctgcggcggcagcctgctggccgtggtggtgctgctggccctgcctgtggcctggggccagtgcaatgcccctgagtggctgccctttgcccggcccaccaacctgacagatgaatttgagttccccatcggcacctacctgaactatgagtgcaggcctggctacagcggccggcccttcagcatcatctgcctgaagaacagcgtgtggacaggagccaaggaccgctgcaggaggaagagctgcagaaatcctccagaccctgtgaatggcatggtgcacgtgatcaagggcatccagtttggcagccagatcaagtacagctgcaccaagggctaccgcctcatcggcagcagcagcgccacctgcatcatcagcggggacaccgtcatctgggacaatgagacccccatctgtgaccgcatcccctgtggcctgccccccaccatcaccaacggggacttcatcagcaccaaccgggagaacttccactacggctctgtggtgacctaccgctgcaaccctggcagcggcggcaggaaggtgtttgagctggtgggggagcccagcatctactgcaccagcaatgatgaccaggtgggcatctggagcggccctgccccccagtgcatcatccccaacaagtgcaccccacccaacgtggagaatggcatcctggtgtctgacaacagaagcctcttcagcctgaatgaggtggtggagttccgctgccagcccggctttgtgatgaagggcccccggcgggtgaagtgccaggccctgaacaagtgggagcctgagctgcccagctgcagccgggtgtgccagcccccaccagatgtgctgcacgccgagaggacccagagggacaaggacaacttcagccctggccaggaggtgttctacagctgtgagcccggctatgacctgcggggagctgcctccatgcgctgcaccccccagggcgactggagccctgctgcccccacctgtgaggtgaagagctgtgatgacttcatgggccagctgctgaatggccgggtgctcttccctgtgaacctgcagctgggcgccaaggtggactttgtgtgtgatgagggcttccagctgaagggcagcagcgccagctactgtgtgctggccggcatggagagcctgtggaacagctctgtgcctgtgtgtgagcagatcttctgccccagcccccctgtgatccccaacggccgccacacaggcaagcccctggaggtgttcccctttgggaagacagtgaactacacctgtgacccccacccagaccggggcaccagctttgacctgattggagagagcaccatccgctgcaccagtgacccccagggcaatggagtgtggagcagccctgccccccgctgtggcatcctgggccactgccaggccccagaccacttcctgtttgccaagctgaagacccagaccaatgccagtgacttccccatcggcaccagcctgaagtatgagtgcaggcctgagtactacggccggcccttcagcatcacctgcctggacaacctggtgtggagcagccccaaggatgtgtgcaagaggaagagctgcaagaccccaccagaccctgtgaatggcatggtgcacgtgatcacagacatccaggtgggcagccgcatcaactacagctgcaccaccggccacaggctcatcggccacagcagcgctgagtgcatcctgtctggaaatgctgcccactggagcaccaagccacccatctgccagaggatcccctgtggcctgccccccaccatcgccaacggggacttcatcagcaccaaccgggagaacttccactacggctctgtggtgacctaccgctgcaaccctggcagcggcggcaggaaggtgtttgagctggtgggggagcccagcatctactgcaccagcaatgatgaccaggtgggcatctggagcggccctgccccccagtgcatcatccccaacaagtgcaccccacccaacgtggagaatggcatcctggtgtctgacaacagaagcctcttcagcctgaatgaggtggtggagttccgctgccagcccggctttgtgatgaagggcccccggcgggtgaagtgccaggccctgaacaagtgggagcctgagctgcccagctgcagccgggtgtgccagcccccaccagatgtgctgcacgccgagaggacccagagggacaaggacaacttcagccctggccaggaggtgttctacagctgtgagcccggctatgacctgcggggagctgcctccatgcgctgcaccccccagggcgactggagccctgctgcccccacctgtgaggtgaagagctgtgatgacttcatgggccagctgctgaatggccgggtgctcttccctgtgaacctgcagctgggcgccaaggtggactttgtgtgtgatgagggcttccagctgaagggcagcagcgccagctactgtgtgctggccggcatggagagcctgtggaacagctctgtgcctgtgtgtgagcagatcttctgccccagcccccctgtgatccccaacggccgccacacaggcaagcccctggaggtgttcccctttgggaagacagtgaactacacctgtgacccccacccagaccggggcaccagctttgacctgattggagagagcaccatccgctgcaccagtgacccccagggcaatggagtgtggagcagccctgccccccgctgtggcatcctgggccactgccaggccccagaccacttcctgtttgccaagctgaagacccagaccaatgccagtgacttccccatcggcaccagcctgaagtatgagtgcaggcctgagtactacggccggcccttcagcatcacctgcctggacaacctggtgtggagcagccccaaggatgtgtgcaagaggaagagctgcaagaccccaccagaccctgtgaatggcatggtgcacgtgatcacagacatccaggtgggcagccgcatcaactacagctgcaccaccggccacaggctcatcggccacagcagcgctgagtgcatcctgagcggcaacacagcccactggagcaccaagccacccatctgccagaggatcccctgtggcctgccccccaccatcgccaacggggacttcatcagcaccaaccgggagaacttccactacggctctgtggtgacctaccgctgcaacctgggcagccggggcaggaaggtgtttgagctggtgggggagcccagcatctactgcaccagcaatgatgaccaggtgggcatctggagcggccctgccccccagtgcatcatccccaacaagtgcaccccacccaacgtggagaatggcatcctggtgtctgacaacagaagcctcttcagcctgaatgaggtggtggagttccgctgccagcccggctttgtgatgaagggcccccggcgggtgaagtgccaggccctgaacaagtgggagcctgagctgcccagctgcagccgggtgtgccagcccccacctgagatcctgcatggagagcacacccccagccaccaggacaacttcagccctggccaggaggtgttctacagctgtgagcccggctatgacctgcggggagctgccagcctgcactgcaccccccagggcgactggagccctgaggccccccgctgtgctgtgaagagctgtgatgacttcctgggccagctgccccacggccgggtgctcttccccctgaacctgcagctgggcgccaaggtgtcctttgtgtgtgatgagggcttccggctgaagggcagctctgtgagccactgtgtgctggtgggcatgaggagcctgtggaacaacagcgtgcctgtgtgtgagcacatcttctgccccaaccccccagccatcctgaatggccgccacacaggcaccccatctggggacatcccctacggcaaggagatctcctacacctgtgacccccacccagaccggggcatgaccttcaacctgattggagagagcaccatccgctgcaccagtgacccccatggaaatggagtgtggagcagccctgccccccgctgtgagctgtctgtgcgggccggccactgcaagaccccagagcagttcccctttgccagccccaccatccccatcaatgactttgagttccctgtgggcaccagcctgaactatgaatgtcggcccggctactttgggaagatgttcagcatcagctgcctggagaacctggtgtggagctctgtggaggacaactgcaggaggaagagctgtggccccccacctgagcccttcaacggcatggtgcacatcaacacagacacccagtttggcagcacagtgaactacagctgcaatgaaggcttccggctgattggcagccccagcaccacctgcctggtgtctggcaacaacgtgacctgggacaagaaggcccccatctgtgagatcatcagctgtgagcccccacccaccatcagcaatggagacttctacagcaacaacagaaccagcttccacaacggcaccgtggtgacctaccagtgccacacaggcccagatggagagcagctgtttgagctggtgggggagaggagcatctactgcaccagcaaggatgaccaggtgggcgtgtggagcagccccccaccccgctgcatcagcaccaacaagtgcacagcccctgaggtggagaatgccatccgggtgcccggcaacagaagcttcttcaccctgacagagatcatccgcttccgctgccagcccggctttgtgatggtgggcagccacacagtgcagtgccagaccaacggccgctggggccccaagctgccccactgcagccgggtgtgccagcccccacctgagatcctgcacggggagcacaccctgagccaccaggacaacttcagccctggccaggaggtgttctacagctgtgagcccagctatgacctgcggggggccgccagcctgcactgcaccccccagggcgactggagccctgaggccccccgctgcaccgtgaagagctgtgatgacttcctgggccagctgccccacggccgggtgctgctgcccctgaacctgcagctgggcgccaaggtgtcctttgtgtgtgatgagggcttccggctgaagggccgcagcgccagccactgtgtgctggccggcatgaaggccctgtggaacagctctgtgcctgtgtgtgagcagatcttctgccccaaccccccagccatcctgaatggccgccacacaggcaccccatttggagacatcccctacggcaaggagatctcctatgcctgtgacacccacccagaccggggcatgaccttcaacctgattggagagagcagcatccgctgcaccagtgacccccagggcaatggagtgtggagcagccctgccccccgctgtgagctgtctgtgcctgctgcctgcccccacccccccaagatccagaatggccactacatcggcggccacgtgtccctgtacctgcccggcatgaccatctcctacatctgtgaccccggctacctgctggtgggcaagggcttcatcttctgcacagaccagggcatctggagccagctggaccactactgcaaggaggtgaactgcagcttccccctcttcatgaatggcatcagcaaggagctggagatgaagaaggtgtaccactacggggactatgtgaccctgaagtgtgaagatggctacaccctggagggcagcccctggagccagtgccaggctgatgaccgctgggacccccccctggccaagtgcaccagcaggacccatgatgccctgattgtgggcaccctgagcggcaccatcttcttcatcctgctgatcatcttcctgtcctggatcatcctgaagcacaggaagggcaacaatgcccacgagaaccccaaggaggtggccatccacctgcacagccagggcggcagctctgtgcaccccaggaccctgcagaccaatgaggagaacagccgggtgctgccctag

SEQ ID NO: 12697 - DNA, 6120 bp, Artificial Sequence
  derived and/or modified sequence
atgggcgccagcagccccaggagccctgagcctgtgggccccccagcccctggcctgcccttctgctgcggcggcagcctgctggccgtggtggtgctgctggccctgcctgtggcctggggccagtgcaatgcccctgagtggctgccctttgcccggcccaccaacctgacagatgaatttgagttccccatcggcacctacctgaactatgagtgcaggcctggctacagcggccggcccttcagcatcatctgcctgaagaacagcgtgtggacaggagccaaggaccgctgcaggaggaagagctgcagaaatcctccagaccctgtgaatggcatggtgcacgtgatcaagggcatccagtttggcagccagatcaagtacagctgcaccaagggctaccgcctcatcggcagcagcagcgccacctgcatcatcagcggggacaccgtcatctgggacaatgagacccccatctgtgaccgcatcccctgtggcctgccccccaccatcaccaacggggacttcatcagcaccaaccgggagaacttccactacggctctgtggtgacctaccgctgcaaccctggcagcggcggcaggaaggtgtttgagctggtgggggagcccagcatctactgcaccagcaatgatgaccaggtgggcatctggagcggccctgccccccagtgcatcatccccaacaagtgcaccccacccaacgtggagaatggcatcctggtgtctgacaacagaagcctcttcagcctgaatgaggtggtggagttccgctgccagcccggctttgtgatgaagggcccccggcgggtgaagtgccaggccctgaacaagtgggagcctgagctgcccagctgcagccgggtgtgccagcccccaccagatgtgctgcacgccgagaggacccagagggacaaggacaacttcagccctggccaggaggtgttctacagctgtgagcccggctatgacctgcggggagctgcctccatgcgctgcaccccccagggcgactggagccctgctgcccccacctgtgaggtgaagagctgtgatgacttcatgggccagctgctgaatggccgggtgctcttccctgtgaacctgcagctgggcgccaaggtggactttgtgtgtgatgagggcttccagctgaagggcagcagcgccagctactgtgtgctggccggcatggagagcctgtggaacagctctgtgcctgtgtgtgagcagatcttctgccccagcccccctgtgatccccaacggccgccacacaggcaagcccctggaggtgttcccctttgggaagacagtgaactacacctgtgacccccacccagaccggggcaccagctttgacctgattggagagagcaccatccgctgcaccagtgacccccagggcaatggagtgtggagcagccctgccccccgctgtggcatcctgggccactgccaggccccagaccacttcctgtttgccaagctgaagacccagaccaatgccagtgacttccccatcggcaccagcctgaagtatgagtgcaggcctgagtactacggccggcccttcagcatcacctgcctggacaacctggtgtggagcagccccaaggatgtgtgcaagaggaagagctgcaagaccccaccagaccctgtgaatggcatggtgcacgtgatcacagacatccaggtgggcagccgcatcaactacagctgcaccaccggccacaggctcatcggccacagcagcgctgagtgcatcctgtctggaaatgctgcccactggagcaccaagccacccatctgccagaggatcccctgtggcctgccccccaccatcgccaacggggacttcatcagcaccaaccgggagaacttccactacggctctgtggtgacctaccgctgcaaccctggcagcggcggcaggaaggtgtttgagctggtgggggagcccagcatctactgcaccagcaatgatgaccaggtgggcatctggagcggccctgccccccagtgcatcatccccaacaagtgcaccccacccaacgtggagaatggcatcctggtgtctgacaacagaagcctcttcagcctgaatgaggtggtggagttccgctgccagcccggctttgtgatgaagggcccccggcgggtgaagtgccaggccctgaacaagtgggagcctgagctgcccagctgcagccgggtgtgccagcccccaccagatgtgctgcacgccgagaggacccagagggacaaggacaacttcagccctggccaggaggtgttctacagctgtgagcccggctatgacctgcggggagctgcctccatgcgctgcaccccccagggcgactggagccctgctgcccccacctgtgaggtgaagagctgtgatgacttcatgggccagctgctgaatggccgggtgctcttccctgtgaacctgcagctgggcgccaaggtggactttgtgtgtgatgagggcttccagctgaagggcagcagcgccagctactgtgtgctggccggcatggagagcctgtggaacagctctgtgcctgtgtgtgagcagatcttctgccccagcccccctgtgatccccaacggccgccacacaggcaagcccctggaggtgttcccctttgggaaggctgtgaactacacctgtgacccccacccagaccggggcaccagctttgacctgattggagagagcaccatccgctgcaccagtgacccccagggcaatggagtgtggagcagccctgccccccgctgtggcatcctgggccactgccaggccccagaccacttcctgtttgccaagctgaagacccagaccaatgccagtgacttccccatcggcaccagcctgaagtatgagtgcaggcctgagtactacggccggcccttcagcatcacctgcctggacaacctggtgtggagcagccccaaggatgtgtgcaagaggaagagctgcaagaccccaccagaccctgtgaatggcatggtgcacgtgatcacagacatccaggtgggcagccgcatcaactacagctgcaccaccggccacaggctcatcggccacagcagcgctgagtgcatcctgagcggcaacacagcccactggagcaccaagccacccatctgccagaggatcccctgtggcctgccccccaccatcgccaacggggacttcatcagcaccaaccgggagaacttccactacggctctgtggtgacctaccgctgcaacctgggcagccggggcaggaaggtgtttgagctggtgggggagcccagcatctactgcaccagcaatgatgaccaggtgggcatctggagcggccctgccccccagtgcatcatccccaacaagtgcaccccacccaacgtggagaatggcatcctggtgtctgacaacagaagcctcttcagcctgaatgaggtggtggagttccgctgccagcccggctttgtgatgaagggcccccggcgggtgaagtgccaggccctgaacaagtgggagcctgagctgcccagctgcagccgggtgtgccagcccccacctgagatcctgcatggagagcacacccccagccaccaggacaacttcagccctggccaggaggtgttctacagctgtgagcccggctatgacctgcggggagctgccagcctgcactgcaccccccagggcgactggagccctgaggccccccgctgtgctgtgaagagctgtgatgacttcctgggccagctgccccacggccgggtgctcttccccctgaacctgcagctgggcgccaaggtgtcctttgtgtgtgatgagggcttccggctgaagggcagctctgtgagccactgtgtgctggtgggcatgaggagcctgtggaacaacagcgtgcctgtgtgtgagcacatcttctgccccaaccccccagccatcctgaatggccgccacacaggcaccccatctggggacatcccctacggcaaggagatctcctacacctgtgacccccacccagaccggggcatgaccttcaacctgattggagagagcaccatccgctgcaccagtgacccccatggaaatggagtgtggagcagccctgccccccgctgtgagctgtctgtgcgggccggccactgcaagaccccagagcagttcccctttgccagccccaccatccccatcaatgactttgagttccctgtgggcaccagcctgaactatgaatgtcggcccggctactttgggaagatgttcagcatcagctgcctggagaacctggtgtggagctctgtggaggacaactgcaggaggaagagctgtggccccccacctgagcccttcaacggcatggtgcacatcaacacagacacccagtttggcagcacagtgaactacagctgcaatgaaggcttccggctgattggcagccccagcaccacctgcctggtgtctggcaacaacgtgacctgggacaagaaggcccccatctgtgagatcatcagctgtgagcccccacccaccatcagcaatggagacttctacagcaacaacagaaccagcttccacaacggcaccgtggtgacctaccagtgccacacaggcccagatggagagcagctgtttgagctggtgggggagaggagcatctactgcaccagcaaggatgaccaggtgggcgtgtggagcagccccccaccccgctgcatcagcaccaacaagtgcacagcccctgaggtggagaatgccatccgggtgcccggcaacagaagcttcttcaccctgacagagatcatccgcttccgctgccagcccggctttgtgatggtgggcagccacacagtgcagtgccagaccaacggccgctggggccccaagctgccccactgcagccgggtgtgccagcccccacctgagatcctgcacggggagcacaccctgagccaccaggacaacttcagccctggccaggaggtgttctacagctgtgagcccagctatgacctgcggggggccgccagcctgcactgcaccccccagggcgactggagccctgaggccccccgctgcaccgtgaagagctgtgatgacttcctgggccagctgccccacggccgggtgctgctgcccctgaacctgcagctgggcgccaaggtgtcctttgtgtgtgatgagggcttccggctgaagggccgcagcgccagccactgtgtgctggccggcatgaaggccctgtggaacagctctgtgcctgtgtgtgagcagatcttctgccccaaccccccagccatcctgaatggccgccacacaggcaccccatttggagacatcccctacggcaaggagatctcctatgcctgtgacacccacccagaccggggcatgaccttcaacctgattggagagagcagcatccgctgcaccagtgacccccagggcaatggagtgtggagcagccctgccccccgctgtgagctgtctgtgcctgctgcctgcccccacccccccaagatccagaatggccactacatcggcggccacgtgtccctgtacctgcccggcatgaccatctcctacatctgtgaccccggctacctgctggtgggcaagggcttcatcttctgcacagaccagggcatctggagccagctggaccactactgcaaggaggtgaactgcagcttccccctcttcatgaatggcatcagcaaggagctggagatgaagaaggtgtaccactacggggactatgtgaccctgaagtgtgaagatggctacaccctggagggcagcccctggagccagtgccaggctgatgaccgctgggacccccccctggccaagtgcaccagcaggacccatgatgccctgattgtgggcaccctgagcggcaccatcttcttcatcctgctgatcatcttcctgtcctggatcatcctgaagcacaggaagggcaacaatgcccacgagaaccccaaggaggtggccatccacctgcacagccagggcggcagctctgtgcaccccaggaccctgcagaccaatgaggagaacagccgggtgctgccctag

SEQ ID NO: 12698 - DNA, 6120 bp, Artificial Sequence
  derived and/or modified sequence
atgggcgccagcagcccccggagccccgagcccgtgggcccccccgcccctgggctgccattttgctgcggaggctccctgctcgctgtggtagtgctattagccttgcctgtggcgtggggtcagtgcaacgcacccgaatggcttccttttgcgcggcccactaacctcactgatgagtttgagttcccgattggcacgtatctgaattacgaatgtcgcccaggatactcagggaggccgttcagcatcatttgcctgaagaacagcgtctggaccggcgcaaaggaccgttgccggagaaagtcctgtagaaaccctccggaccccgttaacggtatggtgcatgttattaaagggattcagttcgggagtcagattaagtatagctgcaccaagggatatagactgatcggcagctccagcgcaacatgtatcatctcaggcgatacggtgatatgggacaatgagacccctatctgtgacaggattccctgtgggttaccacctaccattgccaacggggatttcattagtaccaatcgagagaacttccactacgggagcgtagttacatataggtgtaaccctggcagcgggggccggaaggtttttgaattggtgggcgagccttcgatttattgtacttctaacgatgaccaggtggggatttggtccggacccgccccacagtgtattatccccaataaatgcaccccgcccaacgttgaaaatggaattctggtttctgataatagaagtctgttttctcttaacgaggtggtggaattcaggtgtcagcccgggttcgtgatgaagggacctcggcgcgtgaaatgtcaggctctgaacaagtgggagccggagcttccaagctgctcacgcgtctgccaaccccccccagatgtgttgcatgccgaacgcactcagcgcgataaagataacttctcccccgggcaagaggtgttctacagctgcgaacccggctacgacctccgaggagccgccagcatgagatgcaccccacagggggattggtccccggccgctcccacttgtgaggtcaagtcatgcgatgacttcatgggccagctgttgaatgggcgcgttctattcccagttaatctgcagctcggcgccaaggttgatttcgtgtgcgatgagggctttcagctcaagggcagtagtgcatcttactgcgtactggcaggcatggaatcactttggaactcttcggtgcctgtctgtgagcagattttctgtccatccccacctgtgatcccgaacggacggcatacaggcaagccactcgaggtgttcccattcggtaagactgtgaactacacctgcgatccacatcccgatagaggaacttcctttgatctgatcggcgaatcaaccatcagatgcactagcgacccgcagggtaacggcgtatggtcaagccctgcacccaggtgcgggattcttgggcactgtcaggcaccggatcactttttgtttgccaaacttaaaacacaaactaacgcttctgattttcctataggaacatccctcaagtatgagtgcagacccgagtattatggaagacctttctcgatcacctgtctcgacaacttggtttggagttctcccaaggatgtctgtaaaaggaagtcttgcaagacaccacctgatcctgtgaatggcatggtgcatgtgatcacagacattcaagttgggagccggatcaattattcatgtaccaccggccacaggctaatcgggcatagctcagcagaatgtatcttaagcgggaatgccgctcactggtcaaccaagccccctatttgtcagcgtatcccctgcggactgccacccaccatcgcaaatggcgacttcatttccactaaccgggagaactttcactatggttctgtggtcacatacagatgtaatcctggatccggtggcaggaaggtcttcgagctcgtgggtgaaccttctatctattgtacgtccaacgatgaccaggtgggaatctggagcggccctgctcctcagtgcataattcccaacaaatgtactccccccaatgtggagaatggaattctcgtctctgacaaccgatccttgttctcactgaacgaggtagtcgaatttaggtgccagcccggctttgtgatgaaggggcccaggagggtcaagtgccaagccttgaataaatgggagcctgaactgccttcttgctcacgagtgtgccagccacccccggacgtacttcacgcggaacgcacacagagagacaaggacaatttctcacccggacaggaagtgttctacagttgtgaacctggctacgacttaaggggggctgcttcgatgaggtgcactccacagggagactggagcccggccgctcccacctgcgaggtgaagagctgtgatgatttcatgggacagctcttaaatggacgtgtgctctttcccgtgaatttacagctgggcgccaaggttgacttcgtgtgtgacgaaggattccagttaaaggggagctctgcatcctactgtgtccttgccggcatggaaagtctttggaattcatcagtccctgtctgtgagcaaatcttttgcccgagcccaccagtgattccgaacgggagacacaccggcaagccacttgaagtgtttccttttggtaaggcagtgaattacacctgcgacccacaccctgatcgaggcacatcatttgacctgatcggcgagagtacaattagatgtacaagtgatcctcaggggaatggagtgtggtcaagccccgccccgcgctgcggaattctgggccattgtcaagccccagaccactttctcttcgccaagttaaagactcagacaaacgcgtctgacttccccattggaacaagcctgaagtacgaatgccggcccgagtactatggccgaccttttagtatcacctgcctggataaccttgtgtggtcatccccaaaggatgtgtgtaagcggaagtcctgtaaaacacccccggaccctgttaacggtatggtccacgtcatcacagacattcaggtcggctctaggattaactattcatgcaccactggacataggctgattggtcactcttccgctgaatgcattctaagcgggaataccgcacattggagcaccaagccccccatctgccagcgcataccatgcggcttgccccctacaatcgctaatggagatttcatttcgacaaatagggaaaattttcattatgggagtgtggttacatatcgatgcaatctgggcagccggggacggaaggttttcgagctggttggcgagcccagcatatactgcaccagtaatgacgaccaagtgggcatatggtctggacccgcgccacagtgtatcattcctaataagtgtacacccccaaatgtggaaaatgggatacttgtctcagataaccgttccttgttctccctaaatgaagtcgtggagttccgttgtcaaccgggcttcgtgatgaagggtcctaggagagtgaaatgccaggctcttaacaagtgggagcccgagttacctagctgcagtcgggtctgtcagccccctccagaaattctgcacggtgaacatactccaagtcatcaggacaacttcagccctggacaggaagtattctatagctgcgaaccagggtacgatctcagaggagccgccagccttcattgcacacctcagggagactggtcccctgaggctccgaggtgcgccgtgaagagttgcgacgactttctaggccagctgccacacggcagggtgctcttcccgctaaacctgcagctcggcgctaaagtttcttttgtctgcgatgaggggtttcgcctgaagggttcctccgtcagccactgtgttctggtgggcatgagatccctttggaacaacagcgtgccggtgtgcgaacacattttttgcccaaaccccccggctattcttaacgggagacatacagggaccccctccggggatattccctatggcaaagagatctcgtacacctgtgatccccatcccgaccgtggaatgacgtttaatcttatcggcgagtccactatcagatgcaccagcgatccacacggaaacggcgtttggtcctcccctgctcctagatgcgagttgagcgttagggcaggacactgtaagacacccgaacagtttccgttcgcttcccctacgatccctattaacgattttgagttccctgttgggacatctttgaactacgagtgtagacctggctacttcggcaaaatgttttccattagttgcctagagaaccttgtctggtcaagcgtagaagataattgtcggcgcaagagctgtggccctcctcccgagcccttcaacggaatggtccatatcaacacagatacccaatttggatctacagtaaattactcttgtaacgagggctttaggttaatcgggagcccatctaccacctgcctggtcagtgggaacaacgtcacctgggataaaaaggcaccaatctgcgaaataatcagttgcgaaccccctccgactataagtaatggtgacttttactctaacaacagaacctcttttcacaacggaacagtggttacctatcagtgccacactggtcccgatggagaacaactgttcgaactagtgggggagagatccatctattgcacttcaaaggacgaccaggtcggggtgtggtcctctccaccaccacgttgcataagtaccaataaatgcaccgcccctgaagtggaaaacgccattagggtgcccgggaatagaagctttttcacattgacagagataattagattcagatgtcagccgggttttgtgatggttgggtcgcatactgtccagtgccaaaccaacgggaggtggggtccaaagttaccacactgtagccgcgtgtgccagcccccacccgagattctgcacggagagcacactctttcccaccaagataacttctcccctggccaagaggtcttttatagttgcgaaccttcttacgatctgcgaggcgccgcaagcctgcattgcacccctcagggcgattggtctcccgaggccccaagatgtacggtcaagtcttgtgacgatttcctagggcaactcccgcacgggagagttctgctgcctctgaacttgcagctcggagctaaggtttctttcgtgtgcgatgaaggatttcgactcaaagggagatcagcgtcccactgcgtgctcgctgggatgaaggctctttggaatagcagcgtgcctgtgtgtgagcagattttctgccccaatccccccgcgatcctcaacggaagacatacaggcactccctttggtgatataccctacggcaaagaaattagctatgcctgtgatacccatcctgacagaggcatgacttttaacctgatcggcgagagcagcattcgctgcactagtgacccgcaggggaacggcgtttggtcttcacccgctccacgttgtgagctgtccgtgcccgccgcttgcccacacccgccaaagattcagaacggccactatatcgggggacacgtgtctctctaccttcccggcatgacaatttcttatatctgcgaccctggatacctgctcgtgggcaaaggctttatcttttgcactgatcagggcatttggtctcagctcgatcattactgcaaggaagttaattgctctttcccactcttcatgaacggcattagtaaggagctcgaaatgaagaaagtataccattacggcgactacgtaacccttaagtgtgaggacgggtatacattagaaggttccccgtggtcacaatgccaagctgacgacagatgggatcctccactcgccaagtgcacttcacgcactcacgacgctctgatcgttggtacactgtccggaacgatcttttttatactgcttattattttcctgtcctggattattttgaaacacagaaagggcaacaacgctcacgagaaccccaaagaggtcgctatacacctgcactctcagggcggctcgtccgtgcacccaaggacccttcagaccaatgaagagaactctcgagtcttgccttag

SEQ ID NO: 12699 - DNA, 6120 bp, Artificial Sequence
  derived and/or modified sequence
atgggcgccagcagcccccggagccccgagcccgtgggcccccccgccccaggcttacccttttgttgcggaggaagtttactggccgtagtggtcttactcgcactccccgttgcctgggggcaatgtaacgcgcccgagtggctcccgttcgctaggcccacaaatctcaccgatgagttcgaattccctattggcacatacctgaattacgagtgcaggcccggatatagtggccgcccattttcaatcatatgcctgaagaatagcgtgtggactggagccaaagatcgatgtaggaggaaaagctgtcgcaatccacccgaccctgttaacgggatggtgcatgtgataaagggtattcagttcggtagccagattaaatattcctgtaccaagggctacaggctcattggaagctcatccgctacctgcattatctcaggcgacaccgtgatctgggacaatgagaccccaatttgcgaccgaatcccctgcggattgccccccaccattaccaatggggactttatctcgacaaatcgcgagaacttccattatggaagtgtggtcacctacaggtgcaatcctggctcaggggggcgaaaggttttcgaacttgtgggggagcccagcatctactgcaccagtaatgatgaccaggtgggaatctggagtggtccggcgcctcaatgtataataccgaacaaatgcacaccccctaatgtggaaaatggtatactcgtgtccgataaccgctctctattttccctcaacgaagtggtcgaattccgatgtcagcccgggtttgtcatgaaaggcccacgccgcgttaaatgtcaggccctgaacaagtgggaacccgagttgccttcctgtagtagggtttgccagccccctccagacgtgcttcatgcggagcgcacacagagggataaggataacttttcccccggacaagaggttttctattcatgcgagccaggctatgatctgaggggggcggcttcaatgcggtgcactccccaaggtgattggagtccagcagcaccaacgtgcgaggttaagtcctgcgatgattttatgggacaactgctgaatggaagagtgctgtttcccgtgaacctgcaattaggggctaaggttgacttcgtctgcgacgagggctttcaactgaaagggagcagtgcgtcctattgtgtgctggcggggatggagagcctttggaattcgtcagttcctgtctgcgagcaaatcttctgccccagtcccccagtgatacccaatggacggcacaccggaaaacccttggaggtgttcccatttggcaagaccgtgaattacacgtgcgatccccaccccgatcgaggcacctccttcgacctgatcggcgagtccaccattcggtgcacttcagatccccagggaaatggcgtgtggtcgtcgccagccccgcgctgcggaattctaggacactgccaggcacctgatcatttcttgttcgctaagctcaagacccagaccaacgcgtccgacttccccatcggcacctccctaaagtatgagtgtagaccagaatattacggccggccatttagtattacatgcctggataatctggtgtggtcctcccccaaagacgtatgtaaacggaagtcttgcaaaacaccacccgaccctgttaatggcatggtccacgtgattacagacattcaggtgggctctcggataaattattcctgcaccacgggacaccgcttgatagggcatagctccgccgaatgcattctctcagggaacgctgcccactggtctactaagcctccaatttgccagaggataccatgtggactaccccccactatagccaacggagattttatctccaccaacagagaaaactttcattatggctcagtagtgacttatcggtgcaaccccgggagcggcgggcgcaaagtgtttgaactcgtcggcgagccctccatctattgcacatcaaacgacgaccaggtgggcatctggtcaggtcctgctcctcagtgtattattcctaacaagtgcacaccccccaacgttgagaatgggattctcgtgtccgataaccggagcctattttcgcttaacgaggtcgtcgagtttcgatgtcagccaggcttcgtgatgaagggaccacgtcgggtcaaatgccaggccctgaacaaatgggaacccgaattgcctagttgcagcagggtgtgccagccaccacccgatgtcttgcacgccgaacgcactcagagggataaggacaactttagcccggggcaggaagtcttctactcatgcgagcccggttacgatctgaggggggctgcttctatgaggtgcacaccccagggtgactggtcacccgccgcccccacatgtgaggtcaagtcctgtgacgacttcatggggcagcttctcaatggaagagtgttattcccggtgaatctccagttaggagccaaggttgactttgtgtgcgatgaaggctttcagctaaaaggctcctcggcatcgtactgcgtgttggccggtatggagtcactctggaactctagtgtacccgtttgtgagcagattttctgccccagcccccctgtcattcccaatggacgacatacaggcaagcccctggaagtctttccatttggtaaaactgtgaattacacctgcgacccccacccggaccggggaacatccttcgacctgatcggtgaatccaccatcagatgtactagtgacccacagggcaatggggtgtggtcctccccagctcctcgttgcggaatcctcggccattgtcaggctccggaccacttcttgttcgccaaattgaaaacacagactaatgcttccgatttccccattggcacttccttaaagtatgagtgtaggcccgaatactatgggcgtcctttttcaattacctgcctggataaccttgtgtggtcttcacccaaggatgtatgtaagcgcaagtcctgtaagactcctcccgatcccgttaatggaatggtccacgtaatcaccgatatccaagtcggatctcgcataaactactcctgcactaccgggcaccgattaatcggacacagctctgcagagtgtatcctttctggaaacaccgcacattggtctaccaagcctcccatttgtcaacggatcccgtgtggcctgccacctactatcgcgaatggagactttattagcacaaacagagagaattttcattatggctcagtagtgacgtacaggtgcaacctcgggagtagaggacggaaggtctttgaactggtgggcgagccgtccatctactgcactagtaatgacgaccaagtgggcatatggagcggacccgcacctcagtgcattatccccaacaaatgcacgcctccaaacgtggaaaatggcatcctggtatcagacaaccgctctctcttctctctgaacgaggtggtggaattcaggtgccaaccggggtttgtgatgaaaggtccgcgccgtgtgaagtgccaggccctcaacaaatgggagccggaactcccctcctgttcccgtgtgtgtcaacctcccccggagatcctccacggcgaacacacaccatcccaccaagataacttttcccccgggcaagaagtgttttattcctgtgagcccggttatgatttgaggggggctgcttccctccactgtactcctcagggggactggtcccctgaggcaccacgatgcgctgtaaagtcatgcgatgatttcctcggtcagctgccccatggacgagtccttttcccattgaatctgcagttaggagccaaggtatcatttgtttgcgacgagggcttccgcctgaaagggagcagcgtctcccactgtgttctcgtggggatgagatcactatggaataactctgttccagtctgcgaacatatcttttgccctaatccaccagcaatcctgaacggacgccacacagggaccccgagcggggacatcccatacggtaaggagatcagctacacgtgcgacccacaccctgaccgcggaatgactttcaacctgatcggcgagtctaccatcaggtgtacatccgatcctcacgggaacggggtgtggtcttccccagcaccacgctgcgagctctctgtcagggccgggcattgcaagaccccagaacagttcccgttcgccagccccacgatccctattaacgacttcgagttcccagtcggaacaagtctgaattatgagtgccgtcctggttactttggtaaaatgttcagtatcagctgtcttgagaacctggtgtggagctcagtggaagataattgccgcagaaaatcctgcgggcccccaccagagccatttaacggcatggttcacataaacacagacacacaatttggaagtactgttaattattcttgtaacgaggggttccgtttgattgggagcccgagcaccacctgtcttgtctcaggaaacaatgtaacttgggataagaaagccccaatttgcgagataatctcttgcgagccaccccccacaatctctaatggagacttctactcgaacaatagaaccagcttccataatgggaccgttgtaacctatcaatgtcacacaggccctgacggagaacagttgttcgagctcgtgggagagcggtctatttactgcacatccaaggatgatcaggttggggtgtggtcatcaccaccccctagatgcatatctaccaacaagtgtactgcccccgaagttgagaatgcaattcgggtccccggaaaccgatccttcttcaccctcaccgaaatcattcggttccgctgtcaacccggttttgttatggtcggaagccacactgtgcagtgccaaacgaatggccgctggggcccaaagctgccacactgctcccgggtgtgccagccaccacctgagattctccatggcgaacatacccttagccatcaggacaatttctctccagggcaggaggtgttctactcttgcgagccttcttacgacctgcgtggcgccgctagcctgcattgtactccccagggcgattggagccccgaagccccacgctgtaccgtaaaatcctgcgacgactttcttggccagctgccccacggaagggtgttactgcccctgaacctacagttaggcgccaaggtgagcttcgtttgtgacgaggggtttaggctgaaaggtcgttctgccagtcattgcgtattggctgggatgaaggccctgtggaattcttctgtgcctgtgtgcgagcagatcttttgccctaatccacccgccatactcaacggacggcacaccggtactccttttggagacataccttatggaaaagaaataagctacgcatgcgatacacaccccgatagaggaatgacttttaatctgataggtgaatcctcaattcgctgtaccagtgatccacagggtaatggagtatggagttctcctgcaccacgctgtgaactctcagtgccagcggcttgccctcatcctccaaagatacagaatgggcactacattggaggccacgtaagtctgtacctgcccggcatgacaatatcctatatctgcgacccaggctatctcctcgtgggaaaaggcttcatcttttgcacagaccaagggatctggagccagctggaccactattgcaaggaggttaattgcagcttcccactatttatgaatggtatcagcaaagagctcgagatgaagaaggtctaccactacggcgattatgtgacacttaagtgtgaagacggctatactttggagggttccccgtggagtcagtgtcaggccgatgaccgttgggacccgccactagccaagtgcacaagccgaacacacgacgcactaatcgtgggcacgctgtcaggcaccatcttcttcatcttgctgattatttttctgagctggatcattctcaagcatagaaagggcaataacgcccacgagaatccaaaagaagtcgccatccacttgcacagccagggtggctcatctgtccacccaaggacccttcagaccaatgaggagaacagtcgcgtgttaccctag

SEQ ID NO: 12700 - DNA, 6120 bp, Artificial Sequence
  derived and/or modified sequence
atgggcgccagcagcccccggagccccgagcccgtgggcccccccgcccctggcctgcctttctgttgcggggggtcactgctagcagttgtcgtgttacttgcgttgcctgtggcttggggacagtgtaacgcacctgagtggttgccctttgctcgtcccaccaatctcacagacgagttcgaattcccaattgggacctacttaaattatgaatgccgccccggttacagtggccgccctttcagtatcatatgcttaaagaatagcgtgtggacgggcgcaaaggacagatgcagacgaaagtcctgccgcaaccctccagatcctgtgaacggcatggtccacgtgattaaaggcatccagttcggaagccagattaagtacagctgcacaaaaggctaccgtctgatcggctcttcatcagcgacctgcataatttccggagataccgtcatctgggacaacgagacccccatatgcgaccgtattccgtgtgggttaccgcctaccatcactaatggcgactttattagcacgaacagggagaattttcactatggttccgtggttacatacagatgtaaccccggttccggagggagaaaagtgttcgagcttgtgggtgaaccaagcatttattgtaccagcaacgatgaccaggtgggcatttggtcaggacctgctccccaatgcatcatcccaaataagtgcacacccccaaacgttgaaaatggcatcctagtgtctgacaaccggtcactgttctcattgaacgaagtggtggaattccgctgtcaaccaggtttcgtcatgaagggacctcggagagtgaagtgtcaagcactgaacaaatgggaaccagagcttccgagctgctcgcgcgtctgtcaaccacccccagacgtactccacgcagagcgtacgcagcgcgacaaggacaactttagtcctgggcaggaagtcttttattcctgcgaaccaggttatgatcttcggggcgctgctagcatgcggtgtacaccgcagggagattggtcaccagccgctccaacatgtgaggtaaagtcttgtgacgattttatgggacagctcctgaacggcagagtcttgttcccagtgaacttgcagctgggcgctaaggtggactttgtgtgtgacgaagggttccagctgaagggcagctcagcttcctattgtgtcctggcaggtatggaatccctctggaatagctcagtccccgtctgcgagcagatcttctgcccctccccacccgtaatccccaatggacgtcatactggtaaacccctggaggtgtttcctttcggaaagacagtgaattacacgtgcgatccccatcccgacaggggcacttcctttgatttgataggggagtctactatccggtgcacctccgatccgcagggcaacggcgtatggagcagcccagcacccaggtgtggcatcctggggcactgccaggcccccgaccattttctgttcgccaagcttaagactcaaaccaatgccagcgacttccctatcggcacgagcctcaagtatgagtgcagacccgagtactacggaagaccctttagcattacctgtctagacaacctcgtatggagttcaccaaaggacgtgtgcaagaggaagtcctgcaagactccacctgatcccgtgaacggcatggtccacgtgataacagatatccaggttggatctcggatcaactatagttgcacaaccggacaccgcctcatcggacattctagcgcagaatgtatcttatctgggaatgccgctcactggagcaccaaacctccaatctgccagaggatcccctgtgggctcccgcccaccattgccaacggcgactttatttcgacaaaccgcgaaaattttcactacggcagcgtggtaacctatcgctgcaaccccggaagtggaggtcgaaaagttttcgaactggtgggagagccgagcatctattgcaccagtaatgatgatcaggtcggcatttggtcagggcctgcgcctcagtgcattatccccaacaagtgcaccccccctaatgttgagaatggcattctcgtaagcgacaatagatcgttgttctcactaaacgaagtagttgagttcaggtgccagccgggtttcgttatgaaggggcctaggcgggttaagtgtcaggctttaaacaagtgggaaccggagctcccttcatgctcccgggtctgtcagccaccaccagatgtacttcatgcagagagaacgcagagggataaagacaatttttcacctggccaagaggtgttctacagttgcgaaccgggctacgaccttaggggcgcggctagcatgcgatgcacgccccaaggtgattggagccccgccgcccctacttgcgaagtgaagtcgtgtgatgattttatggggcagctgctgaacggccgggtgctctttccagtgaaccttcaattgggggccaaggtggatttcgtgtgcgatgaagggttccaactcaaaggcagcagtgcttcttactgcgtgctcgcgggaatggagtcactttggaattcaagtgtgcccgtgtgcgaacagatcttttgcccctcaccccccgtgataccaaacggccggcacactggaaagccactggaagtgtttccattcgggaaggctgtaaattatacatgcgacccccacccagacagaggaacatcattcgatttgatcggagagtcaactattaggtgtacctcagatccacagggcaatggcgtgtggtcgagccctgcacctcggtgtggaatcctgggacactgtcaggctcctgaccactttcttttcgccaagctcaagacccagactaatgccagtgatttcccgattggtaccagcctgaagtatgagtgtcggcctgaatactacggtaggcctttcagcatcacttgtcttgataacctggtgtggagtagtccgaaggatgtttgcaaaaggaaatcgtgtaaaacccctccagaccccgtgaatggcatggtgcacgtgattactgatattcaagtggggagtcggatcaattattcttgcaccacagggcacagattaattggccactcttccgccgagtgcatcctctcgggtaatactgctcactggtctactaagcctcctatatgtcagcgcattccatgcggcttgccaccaacgatcgcgaatggtgattttatttctacaaatcgggagaactttcactacggaagcgtggtcacatataggtgtaaccttggatcaagaggcaggaaggtgttcgaactggttggagagccctcaatatactgcacctctaatgatgaccaagtgggtatctggagcgggcctgccccgcagtgcatcatccctaacaagtgcactccgcctaacgtggaaaacggcatactggtatccgataatcgtagtcttttctcactaaacgaggtcgtcgaatttcgttgccagccggggtttgttatgaagggccctcggcgggtcaaatgtcaggcactcaacaagtgggaacctgagctcccttcttgtagccgggtctgtcagccacctccggaaatccttcacggggagcacaccccgagtcaccaggataacttctcacccggacaggaagtattttactcgtgcgaacccggatacgatctgaggggtgctgccagtctgcattgtactccccagggcgactggagcccagaagcacctagatgtgcggtgaagtcttgcgacgacttcttaggacaattaccccatggccgcgtgctgttcccactaaacctacagctgggggccaaggtttcctttgtctgcgatgaagggttcagactcaagggctcctcagttagccattgcgttctagtcggaatgagatcactgtggaataacagcgtgccagtgtgtgagcacattttctgtcccaacccccctgctatcttaaatggacgtcacacgggaacaccatctggagatatcccctatggtaaggagatttcttacacgtgtgacccacaccctgaccggggaatgacgtttaacctgatcggagagtcaacgataagatgtaccagcgatccccatggaaacggcgtgtggagcagccctgctccccgttgtgaactgagcgtccgggctggacactgtaaaacccctgaacagtttccatttgcgtcacctactattcctattaacgattttgaattccccgttggcacgagtcttaattacgagtgtcgacctggttattttgggaaaatgttttcaattagctgcctggaaaacctggtttggtcatctgtggaagacaattgtcggagaaagtcctgtggccctccacctgagcccttcaacgggatggtgcatattaacaccgacacacagttcggctccactgtcaactattcttgcaatgagggcttccgtttaattggcagtccatctacaacatgtctggtgtctgggaacaacgttacctgggacaaaaaagctcctatttgcgagatcattagctgtgagccccctccaacaattagcaatggagacttttatagcaacaaccggaccagcttccacaacggaacggtggtcacctaccagtgtcacacgggacctgatggcgagcagctcttcgaattggtgggcgaaagatcaatctactgtacttctaaagacgatcaggtaggagtgtggtcatccccaccgccccgatgcatttctacaaacaagtgtactgctcctgaggttgagaacgctatccgggtgcccggcaacagatcattttttacgctaactgagatcattcgtttccgttgtcagcccggctttgtcatggttggctcccacaccgtgcagtgtcaaaccaatggaagatggggacccaagctgccacactgctccagggtttgccagcctccacccgaaattctccacggtgagcacacactgtcccatcaagataacttttcccccggccaagaagtattttacagttgtgaaccgtcctacgacctaaggggcgccgcctcgctgcactgcaccccacagggcgattggtcaccagaggcgcccaggtgcaccgtgaaaagctgtgacgactttctgggccaacttcctcacggcagagttttgctgccactgaaccttcagctgggcgctaaagttagttttgtgtgcgatgaagggtttcggctaaagggacggtccgcctcacactgcgtgctcgctgggatgaaggcactgtggaactcttccgtacctgtgtgcgagcaaattttttgtcctaaccccccagctatattgaatggccgtcacactgggacaccctttggcgacattccctacgggaaggagatatcctacgcgtgtgatacacaccctgatcgcggcatgacttttaacttaattggcgagtccagtatccgatgcacatcggaccctcagggcaatggagtttggtctagtccggccccccgctgtgagctcagcgtccctgctgcctgcccccatcctcctaaaattcagaatggtcattacataggcggccacgtgtctctgtatttgcctggaatgactatatcttacatttgcgaccccggttacttgctggtggggaagggatttatattctgcacagatcaggggatctggtctcaattggaccattattgtaaggaagtgaactgttcattccccctgttcatgaacggaatcagcaaagaactagagatgaaaaaagtgtaccattacggcgactatgtcacactaaaatgtgaggatgggtacactctcgaagggtcaccatggagtcagtgccaggctgatgaccgctgggatccccctctggctaaatgcacaagtcggacacacgatgctctgattgtgggaaccttgtccggtaccatcttctttattctacttataatctttttaagctggataatcttgaagcacaggaaggggaacaatgctcatgagaatcccaaagaggtggcaatccacctgcactcccagggtggcagctctgtccaccctcgcacactgcagaccaacgaggaaaacagccgggtgctgccatag

SEQ ID NO: 12701 - DNA, 6120 bp, Artificial Sequence
  derived and/or modified sequence
atgggcgccagcagcccccggagccccgagcccgtgggcccccccgccccaggactccccttttgctgcggcggatcactgctggccgtggtggtactgctggcccttcctgtggcatggggtcagtgcaatgcgccagaatggctcccatttgcacggccaacaaacttaactgacgagttcgaatttccaattggcacctatctgaactacgaatgtcgaccgggttacagcggcaggccgttcagtatcatttgtctgaagaactccgtctggactggcgccaaagaccggtgtcggcggaaatcctgcaggaatccccccgacccagtcaatgggatggtgcatgtcatcaagggcatacaattcggaagtcagatcaaatattcatgtaccaagggctaccggctaatcgggtcttcaagcgccacctgcattatttctggggacaccgtgatttgggacaacgagactccaatctgtgatagaataccatgcggcttgccacccaccattaccaatggggactttatatcaaccaatcgtgaaaatttccactacggttccgtggtcacttacaggtgcaacccaggatctggcggcaggaaagtctttgagcttgttggtgagcctagtatttactgcacatcgaacgacgaccaagtcggcatatggagtggtcctgcgcctcagtgcatcattccaaataaatgtacaccgcccaatgtggaaaacggaattctcgtttccgacaaccggagtttgttctcgctcaatgaggtggtggaattccgctgccaaccagggtttgtcatgaaaggaccccgtagagttaaatgccaggccctgaacaaatgggaaccagaactgcccagctgcagccgggtatgtcaacctcctccagatgtcctgcacgcggagcggactcagcgggacaaggataactttagccctgggcaggaggttttctattcttgcgagcccgggtacgatctcaggggggcggcctctatgagatgcaccccacagggggactggtcaccagctgcccccacttgtgaagttaaatcttgtgatgacttcatgggtcagctgctgaacggcagggtgttgttccccgttaatctgcagctgggcgctaaggtcgactttgtatgcgatgagggatttcagctgaaagggtcaagtgcctcttactgcgtcctggctggaatggagagtctttggaatagttccgtgcccgtctgcgagcagatcttttgtcccagcccacctgtaatcccaaatggcagacacactgggaaaccactggaggttttccccttcggtaaaacagtgaattacacttgcgatcctcaccctgaccgcgggacttctttcgacctaatcggagaaagcaccattcgctgtacctccgacccccaggggaacggcgtgtggtctagtcccgccccgcgatgtggtatcctgggacactgccaggcaccggatcacttcctgttcgctaaactcaaaactcagacaaacgcaagtgacttcccaattgggacctcacttaagtatgagtgtagacccgagtattatggcaggccattttcaataacctgcttggataacctcgtgtggtcctcacccaaggatgtgtgtaaaaggaaatcttgtaagaccccgcctgatccagtcaacggaatggtccacgtgattaccgatatccaagtgggcagtagaatcaactacagctgcaccacaggacaccggcttattggccattcgagcgctgaatgcattctcagtggcaacgctgctcactggagcaccaagcctccaatctgccagagaataccctgtggtctcccccctaccatcgccaacggagactttatatccacaaacagggaaaattttcattatggcagcgtggtgacttaccgctgtaaccctggcagcggaggacggaaggtcttcgagctggtgggggaaccttccatttactgtacctcaaatgacgaccaggtgggcatctggagcgggccggctccccagtgcatcatcccgaataagtgtaccccccccaatgtggagaacgggattctggtcagcgacaaccgaagtctgttctctcttaacgaggtggtggagtttcgctgtcagccaggtttcgtgatgaaagggccccggcgagtgaagtgccaggctctgaataaatgggagcctgagttgccatcatgttctagagtttgtcaacccccacctgacgtgctccatgccgagaggacccaacgggacaaggacaacttttcgcctggccaagaagtgttttattcttgtgagcctggatatgatctccgtggagccgctagcatgaggtgtaccccacagggcgactggtctccagctgccccaacttgtgaggtgaaatcatgcgacgattttatggggcagcttctcaacggccgggttctgttccctgtgaaccttcaactgggtgcaaaagtggactttgtgtgcgatgagggatttcagctgaaaggatcttctgcctcttactgcgttctggccggcatggagtctctgtggaatagctccgtgccagtatgcgagcagatcttttgcccaagcccacctgtcataccaaatgggagacacaccggaaagcctctcgaggtatttccttttggcaaagcggtcaattacacttgcgacccccacccggatcgggggacctcctttgacctaattggtgagagtaccattagatgcactagcgatccccagggaaacggggtgtggtccagccctgcccctaggtgcggcatcctcggtcactgtcaggcccctgatcattttctatttgctaagctcaagacacagactaatgcaagtgattttccaataggaacctccttgaaatatgagtgcagacctgagtactatggcagaccctttagtattacctgtcttgacaacctagtgtggtcttcgccaaaagatgtgtgcaaaaggaagtcctgcaagacccccccagaccctgtaaatggaatggtgcatgtgataaccgacattcaggttggatcacgcattaactacagttgcactaccgggcacagactgataggacacagctccgctgagtgcatactcagcggtaacaccgcccactggagcactaaaccccctatctgtcagaggattccatgcgggctcccccccacgatcgctaatggcgacttcatttctactaatagggagaacttccactatggatctgtagtcacatatcgttgtaacttaggcagccgagggcgcaaagtcttcgagctggtgggggagccgtcaatctactgtacctcaaacgacgatcaggtgggcatctggtctgggccagcaccgcagtgcatcatacccaataagtgcactccgcctaacgtcgagaatggcatactggtctctgataatagatcgctgttctccctgaacgaagttgtcgagtttaggtgccagccagggttcgtgatgaaggggcctaggcgggttaaatgtcaggcgctcaacaaatgggagcccgaacttccttcctgttctcgcgtttgtcaaccccctccggagatactacacggagagcatacgccctcacaccaggataacttctctcctggacaggaagtattctacagctgtgaacctggctatgatctccgtggcgccgcctcacttcactgcactccccaaggcgattggtcacccgaggccccacggtgcgcagttaaatcatgcgacgactttctgggacagcttccacacgggagagttctcttccctctgaatctccaacttggggcgaaagttagcttcgtgtgtgatgaggggttcaggttgaagggttcttccgtgtctcattgcgttctcgtcggtatgcgaagtctgtggaacaactccgtgcccgtctgtgaacacatattctgtccaaatccccctgctatattgaatgggaggcatactggaacaccctctggtgatatcccatatgggaaagagatctcttacacctgtgacccccatcccgacagggggatgactttcaaccttatcggggagagcaccatccgctgcacttctgacccacacggtaacggagtttggagtagtcctgctccccgctgtgagctgtctgtaagagccggccattgtaagactcccgagcagttcccatttgctagccctactatccctatcaatgactttgaatttcccgttgggactagtctcaactacgaatgtaggccggggtacttcggtaaaatgttcagtatcagctgcctggagaacctggtctggtccagcgtcgaggataactgtaggagaaaaagctgtggaccaccccccgagcccttcaatgggatggttcacatcaatactgacacccagttcggctctacagtcaactactcttgtaacgagggatttcgcctgattgggagtccctccaccacctgtctggtgtcaggaaacaatgtaacttgggacaagaaagcgccaatatgtgagatcatttcctgcgagccacctccaaccatttcaaacggtgatttttatagcaacaataggacaagcttccacaatggaaccgtggtgacctaccagtgtcataccgggccagatggagaacagctttttgaactcgtgggtgaacgctcaatctattgcaccagcaaagacgatcaggttggagtgtggagctcccctcctccccgctgcatctcgacaaataagtgtaccgcacccgaggtcgaaaacgcaatccgagtgcccgggaacaggtcctttttcacgctgactgaaataattcgcttccgttgccagccaggtttcgtcatggtggggagtcacacagtccagtgtcagactaacgggaggtgggggccaaaactgcctcactgtagtcgcgtatgtcagccacccccagaaatccttcacggagagcacactctcagtcaccaggataactttagtcccgggcaggaagtattctacagttgtgaaccctcctacgacctaaggggagctgcaagcctgcactgtactccccagggcgattggtctccggaagcccccaggtgtaccgtcaagagctgcgacgacttcctcgggcaactgccccatggccgagttctcttgccccttaatttgcaactgggagccaaagtgagctttgtgtgcgatgaaggatttcgcctgaaagggcgatcagcctctcactgtgtactagctggcatgaaagcactctggaattccagcgtgccagtgtgtgagcagatcttttgtcccaaccctcctgcaatactaaatggacgccacacgggcactcctttcggggatatcccctacggcaaggaaatctcttacgcttgtgacactcatcccgacagaggcatgacttttaacctgatcggagagtcaagcatccgctgtacctctgaccctcaggggaatggggtatggtcatcccctgccccccggtgcgagttatccgttccagctgcatgcccacaccctccaaaaattcagaacggtcattatattgggggccatgtatctctgtacctgccggggatgaccatttcctacatatgtgaccccggctatctgctcgtgggaaaaggtttcattttttgtactgatcaaggtatttggagtcagctggatcattactgtaaagaggtaaactgtagcttcccgctcttcatgaatgggatttccaaagagctcgagatgaagaaagtttaccactatggagattacgtcactttaaaatgcgaggacggctacacgcttgaaggttctccttggtctcagtgtcaggccgatgacaggtgggacccacccttggccaagtgcaccagtaggacccacgacgcactcatcgtgggcacattaagcggaactatttttttcatactgctgattatcttcttgtcctggatcatcctgaaacaccgtaaggggaataatgctcacgaaaaccctaaggaagtggcaattcacctacactctcaaggtgggtcctctgtgcatcccagaacgttgcagacaaatgaggagaatagtcgcgtgcttccttag

SEQ ID NO: 12702 - DNA, 6119 bp, Artificial Sequence
  derived and/or modified sequence
atgggagcctcgtcccccagaagtcctgagcccgtgggcccacccgcacctggactcccattttgctgcgggggttctctgcttgctgtggtggtgttactggcactgcccgtggcctggggccagtgtaatgctccagaatggctaccttttgccaggcctaccaacctcacagatgagttcgagttccctataggaacttacctgaactacgaatgccgtcccggatattcaggacgccctttcagtataatttgtctaaagaactcagtatggaccggggctaaggatcggtgtcgcagaaagtcctgcaggaatccccctgatccggtgaatggcatggtgcatgtcattaaggggatccaattcggctctcaaatcaaatatagctgtacgaagggctaccgccttatcggtagctcatccgcgacttgtattatttccggggacacggtcatctgggacaatgaaaccccaatatgcgatagaattccctgtggccttccgcctacgatcgctaacggagactttatatcaactaatcgcgagaatttccactacgggtctgtcgtcacataccggtgtaatccaggatctggcggacgcaaggtcttcgagctcgtgggtgagccctccatatactgcacatctaatgatgaccaggttggcatctggagcggtcccgcaccgcagtgcattattcccaacaaatgcacacccccaaacgtggagaatggtatacttgtgtccgataaccgtagcctgttttccctgaacgaagttgtagagttccgctgtcagcccggtttcgtgatgaagggtcctcgacgggtcaagtgccaggccctgaataagtgggaacctgaactcccctcctgcagtagagtctgccagccccctcccgacgtattgcatgctgagagaacccaacgcgataaggacaacttttctcccggacaagaggtgttttactcgtgtgagcctgggtacgacctccgcggagctgcatcgatgcgatgcaccccccagggggactggtctcccgcagctcccacttgtgaagtgaagagctgtgacgatttcatggggcagctgttaaatggaagggtgctgtttcctgtaaacctgcaactgggagctaaagtagatttcgtgtgcgacgaggggtttcagctcaagggcagcagcgcttcttactgtgttctggcagggatggaaagtttatggaactcaagtgtgccagtctgtgagcaaatcttctgcccgagtccccctgtgatccctaacggaagacacaccggcaagccactggaggtttttccttttgggaagacagtaaattacacatgcgacccacacccagatcgtgggacttcttttgaccttatcggggaatctactatcaggtgtacaagcgacccacagggtaatggcgtatggagtagccccgctcctcggtgtgggattctggggcactgccaggcgcctgatcacttcctgttcgccaagcttaagacacagactaacgccagtgactttccaatcggaacctcactaaagtatgagtgcaggccggagtactacggcagaccatttagcatcacatgtttagacaatctcgtgtggtcatccccaaaagatgtttgtaagaggaagagttgcaagacacccccagaccccgtgaatggaatggtgcacgtgatcaccgatatacaggtgggaagcagaataaattactcttgtacaaccgggcacaggctcattgggcacagctctgcagagtgcatcctaagcggaaacgcagcacactggagtaccaagcctcccatttgtcagcgaataccctgtggacttccacccaccattgccaatggcgatttcatttcaacaaaccgggaaaatttccactacggctccgtggtgacctatcgctgcaacccaggatcagggggaagaaaagtgttcgaactggtcggtgaaccctctatttattgcacctctaatgacgaccaggtgggaatttggtccggccctgccccacagtgtattattcccaataaatgtacaccgccaaatgtggagaacggaattctagtgtctgataacaggagtctgttctccctgaacgaagtcgtggagtttcggtgccagcctggcttcgtgatgaaaggccctcggagggtgaagtgccaagcactaaacaaatgggagcccgagctaccctcatgctctcgcgtctgccagccaccccctgatgttcttcatgctgaaagaacccagcgtgacaaggataacttctcacccggacaggaagtattctattcttgcgagcctggctatgatctacgcggtgccgcttcaatgcgctgtaccccgcagggagattggtcccctgccgcaccaacgtgtgaggtgaagtcctgcgatgattttatgggccaactgctcaacggacgcgtactgttcccggtaaacctgcaactgggggctaaagtcgactttgtttgcgatgaagggtttcagttgaagggctcgagtgcctcttattgtgtcctggctggaatggaaagtttatggaacagtagcgttccggtctgcgagcagatcttctgtccatctccacctgttataccaaatggtcgacacaccggcaaaccattggaggtgttcccatttggaaaagccgtgaactatacctgtgacccccacccagatcgcggaacctcgtttgatctcatcggggaaagtaccatccgctgtacttcagatccacagggtaacggggtgtggtcttcccctgcacccaggtgcgggattctagggcactgccaggccccagatcacttcctgtttgccaagttgaagacgcaaactaacgcatctgacttccctatcggaacatcccttaaatatgagtgtcggccagagtactacgggagacccttttctataacctgcctcgataatctcgtctggagcagcccaaaagacgtgtgtaagaggaagagctgcaagacacccccagatcctgttaatggcatggtccacgtgatcactgatatacaggttggtagcagaattaactactcttgtacaaccggacacagactcattggccattctagtgcagagtgcatcctgtcaggcaacacagcccattggagcactaagcctcccatttgtcagagaatcccatgtggattgcccccaactattgcaaacggagactttatttccacgaatcgcgagaacttccactacggctctgtcgttacgtatcgctgcaatcttgggagccgcggtcggaaggtcttcgaactggtgggcgagccttcaatctattgcacctcaaacgacgatcaggtaggaatctggtcgggtcctgctcctcagtgcattattccaaataagtgtactcccccaaatgtcgagaacggtattctcgtatccgataacagatcattgttcagtctgaacgaagtggttgagtttaggtgccaacccggtttcgtgatgaaggggccacggagggtaaaatgccaggccctgaacaagtgggagcccgagctaccttcatgctcccgcgtatgtcagcctcctcctgagatcctgcacggcgaacacacaccgtctcatcaggacaacttttctcctggacaggaggtcttctatagttgtgagcccggatacgacctgcgaggggcagcgagcttgcattgtaccccacagggtgattggtctcctgaggctcctcgatgtgctgtgaaatcatgcgatgactttctgggccagctcccacatgggagggtgctgttcccactcaacctacagctgggcgcaaaggtcagcttcgtctgtgacgaagggtttcgccttaagggcagttccgtttcgcattgcgttctggtcggcatgcgctcattgtggaacaactcagtaccagtatgcgaacacattttttgcccgaacccacccgcaatcctgaatggccgtcatacgggcactccctctggggacattccatatggaaaagagatctcctacacctgtgatccccacccggacagaggaatgacatttaatcttatcggggaatccactatcaggtgcacgagcgatccccatgggaacggtgtgtggtcctctcctgccccaagatgcgaactgtcggtaagggccggacactgtaaaacacctgagcagttcccttttgcctcccccacgataccaattaacgatttcgaattccccgtgggaaccagcctgaactatgagtgtcggcctgggtacttcggcaagatgttctcaatttcatgtctggagaacctggtgtggagctctgtcgaggacaactgtcggaggaaatcttgcggcccacctcctgagccattcaacggcatggtgcacatcaacaccgatacccaatttggatccaccgtcaattactcatgcaacgagggattccggctgatagggagccctagcacaacatgtctggttagcggcaataatgtgacgtgggataagaaggcacccatttgcgaaataattagttgtgagcctcccccaaccatctccaatggtgatttttactccaacaataggaccagcttccataatggcaccgtggtgacttatcagtgccacacaggccctgatggggagcaacttttcgagctggtgggagagagatcaatctattgtacaagtaaggatgatcaggttggggtatggtcgtctccaccaccaaggtgtataagtaccaacaagtgcacagcaccagaagtggaaaacgccataagggtgcccggtaaccgtagtttctttacacttaccgagatcataaggtttcgatgccagccagggtttgttatggtcggtagccacactgttcaatgccagactaatggccgttggggcccaaagcttcctcactgctcacgcgtctgccagccgcctccggagatcctccacggcgagcacaccttgagccatcaggacaactttagccccggtcaggaggtcttttactcttgcgaaccgtcttacgacctgcgcggagcagcaagcctccactgcacccctcagggcgattggtcacccgaggcgcctagatgcacggtgaagagctgtgatgactttctcggccagctgccacacggccgagtactgcttcctctgaacctgcagctaggagctaaggtgagcttcgtgtgcgatgagggctttaggttaaaaggacgcagcgcttcccattgcgttttggccggtatgaaggccctgtggaactcatccgtcccagtgtgcgagcagatcttttgtcctaatcctcctgctatacttaatgggcgacataccggaacaccctttggagacattccctacggaaaggagatcagctacgcgtgcgacacccatcctgatagaggcatgacattcaatctgattggcgaatcctcaattaggtgtactagcgatccccagggaaatggtgtgtggagcagtccggcaccacggtgtgaattgagcgtcccagctgcctgcccacacccaccaaaaatccagaatggacattatatcggcggtcatgtaagtctttacctgcccggtatgactatctcttatatatgcgatcctggatatctgctggtgggcaaaggattcatcttttgcaccgatcagggaatttggagtcagctcgaccactactgtaaggaggtcaactgcagctttcctctattcatgaacggcatcagtaaggaactggagatgaagaaagtttatcattacggcgactatgtcacactgaagtgcgaagatggatacacattagaagggagcccatggtctcagtgccaggcagacgatcgctgggaccctccgctggctaagtgcacctctcggacccacgatgcactgattgttggaactctgagcggcacaatcttctttatcctcctgatcatattcctctcctggattattctgaagcataggaagggcaacaacgcgcatgagaatcctaaggaggtggcgatccatttgcactctcagggtggatcttctgtgcatcctaggaccctgcagaccaacgaagaaaacagcagagtcctgcctta

SEQ ID NO: 12703 - DNA, 6119 bp, Artificial Sequence
  derived and/or modified sequence
atgggggcatcatcacctcgctcccctgagcctgttggtccccctgccccaggtttacccttttgttgcggcggttctctgctcgcagtggtggttcttctcgccttgcctgtggcatggggccagtgtaatgccccagagtggttaccttttgctcgcccaacaaatctaaccgacgagtttgagtttcccatcgggacatacttaaattacgaatgtagaccagggtatagtggaaggcccttctccatcatctgtttgaaaaatagcgtctggacaggagcaaaggataggtgtcggaggaaatcctgtagaaaccccccagatcccgtgaacggaatggtgcacgtgatcaaagggatccagttcgggtcacagatcaaatatagctgcacgaagggatacaggctcattgggtcttcttccgctacatgcatcatcagcggagatactgttatctgggacaacgaaactccgatttgcgatcgaatcccatgcggtctgcctcctacgattacaaatggggacttcatcagcactaatcgagaaaatttccactacggttcagtcgtgacctaccgctgtaaccccggaagtggcggacgcaaggtgttcgaactcgttggagagccctctatctactgcacttcaaacgacgaccaggtgggaatttggagcggacccgcaccccagtgcattattcctaacaagtgtacaccacccaacgtagagaatggcatactggtttctgataacagatcactcttttcgctcaatgaggtcgttgaattcaggtgtcagcctggcttcgtaatgaaaggaccacgcagagtgaaatgccaagctttgaacaaatgggagcctgaactgccttcttgctcacgggtgtgccaaccgccacctgacgtcctgcacgctgagcgcacgcagcgcgacaaagataatttcagccctggacaggaggttttctattcctgtgagcccggttatgatttgcgtggcgctgcctcgatgaggtgcacaccacagggcgactggagtcccgcagcgcctacttgcgaggtcaagtcgtgtgatgacttcatggggcagctgctcaacggtagagtgttatttcccgttaatctgcagttgggagcaaaagttgactttgtctgcgacgagggcttccagttgaagggttcctccgcatcgtactgtgtcctggccggaatggagtcactctggaattccagtgttcctgtttgtgagcagatcttctgtccttctccgccagtaatcccaaatggcagacacacagggaagccactggaagtttttcctttcggcaagactgtcaactacacatgtgatcctcatccagaccgtggtacatcttttgatctcatcggtgagagcacgatacgctgtacatccgacccccaggggaatggcgtctggtccagcccagctcccagatgtggcattttggggcactgtcaagccccagatcatttcttgttcgccaaattgaaaacgcagacaaatgcctctgacttcccaatcgggaccagcttgaaatatgagtgcagaccagagtactatgggaggcccttttccatcacctgcttagacaacctggtatggagctctccaaaagatgtgtgcaaacggaagtcttgcaagaccccaccggatccagtgaatggaatggtgcacgtcatcacggacatccaagtgggcagtcgcattaactattcctgtacaacggggcacaggttgataggccacagctctgcagaatgtattctgtctggcaatgcggcacattggtcaaccaaaccgccaatatgccagagaatcccttgcggcctccccccaactatcgctaacggcgactttatttcgactaacagggaaaactttcattacggctctgtggtcacataccgctgcaacccaggtagtggtggtcgtaaggtgttcgaacttgtcggggagccctctatctattgcacgagcaacgatgaccaggtcggaatttggtcagggcctgccccacaatgcatcatcccaaataagtgcactcctcccaacgtagagaacggcatcctggtcagcgacaatcgcagcctgttttccctgaacgaggtcgtggaattccggtgccagccaggctttgtgatgaagggacctcgcagggtcaaatgtcaagcattaaacaagtgggaaccggagcttccgtcctgcagccgtgtgtgtcagcccccaccggacgtgctgcatgctgaaaggactcagagagacaaagataatttttcccctgggcaggaggtgttctattcatgtgaacccggttacgacctgaggggcgctgccagcatgaggtgtacacctcagggagactggtctcctgccgcacccacgtgtgaggtgaaatcctgcgatgacttcatggggcagttgcttaacggtcgcgtactgtttcccgtgaacctgcaattgggagcaaaagtggatttcgtttgtgatgaagggtttcaacttaagggcagctccgccagctactgtgtgctggctgggatggaatctttatggaattctagtgtgccagtttgcgaacaaattttttgcccgagccctcctgtgatcccgaatggacgtcatactgggaaacccctcgaggtttttcctttcgggaagacagtgaactacacatgcgacccacaccccgatcgcggaactagttttgacctgatcggagaatcaactattcgatgtacttccgaccctcagggaaatggcgtgtggtccagcccagccccaaggtgtgggatccttggccattgtcaagcgcctgaccacttcttgttcgccaagctaaagacccagaccaacgcttctgattttcctatcggtacttccctcaaatacgaatgccgtccagaatactatgggagaccattttccatcacatgtctggataatctagtctggtcctctcccaaggatgtgtgcaaaaggaaatcttgcaaaacccccccagaccctgtgaatggcatggtgcatgtaatcaccgacatacaggtggggtcacgcatcaattacagctgtaccacgggacaccggctaatcgggcattctagcgccgaatgtattctgagcggaaacaccgcccactggtccactaagccgcctatttgccaacgaataccctgcgggctgccaccgactatcgctaatggtgacttcatctccacaaatcgtgagaacttccactacgggtccgtcgtgacctacaggtgtaacctgggctcccgcggacgaaaagtttttgaactggtaggagaaccatccatctactgcaccagtaatgatgaccaggtcggaatttggtcggggcctgcacctcaatgcatcattcctaacaaatgcacacccccaaacgtggagaatggaattctcgtgtctgataatagaagcttgttctcactgaatgaggtcgtggagttcaggtgtcagcctgggttcgtgatgaagggtccccgtagggtgaagtgtcaagcactgaataaatgggaacctgagttgccctcatgctcacgcgtctgtcaacctccccctgagattctacacggagagcatactcccagccatcaggacaacttttccccgggacaggaggtgttctattcctgcgagcccggatatgacttacgtggggctgcctccctgcactgtactccccagggggactggtctcctgaggcaccccgttgcgcagtcaagtcttgtgacgattttttaggccagctgccgcacggtagagttctgtttccgttaaatctgcagcttggggcaaaggtgtccttcgtttgcgatgaaggcttcagattaaagggcagcagtgtgtcccactgtgtcctcgtgggcatgcgctcactctggaacaactctgtgcctgtttgcgaacacatattttgcccgaaccctccagctattctcaatggacgacacacagggaccccttcgggggacattccctatggcaaggagatctcctacacctgcgatccgcatcccgataggggtatgaccttcaatttaattggcgagagtactatcaggtgcacatccgatccacacggcaacggagtgtggtcatcccccgcacccaggtgtgagttgagtgtgagggccggtcattgtaagacccctgagcagttcccattcgcttcgcctacgatacccatcaacgattttgagttccctgtggggaccagtctcaattatgaatgcaggccaggatatttcggcaaaatgttttcgatctcctgcctggagaacctagtatggtcttctgtggaagataactgtaggagaaaatcttgtgggcctcctcccgagccttttaatggcatggtccatatcaacaccgatacacaattcggctccactgtgaactacagctgtaatgaggggtttaggctgattggctccccaagcacgacctgcctcgtgagcggaaataacgttacctgggacaaaaaagcccctatctgcgaaattatttcttgtgaaccgcctcctacaatctccaacggcgatttctactctaataaccgtaccagcttccacaatggaaccgtggtgacctaccagtgtcacactggaccagacggagagcagctgtttgagctggtgggagagaggtcaatctactgtacgtcgaaagacgaccaggttggggtgtggtcaagtccccctcccagatgcatctctaccaacaagtgtacagctcccgaggtcgaaaacgccatccgagtgccaggtaaccgcagtttttttactctgacagagataattaggttcaggtgtcagccaggtttcgtgatggtcggttcgcacaccgtccagtgtcagaccaacggtagatggggccctaagctgccccattgcagccgtgtgtgccagcccccaccagaaatactgcatggggagcatactctgagccatcaggacaacttttcgcctggccaggaagtgttttactcatgcgaaccttcctacgacctaaggggcgctgcatctttacactgcactcctcagggcgactggtcccctgaagcaccacggtgtactgtcaagtcgtgtgatgattttctgggccaattgccccacggcagggtgttattgccattaaacctccagctgggggcaaaagtgtcctttgtgtgtgacgaggggttccgcttgaagggtcgctcggcctcgcactgcgtcctcgccggaatgaaggcattgtggaacagtagcgttccagtctgcgagcaaattttttgccctaacccccctgctattctaaacggacggcacacaggaacccctttcggagacattccctatgggaaagagatcagttatgcttgcgacactcaccctgatagaggaatgacctttaatctgattggcgagagctctatacggtgtaccagcgatccacaaggcaatggagtgtggtcttccccagccccaagatgtgagctgagtgtgcccgctgcttgtcctcaccctccaaaaatacagaacggccactacatcggtgggcacgtgtctctttacctccctggaatgactatttcctacatatgtgacccgggatatcttctcgtgggcaaagggttcatcttctgcacagaccaggggatttggtcacagctggaccactactgcaaggaggtgaattgctcatttccgctcttcatgaacggcatatcaaaggagctggagatgaaaaaagtatatcactacggggactacgtgacactgaagtgcgaggacggttacaccctggaaggtagcccatggagtcagtgtcaagccgacgatagatgggatccacccttggccaaatgtacctctcgcacgcacgatgcattaatcgtggggacactgtccggcaccatcttcttcatcttgctgatcattttcctttcctggattattctcaaacacaggaagggcaacaatgcccatgagaatccaaaggaggttgccattcacttacacagccaaggaggctcatcggtccacccgagaaccctgcagacaaatgaggaaaactcccgtgtgctgcccta

SEQ ID NO: 12704 - DNA, 6119 bp, Artificial Sequence
  derived and/or modified sequence
atgggcgcttcatctcctcggtcacctgaaccagttggtcctcccgctccgggtcttcctttctgctgcggcggttctctgctggccgtcgtggttttgctggccctccccgtggcttggggtcagtgtaatgctcccgagtggctgccatttgcgcgacctacaaacctcaccgacgaattcgaatttcctatcggcacatacttaaattatgaatgtaggccaggttattccggcagacctttctctataatatgccttaagaatagcgtctggactggcgctaaagaccgctgtcgtaggaagtcgtgtagaaacccacccgaccctgtcaacggtatggtgcatgtgatcaaaggtatccagttcgggagtcagataaagtacagttgtacaaaaggctatcggctgatcggcagctccagcgccacctgtataatctcgggggacaccgttatttgggacaacgagaccccaatttgcgatcggataccttgcgggctcccgcctacaatcacaaatggggacttcatttcaacaaaccgcgagaatttccattacggtagtgtcgttacatatcgctgtaaccccggttccggcggacgaaaggtgttcgaattggtcggcgaaccctcaatatactgcacttccaacgatgaccaggtggggatctggagtgggccagccccacaatgcattatacctaacaagtgcacaccgcctaacgtcgagaatgggatcctggtgtcagacaaccggtcacttttcagcttgaacgaagtcgtggagtttcggtgccagccaggcttcgtcatgaaaggcccacggagagtgaaatgccaggccctgaataaatgggaacccgagttgccaagctgctccagggtatgccagccgcctccggatgttctgcacgcagaacgaacccagcgggataaagacaattttagtccgggacaggaagtgttttatagctgtgagccagggtatgacctcagaggcgctgccagtatgagatgtacaccccagggcgattggtccccggcagcgcctacgtgtgaagtaaagagctgtgacgactttatgggacaactgctgaatggaagggttttattcccagtgaatttgcagttaggagcaaaagtggactttgtctgtgatgaagggtttcagctcaagggctccagtgcgagctactgtgtactggctggcatggagtcgctgtggaacagtagtgttccagtgtgtgaacagatcttctgtccatctccacctgttattccaaacggaagacacacaggaaaacccctggaggtgtttccgttcggaaagacggttaattatacctgcgacccgcaccccgacaggggcacatcttttgatctgatcggtgagagcacgataaggtgtacaagcgatcctcaaggcaatggggtgtggtcgtctccagcacctcggtgtggaatattgggccactgccaggctcccgatcattttctgttcgctaaactgaaaacccagaccaacgcctccgatttccccatcggtacatcactcaagtatgagtgccgcccagaatattacggaaggcccttttcaataacctgtctggacaatctcgtgtggagcagcccgaaagacgtctgtaagcggaagtcctgcaaaactcccccagacccagtgaatggtatggtgcatgtgatcaccgacatccaagtgggatcccgcataaattattcttgcacgacagggcatagactgattggccatagctccgcagagtgcattctctccggcaacgcagcacactggagcaccaaacctccaatttgtcaaaggatcccgtgcggtctgccgccaactatagctaatggagactttatctccaccaatcgtgaaaatttccattatggcagcgttgttacttaccgatgcaatcccggtagtggaggcagaaaagtattcgagctggttggagaaccgtccatctactgcactagcaacgatgatcaagtgggcatttggtctggaccggcaccacaatgtataattccaaataaatgtacccccccaaacgtcgagaatggtattctggtgtccgataatagaagcctgtttagtctgaacgaggtggttgagttccggtgccagccgggatttgtcatgaagggcccaagaagagtgaagtgtcaagccttaaacaagtgggagccagaactgccttcctgtagccgagtgtgtcagccaccaccagatgtgctgcacgccgaacgtacccagcgagacaaggataacttctcaccaggccaagaggttttctattcatgcgaacccggatacgacctcaggggtgctgcctctatgaggtgcaccccccaaggagactggtcccctgctgcccctacctgcgaagtcaaatcatgtgatgacttcatggggcagttactgaacggtcgggtgctattccctgttaacctccaattgggcgctaaggtggattttgtctgcgatgaaggatttcagctgaagggcagcagtgccagctattgcgttctggccggaatggagagcctgtggaacagcagcgtcccggtctgtgagcagatcttttgtccatcaccacccgtgattccaaacggacggcatactggaaaacccctggaagttttcccttttggaaaagcagtgaattacacatgtgatcctcaccctgacaggggcacctcttttgatctgattggggagtcaacaattaggtgtacctccgaccctcagggaaacggagtgtggtccagccctgcacccagatgcggcatcctaggccactgtcaggcacctgatcacttcctctttgctaagttaaagacccagacaaacgcaagtgatttccctatcggcacatcattgaagtacgagtgccgacctgagtattacggccgtcccttcagtataacatgcctcgataatcttgtgtggagctcccctaaggacgtctgtaaaaggaagagctgtaagacgcctcccgatccggttaatgggatggttcacgtgattacggacatccaggtgggcagcagaataaattatagctgcacaaccgggcaccgactgattggccactcctcagcagaatgcatactgtccggtaatacagcccactggtcaacaaaacctccgatctgtcagagaatcccatgcgggttgcctcctaccattgccaacggtgatttcatctcaaccaatagggagaatttccattacggcagcgtggtgacgtaccgatgtaatctcggatcacggggacggaaggtatttgaactggtgggggaacctagtatctactgcacctcaaatgatgatcaggttgggatctggtctggacctgcccctcaatgcataattccaaacaagtgtacaccccctaatgtcgagaacgggattttggtctcagataacagaagcctgttcagtctaaacgaggttgttgagttccgttgccagcccggattcgtgatgaaaggacccagaagggttaagtgtcaggccttgaacaagtgggaaccggagctgcccagctgcagtcgagtctgccagcccccaccggaaatccttcatggtgagcacactccaagtcaccaggacaatttttctcctggtcaagaagtgttttactcttgcgagcccggttacgatttgaggggtgctgcatccctccactgtaccccccagggagattggtctcctgaagctcccagatgcgccgttaagtcatgtgacgactttttgggacagcttcctcacgggagagtgctcttccctctgaatctccagcttggggctaaagtgtctttcgtttgcgacgagggctttcggcttaaggggtcgagcgtcagtcactgtgtgttagtggggatgcgctctctttggaataacagcgtgcccgtgtgtgaacacatattctgtcccaatcccccagctattctcaatggacggcatactgggacccccagcggcgacataccatatggtaaggagatatcttacacatgcgatccccaccctgaccgaggcatgactttcaacctgataggggaaagcaccattcgttgcacaagtgatcctcacggcaacggagtgtggagctcccctgctccacgttgcgagctctctgttagagccggtcactgcaagacgccggaacagtttcccttcgcttccccaaccatcccaatcaatgattttgaattccccgttggcacatctctgaattatgaatgtcgaccaggctacttcgggaagatgtttagcatcagctgcctcgaaaacctggtgtggagcagcgtggaagacaactgcagacgcaagtcgtgcggaccccctccagagcccttcaacggtatggtccacatcaacacagatacgcaatttggatcaaccgtcaactactcctgcaacgagggctttcgtcttataggatctccgagtactacatgccttgtctccgggaacaatgtcacatgggacaaaaaagctccaatatgtgaaatcatatcgtgcgaacccccacccacaatatcaaatggtgacttctacagcaataaccgcaccagctttcataacggcacggtggtgacgtaccagtgccataccggaccagacggagagcaactgttcgaactagttggagagagaagcatttactgcacttcaaaagatgaccaagtgggtgtctggagttcccccccaccccgatgtatttccaccaataagtgtacggccccagaggtggagaatgcgatccgggtgcccggtaatagatccttttttacactgactgagattattcgctttagatgtcagcccggatttgtgatggtcggtagccatactgtgcagtgtcaaactaatggaaggtggggacctaagctgccacattgcagtagggtctgtcagcccccacctgaaatactgcacggggagcacaccctgagtcatcaggataatttctctccgggacaggaagtcttttactcctgcgagccaagctacgacctgagaggcgctgcatctctgcactgcacgccacagggcgactggagtccagaggccccacgatgtactgttaaaagttgtgacgattttctgggccagttgccacacggcagggtgctcctgcccctgaatctgcaactcggcgctaaggtgtccttcgtgtgtgatgagggcttccgtctcaaaggcagatctgcaagtcactgcgtacttgcaggaatgaaagccctgtggaacagtagcgtgcccgtgtgcgagcagattttttgccctaatcccccagccattctgaacggaaggcacaccggaaccccatttggtgatataccttatggcaaagaaattagctatgcctgcgacacacaccctgatcgcggtatgacatttaatttgatcggcgaaagctcaattcgctgcacttccgatccccagggaaatggcgtttggagctctcccgctcccagatgtgagctgtctgtccccgctgcttgcccccatccaccaaaaatacaaaatggccactatataggcggacatgtatccctctatctgcccggaatgacaatcagttacatctgtgatccaggatatttattggtgggaaagggattcatcttctgcacagatcaggggatctggtcccagctggatcactactgcaaagaagttaactgttcgtttcctctctttatgaacggcatttccaaggagctcgaaatgaagaaggtttaccactatggagactacgtaactctaaagtgtgaggacggctatacactggaggggtcaccttggagtcagtgtcaggccgatgaccggtgggaccccccactagcaaagtgtacgtcccgtacacatgatgcactgattgttggaacactttctggcacaattttctttattctgctcattatattcctcagttggatcatcttaaagcatagaaaggggaacaacgctcacgagaatccaaaggaagttgccattcatcttcactctcagggtggttcatcagtacaccctcgcaccctccagaccaatgaagaaaacagccgcgttcttcctta

SEQ ID NO: 12705 - DNA, 6119 bp, Artificial Sequence
  derived and/or modified sequence
atgggggcatcctccccaagaagtcctgaacctgttggacctccagctccaggacttccgttctgctgtgggggatccttgctcgccgttgtggtgttgctcgcactcccagtggcctggggtcagtgcaacgctccagaatggctcccattcgctaggccaactaatcttactgatgagttcgagttccctattggcacttacctcaattacgagtgtaggccgggatacagtggaaggccgttcagcatcatctgcctcaagaactccgtgtggactggagcgaaggatcgatgtcggagaaagtcctgtcggaatcccccagaccctgtcaatggtatggtacacgtaattaaggggattcagttcgggtctcagattaagtacagctgcaccaagggctacaggctgatcgggtcctcaagtgctacctgcatcatcagcggcgatactgtgatctgggacaacgagaccccaatttgtgaccgcatcccgtgcgggctgcctccgactatcaccaacggggatttcatctccactaacagagagaactttcactacggttctgttgtcacataccgttgtaaccctggatctggaggcagaaaggtgtttgaattggttggggagccctctatttattgcactagcaacgatgatcaggtgggcatttggtctgggccagctccgcagtgcataattcccaataagtgtacacccccaaacgtggagaatgggatcctggtgagcgataatagaagtctctttagcctcaacgaggtcgttgagttccgctgtcagccaggcttcgtgatgaagggcccaaggcgtgtaaaatgtcaggccttgaacaagtgggagcccgagctgcctagttgctccagagtgtgccagcctcctcctgatgtattgcacgctgaacggacacagcgcgacaaggacaatttcagccctgggcaggaggttttttactcgtgcgaacccggttatgatctaaggggcgcagcatccatgcgttgtaccccacagggtgattggtcacccgctgcacctacctgcgaggttaaaagttgtgacgattttatgggccagttactgaacggcagagtactgttcccagtcaatctgcagctaggtgccaaggtggacttcgtctgtgacgagggatttcaattgaaaggctccagtgcttcctattgtgtgttggccggtatggagagtctctggaactcctcagtgcccgtgtgcgagcagattttttgtccctccccaccagttatacctaatggccgtcatacaggaaagccattggaagtttttccattcgggaaaactgtcaattatacatgtgatccacaccctgacagagggactagtttcgaccttattggtgagtccaccattcgctgtaccagcgatccacagggaaatggagtgtggtctagccccgcaccacggtgtgggattctggggcattgtcaggctccggaccattttttatttgccaaattaaagacacagactaacgccagcgactttccaatcgggacaagcctgaaatacgagtgcaggcccgagtattacggcagacccttttctatcacctgtctggataacctggtgtggtcctctcccaaagatgtgtgtaaaagaaagtcatgcaagacaccccctgaccctgtcaacggaatggtccacgtcatcaccgacatccaggtggggtcccggattaattattcttgcaccacaggacaccggctgatcggacacagttccgcagaatgtattctatccggcaatgcagcgcactggtctactaaaccacccatctgccagaggatcccgtgtggattgcccccaactatcgctaacggcgacttcatctccactaacagggaaaatttccactacggatctgttgtcacatatcgctgcaatcctggatccgggggaaggaaagtattcgaactggtgggagaaccatccatctattgcacttctaacgacgaccaggtggggatttggtctggtcctgctcctcaatgtatcatacctaacaaatgtactccgcctaatgtcgagaacggcattctcgtaagtgataacagatctctgttctcactcaatgaggttgtcgagtttcgctgtcagccaggcttcgttatgaaagggccacgtcgcgtgaaatgtcaggcactaaataagtgggaacccgagttgccctcctgttccagagtgtgccagcctccacccgatgtgttgcacgccgaaagaacacagagagacaaagacaatttcagcccgggacaggaggtcttttatagttgcgagcccggatatgacctcaggggtgccgcttcaatgcgttgcaccccacagggcgattggtctcctgcggcacctacttgcgaggtaaagagttgtgacgactttatggggcagctgttgaatggacgcgtgctcttccctgtgaatcttcagctgggtgcaaaagtagatttcgtgtgcgatgaaggctttcagctgaagggctccagcgcgtcttactgcgtattagccggtatggagtctttatggaattcctctgtgcccgtttgcgagcagatattttgccccagcccacccgtcattcctaacggaagacatacgggaaagcccctggaggtcttcccttttggcaaggccgtcaattacacttgtgacccgcatccagaccggggtacaagtttcgaccttatcggcgaatctacaattcggtgcacgtcagacccccagggcaatggagtttggtcttcccctgccccaagatgtgggatacttgggcactgccaagcccctgatcatttcctgttcgcgaagctgaaaacacagaccaacgcaagtgatttccccatcgggaccagccttaaatacgagtgtcggccagaatactacggtcgcccattcagtatcacttgtctggataacctggtgtggtcatctccgaaagatgtgtgtaaacgcaagtcatgcaagacaccccctgaccctgtaaacggaatggtccacgttataacagacatacaggtcggctctcgaattaattattcatgcaccacagggcaccggctgatcggtcacagttccgcggaatgcattttgagtgggaacactgctcactggtctacgaaaccacccatctgccaaagaatcccctgtggactgcctcccaccatagccaacggcgactttatttcaaccaatcgagaaaacttccattatggctcagtcgtaacttaccggtgcaatcttggaagccggggtcggaaggtgtttgagctagtcggcgagccatccatttactgtaccagtaacgacgatcaagtgggaatctggtccggacccgctccccagtgtattatcccaaataagtgcacgcccccaaacgtcgagaacggcatccttgtgagcgataataggtccttgttttctctgaatgaggtggtagagtttcgctgccagccgggttttgtcatgaagggacctcgccgagtgaagtgccaagctttgaataagtgggaaccagagctgccaagctgctcacgtgtatgtcagccacccccagagattcttcacggggagcacaccccctcccaccaagataactttagcccgggtcaagaagtcttttattcatgtgaacctgggtacgatctgagaggcgctgccagcttacactgcacaccgcagggggactggtcacccgaagcgcctcggtgtgccgtgaagtcttgcgatgattttctgggacagctaccacacgggagggttctgttccccctgaacctgcaactgggggcaaaggtgagttttgtgtgcgacgagggtttccgactgaagggcagcagcgtctcccattgcgtcctggtggggatgcgctctctgtggaataattccgttcccgtttgcgagcacatcttctgtccaaacccgccagccattctgaatggccgtcatactgggacaccatctggcgatatcccttacggtaaagagatcagttacacctgtgaccctcaccccgataggggcatgacttttaatctaattggggagagcaccatcaggtgcacttcagacccgcatggtaatggcgtttggtcttctcctgcgccacgttgtgagctatccgtgcgggctggccactgcaagaccccagagcaatttcccttcgctagtcccaccatccctataaatgattttgagtttccagtcggcacatcactgaactacgagtgccgtcctggctattttggcaagatgttctccatcagctgcctggagaaccttgtgtggtcctcagtggaggacaattgccgccgaaagtcttgcggccctccacccgaacctttcaatgggatggtgcatatcaacaccgatacgcagttcggctctaccgtcaactatagctgcaacgaaggcttcagactaatcggatcacccagcacaacctgtctcgtttctggcaataacgtcacctgggacaaaaaagcacctatctgcgaaatcatatcttgtgagcccccacctaccatttccaacggggacttctattccaataaccgtacctcattccacaatggcacagtcgtaacttatcagtgccacacgggccctgatggcgaacagcttttcgaacttgtgggcgagaggtctatctattgtacctccaaggacgaccaggtgggtgtgtggagctctcctccacctcgatgtatctcaaccaacaagtgtactgccccagaagtcgagaacgctattcgagttccagggaatcgcagctttttcaccctgaccgagatcatcagatttcgctgtcagccaggattcgtgatggtcgggtcgcacaccgtgcagtgtcaaacaaatggtcgttgggggcctaaactgccccattgctctcgcgtatgccagccacccccagagattctacacggcgaacacacattgtctcaccaggacaacttttcccctggccaggaggtcttttatagctgcgagccgtcttatgacctcagaggcgcagcatctctgcactgtactccgcagggggactggagccccgaggctcccagatgcacggtcaaaagctgtgatgacttcctgggacagctgccccacggccgtgtgctcctgcctcttaacctgcagctgggagctaaggtttccttcgtatgtgatgagggctttaggttaaagggtcggtccgctagccactgcgtgctcgcaggcatgaaggcactctggaactctagcgtgccagtgtgtgaacagatcttctgtcccaatccccctgctattcttaacggcagacatacaggaacgccatttggggatatcccctatgggaaggagataagctatgcctgtgacactcacccagacaggggaatgaccttcaaccttatcggggaatcgagcattcgctgtaccagtgatccccagggaaatggagtttggtcatcgcctgccccacgctgcgaactcagcgtcccggcagcctgcccacatccacccaagattcaaaacggacactacatcggaggccacgtgtccctgtacctgcccggaatgaccattagttacatatgtgacccaggctaccttttggttggcaaaggttttatcttctgcaccgaccagggtatttggtctcaactggaccactactgcaaagaggtaaactgcagcttcccattgtttatgaacggtatcagcaaggagctggaaatgaagaaggtgtaccattatggcgattacgtgacactaaaatgcgaagatggctataccttggaaggctctccatggagtcaatgtcaggctgacgacaggtgggaccctcccctggctaaatgcaccagtaggacgcatgatgcactaatagtgggcaccctttcagggactatctttttcattttacttattatctttctcagctggatcattctgaagcaccgaaaaggcaataacgctcatgagaatccgaaggaggtggcgatccatctgcactctcaaggcggaagttccgttcaccctcgtacgttgcagacaaacgaagagaacagccgggtgttgccata

SEQ ID NO: 12706 - DNA, 7469 bp, Artificial Sequence
  derived and/or modified sequence
acactctgggcgcggagcacaatgattggtcactcctattttcgctgagcttttcctcttatttcagttttcttcgagatcaaatctggtttgtagatgtgcttggggagaatgggggcctcttctccaagaagcccggagcctgtcgggccgccggcgcccggtctccccttctgctgcggaggatccctgctggcggttgtggtgctgcttgcgctgccggtggcctggggtcaatgcaatgccccagaatggcttccatttgccaggcctaccaacctaactgatgaatttgagtttcccattgggacatatctgaactatgaatgccgccctggttattccggaagaccgttttctatcatctgcctaaaaaactcagtctggactggtgctaaggacaggtgcagacgtaaatcatgtcgtaatcctccagatcctgtgaatggcatggtgcatgtgatcaaaggcatccagttcggatcccaaattaaatattcttgtactaaaggataccgactcattggttcctcgtctgccacatgcatcatctcaggtgatactgtcatttgggataatgaaacacctatttgtgacagaattccttgtgggctaccccccaccatcgccaatggagatttcattagcaccaacagagagaattttcactatggatcagtggtgacctaccgctgcaatcctggaagcggagggagaaaggtgtttgagcttgtgggtgagccctccatatactgcaccagcaatgacgatcaagtgggcatctggagcggcccggcccctcagtgcattatacctaacaaatgcacgcctccaaatgtggaaaatggaatattggtatctgacaacagaagcttattttccttaaatgaagttgtggagtttaggtgtcagcctggctttgtcatgaaaggaccccgccgtgtgaagtgccaggccctgaacaaatgggagccggagctaccaagctgctccagggtatgtcagccacctccagatgtcctgcatgctgagcgtacccaaagggacaaggacaacttttcacccgggcaggaagtgttctacagctgtgagcccggctacgacctcagaggggctgcgtctatgcgctgcacaccccagggagactggagccctgcagcccccacatgtgaagtgaaatcctgtgatgacttcatgggccaacttcttaatggccgtgtgctatttccagtaaatctccagcttggagcaaaagtggattttgtttgtgatgaaggatttcaattaaaaggcagctctgctagttactgtgtcttggctggaatggaaagcctttggaatagcagtgttccagtgtgtgaacaaatcttttgtccaagtcctccagttattcctaatgggagacacacaggaaaacctctggaagtctttccctttgggaaaacagtaaattacacatgcgacccccacccagacagagggacgagcttcgacctcattggagagagcaccatccgctgcacaagtgaccctcaagggaatggggtttggagcagccctgcccctcgctgtggaattctgggtcactgtcaagccccagatcattttctgtttgccaagttgaaaacccaaaccaatgcatctgactttcccattgggacatctttaaagtacgaatgccgtcctgagtactacgggaggccattctctatcacatgtctagataacctggtctggtcaagtcccaaagatgtctgtaaacgtaaatcatgtaaaactcctccagatccagtgaatggcatggtgcatgtgatcacagacatccaggttggatccagaatcaactattcttgtactacagggcaccgactcattggtcactcatctgctgaatgtatcctctcgggcaatgctgcccattggagcacgaagccgccaatttgtcaacgaattccttgtgggctaccccccaccatcgccaatggagatttcattagcaccaacagagagaattttcactatggatcagtggtgacctaccgctgcaatcctggaagcggagggagaaaggtgtttgagcttgtgggtgagccctccatatactgcaccagcaatgacgatcaagtgggcatctggagcggcccggcccctcagtgcattatacctaacaaatgcacgcctccaaatgtggaaaatggaatattggtatctgacaacagaagcttattttccttaaatgaagttgtggagtttaggtgtcagcctggctttgtcatgaaaggaccccgccgtgtgaagtgccaggccctgaacaaatgggagccggagctaccaagctgctccagggtatgtcagccacctccagatgtcctgcatgctgagcgtacccaaagggacaaggacaacttttcacccgggcaggaagtgttctacagctgtgagcccggctatgacctcagaggggctgcgtctatgcgctgcacaccccagggagactggagccctgcagcccccacatgtgaagtgaaatcctgtgatgacttcatgggccaacttcttaatggccgtgtgctatttccagtaaatctccagcttggagcaaaagtggattttgtttgtgatgaaggatttcaattaaaaggcagctctgctagttattgtgtcttggctggaatggaaagcctttggaatagcagtgttccagtgtgtgaacaaatcttttgtccaagtcctccagttattcctaatgggagacacacaggaaaacctctggaagtctttccctttggaaaagcagtaaattacacatgcgacccccacccagacagagggacgagcttcgacctcattggagagagcaccatccgctgcacaagtgaccctcaagggaatggggtttggagcagccctgcccctcgctgtggaattctgggtcactgtcaagccccagatcattttctgtttgccaagttgaaaacccaaaccaatgcatctgactttcccattgggacatctttaaagtacgaatgccgtcctgagtactacgggaggccattctctatcacatgtctagataacctggtctggtcaagtcccaaagatgtctgtaaacgtaaatcatgtaaaactcctccagatccagtgaatggcatggtgcatgtgatcacagacatccaggttggatccagaatcaactattcttgtactacagggcaccgactcattggtcactcatctgctgaatgtatcctctcaggcaatactgcccattggagcacgaagccgccaatttgtcaacgaattccttgtgggctacccccaaccatcgccaatggagatttcattagcaccaacagagagaattttcactatggatcagtggtgacctaccgctgcaatcttggaagcagagggagaaaggtgtttgagcttgtgggtgagccctccatatactgcaccagcaatgacgatcaagtgggcatctggagcggccccgcccctcagtgcattatacctaacaaatgcacgcctccaaatgtggaaaatggaatattggtatctgacaacagaagcttattttccttaaatgaagttgtggagtttaggtgtcagcctggctttgtcatgaaaggaccccgccgtgtgaagtgccaggccctgaacaaatgggagccagagttaccaagctgctccagggtgtgtcagccgcctccagaaatcctgcatggtgagcataccccaagccatcaggacaacttttcacctgggcaggaagtgttctacagctgtgagcctggctatgacctcagaggggctgcgtctctgcactgcacaccccagggagactggagccctgaagccccgagatgtgcagtgaaatcctgtgatgacttcttgggtcaactccctcatggccgtgtgctatttccacttaatctccagcttggggcaaaggtgtcctttgtctgtgatgaagggtttcgcttaaagggcagttccgttagtcattgtgtcttggttggaatgagaagcctttggaataacagtgttcctgtgtgtgaacatatcttttgtccaaatcctccagctatccttaatgggagacacacaggaactccctctggagatattccctatggaaaagaaatatcttacacatgtgacccccacccagacagagggatgaccttcaacctcattggggagagcaccatccgctgcacaagtgaccctcatgggaatggggtttggagcagccctgcccctcgctgtgaactttctgttcgtgctggtcactgtaaaaccccagagcagtttccatttgccagtcctacgatcccaattaatgactttgagtttccagtcgggacatctttgaattatgaatgccgtcctgggtattttgggaaaatgttctctatctcctgcctagaaaacttggtctggtcaagtgttgaagacaactgtagacgaaaatcatgtggacctccaccagaacccttcaatggaatggtgcatataaacacagatacacagtttggatcaacagttaattattcttgtaatgaagggtttcgactcattggttccccatctactacttgtctcgtctcaggcaataatgtcacatgggataagaaggcacctatttgtgagatcatatcttgtgagccacctccaaccatatccaatggagacttctacagcaacaatagaacatcttttcacaatggaacggtggtaacttaccagtgccacactggaccagatggagaacagctgtttgagcttgtgggagaacggtcaatatattgcaccagcaaagatgatcaagttggtgtttggagcagccctccccctcggtgtatttctactaataaatgcacagctccagaagttgaaaatgcaattagagtaccaggaaacaggagtttctttaccctcactgagatcatcagatttagatgtcagcccgggtttgtcatggtagggtcccacactgtgcagtgccagaccaatggcagatgggggcccaagctgccacactgctccagggtgtgtcagccgcctccagaaatcctgcatggtgagcataccctaagccatcaggacaacttttcacctgggcaggaagtgttctacagctgtgagcccagctatgacctcagaggggctgcgtctctgcactgcacgccccagggagactggagccctgaagcccctagatgtacagtgaaatcctgtgatgacttcctgggccaactccctcatggccgtgtgctacttccacttaatctccagcttggggcaaaggtgtcctttgtttgcgatgaagggttccgattaaaaggcaggtctgctagtcattgtgtcttggctggaatgaaagccctttggaatagcagtgttccagtgtgtgaacaaatcttttgtccaaatcctccagctatccttaatgggagacacacaggaactccctttggagatattccctatggaaaagaaatatcttacgcatgcgacacccacccagacagagggatgaccttcaacctcattggggagagctccatccgctgcacaagtgaccctcaagggaatggggtttggagcagccctgcccctcgctgtgaactttctgttcctgctgcctgcccacatccacccaagatccaaaacgggcattacattggaggacacgtatctctatatcttcctgggatgacaatcagctacatttgtgaccccggctacctgttagtgggaaagggcttcattttctgtacagaccagggaatctggagccaattggatcattattgcaaagaagtaaattgtagcttcccactgtttatgaatggaatctcgaaggagttagaaatgaaaaaagtatatcactatggagattatgtgactttgaagtgtgaagatgggtatactctggaaggcagtccctggagccagtgccaggcggatgacagatgggaccctcctctggccaaatgtacctctcgtacacatgatgctctcatagttggcactttatctggtacgatcttctttattttactcatcattttcctctcttggataattctaaagcacagaaaaggcaataatgcacatgaaaaccctaaagaagtggctatccatttacattctcaaggaggcagcagcgttcatccccgaactctgcaaacaaatgaagaaaatagcagggtccttccttgacaaagtactatacagctgaagaacatctcgaatacaattttggtgggaaaggagccaattgatttcaacagaatcagatctgagcttcataaagtctttgaagtgacttcacagagacgcagacatgtgcacttgaagatgctgccccttccctggtacctagcaaagctcctgcctctttgtgtgcgtcactgtgaaacccccacccttctgcctcgtgctaaacgcacacagtatctagtcaggggaaaagactgcatttaggagatagaaaatagtttggattacttaaaggaataaggtgttgcctggaatttctggtttgtaaggtggtcactgttcttttttaaaatatttgtaatatggaatgggctcagtaagaagagcttggaaaatgcagaaagttatgaaaaataagtcacttataattatgctacctactgataaccactcctaatattttgattcattttctgcctatcttctttcacatatgtgtttttttacatacgtacttttcccccttagtttgtttccttttattttatagagcagaaccctagtcttttaaacagtttagagtgaaatatatgctatatcagtttttactttctctagggagaaaaattaatttactagaaaggcatgaaatgatcatgggaagagtggttaagactactgaagagaaatatttggaaaataagatttcgatatcttctttttttttgagatggagtctggctctgtctcccaggctggagtgcagtggcgtaatctcggctcactgcaagctccgcctcccgggttgacaccattttcctgcctcagcctcctgagtagttgggattaccagtagatgggactacaggcacctgccaacacgcccggctaatttttttgtatttttagtagagacggggtttcaccatgttagccaggatggtctggatctcctgacctcgtgatccacctgcctcggcctcccaaagtgctgcgattacaggcatgagccaccgcgcctggccgctttcgatattttctaaactttaattcaaaagcactttgtgctgtgttctatataaaaaacataataaaaattgaaatgaaagaataattgttattataaaagtactagcttacttttgtatggattcagaatatactaaattaactttttaaaacacaacttttaaaaaatgtatcaaaataataaacgtgttctgatatttttaaaataa

SEQ ID NO: 12707 - DNA, 7469 bp, Artificial Sequence
  derived and/or modified sequence
acactctgggcgcggagcacaatgattggtcactcctattttcgctgagcttttcctcttatttcagttttcttcgagatcaaatctggtttgtagatgtgcttggggagaatgggggcctcttctccaagaagcccggagcctgtcgggccgccggcgcccggtctccccttctgctgcggaggatccctgctggcggttgtggtgctgcttgcgctgccggtggcctggggtcaatgcaatgccccagaatggcttccatttgccaggcctaccaacctaactgatgaatttgagtttcccattgggacatatctgaactatgaatgccgccctggttattccggaagaccgttttctatcatctgcctaaaaaactcagtctggactggtgctaaggacaggtgcagacgtaaatcatgtcgtaatcctccagatcctgtgaatggcatggtgcatgtgatcaaaggcatccagttcggatcccaaattaaatattcttgtactaaaggataccgactcattggttcctcgtctgccacatgcatcatctcaggtgatactgtcatttgggataatgaaacacctatttgtgacagaattccttgtgggctaccccccaccatcaccaatggagatttcattagcaccaacagagagaattttcactatggatcagtggtgacctaccgctgcaatcctggaagcggagggagaaaggtgtttgagcttgtgggtgagccctccatatactgcaccagcaatgacgatcaagtgggcatctggagcggccccgcccctcagtgcattatacctaacaaatgcacgcctccaaatgtggaaaatggaatattggtatctgacaacagaagcttattttccttaaatgaagttgtggagtttaggtgtcagcctggctttgtcatgaaaggaccccgccgtgtgaagtgccaggccctgaacaaatgggagccggagctaccaagctgctccagggtatgtcagccacctccagatgtcctgcatgctgagcgtacccaaagggacaaggacaacttttcacctgggcaggaagtgttctacagctgtgagcccggctacgacctcagaggggctgcgtctatgcgctgcacaccccagggagactggagccctgcagcccccacatgtgaagtgaaatcctgtgatgacttcatgggccaacttcttaatggccgtgtgctatttccagtaaatctccagcttggagcaaaagtggattttgtttgtgatgaaggatttcaattaaaaggcagctctgctagttactgtgtcttggctggaatggaaagcctttggaatagcagtgttccagtgtgtgaacaaatcttttgtccaagtcctccagttattcctaatgggagacacacaggaaaacctctggaagtctttccctttgggaaaacagtaaattacacatgcgacccccacccagacagagggacgagcttcgacctcattggagagagcaccatccgctgcacaagtgaccctcaagggaatggggtttggagcagccctgcccctcgctgtggaattctgggtcactgtcaagccccagatcattttctgtttgccaagttgaaaacccaaaccaatgcatctgactttcccattgggacatctttaaagtacgaatgccgtcctgagtactacgggaggccattctctatcacatgtctagataacctggtctggtcaagtcccaaagatgtctgtaaacgtaaatcatgtaaaactcctccagatccagtgaatggcatggtgcatgtgatcacagacatccaggttggatccagaatcaactattcttgtactacagggcaccgactcattggtcactcatctgctgaatgtatcctctcgggcaatgctgcccattggagcacgaagccgccaatttgtcaacgaattccttgtgggctaccccccaccatcgccaatggagatttcattagcaccaacagagagaattttcactatggatcagtggtgacctaccgctgcaatcctggaagcggagggagaaaggtgtttgagcttgtgggtgagccctccatatactgcaccagcaatgacgatcaagtgggcatctggagcggcccggcccctcagtgcattatacctaacaaatgcacgcctccaaatgtggaaaatggaatattggtatctgacaacagaagcttattttccttaaatgaagttgtggagtttaggtgtcagcctggctttgtcatgaaaggaccccgccgtgtgaagtgccaggccctgaacaaatgggagccggagctaccaagctgctccagggtatgtcagccacctccagatgtcctgcatgctgagcgtacccaaagggacaaggacaacttttcacccgggcaggaagtgttctacagctgtgagcccggctacgacctcagaggggctgcgtctatgcgctgcacaccccagggagactggagccctgcagcccccacatgtgaagtgaaatcctgtgatgacttcatgggccaacttcttaatggccgtgtgctatttccagtaaatctccagcttggagcaaaagtggattttgtttgtgatgaaggatttcaattaaaaggcagctctgctagttactgtgtcttggctggaatggaaagcctttggaatagcagtgttccagtgtgtgaacaaatcttttgtccaagtcctccagttattcctaatgggagacacacaggaaaacctctggaagtctttccctttgggaaaacagtaaattacacatgcgacccccacccagacagagggacgagcttcgacctcattggagagagcaccatccgctgcacaagtgaccctcaagggaatggggtttggagcagccctgcccctcgctgtggaattctgggtcactgtcaagccccagatcattttctgtttgccaagttgaaaacccaaaccaatgcatctgactttcccattgggacatctttaaagtacgaatgccgtcctgagtactacgggaggccattctctatcacatgtctagataacctggtctggtcaagtcccaaagatgtctgtaaacgtaaatcatgtaaaactcctccagatccagtgaatggcatggtgcatgtgatcacagacatccaggttggatccagaatcaactattcttgtactacagggcaccgactcattggtcactcatctgctgaatgtatcctctcaggcaatactgcccattggagcacgaagccgccaatttgtcaacgaattccttgtgggctacccccaaccatcgccaatggagatttcattagcaccaacagagagaattttcactatggatcagtggtgacctaccgctgcaatcttggaagcagagggagaaaggtgtttgagcttgtgggtgagccctccatatactgcaccagcaatgacgatcaagtgggcatctggagcggccccgcccctcagtgcattatacctaacaaatgcacgcctccaaatgtggaaaatggaatattggtatctgacaacagaagcttattttccttaaatgaagttgtggagtttaggtgtcagcctggctttgtcatgaaaggaccccgccgtgtgaagtgccaggccctgaacaaatgggagccagagttaccaagctgctccagggtgtgtcagccgcctccagaaatcctgcatggtgagcataccccaagccatcaggacaacttttcacctgggcaggaagtgttctacagctgtgagcctggctatgacctcagaggggctgcgtctctgcactgcacaccccagggagactggagccctgaagccccgagatgtgcagtgaaatcctgtgatgacttcttgggtcaactccctcatggccgtgtgctatttccacttaatctccagcttggggcaaaggtgtcctttgtctgtgatgaagggtttcgcttaaagggcagttccgttagtcattgtgtcttggttggaatgagaagcctttggaataacagtgttcctgtgtgtgaacatatcttttgtccaaatcctccagctatccttaatgggagacacacaggaactccctctggagatattccctatggaaaagaaatatcttacacatgtgacccccacccagacagagggatgaccttcaacctcattggggagagcaccatccgctgcacaagtgaccctcatgggaatggggtttggagcagccctgcccctcgctgtgaactttctgttcgtgctggtcactgtaaaaccccagagcagtttccatttgccagtcctacgatcccaattaatgactttgagtttccagtcgggacatctttgaattatgaatgccgtcctgggtattttgggaaaatgttctctatctcctgcctagaaaacttggtctggtcaagtgttgaagacaactgtagacgaaaatcatgtggacctccaccagaacccttcaatggaatggtgcatataaacacagatacacagtttggatcaacagttaattattcttgtaatgaagggtttcgactcattggttccccatctactacttgtctcgtctcaggcaataatgtcacatgggataagaaggcacctatttgtgagatcatatcttgtgagccacctccaaccatatccaatggagacttctacagcaacaatagaacatcttttcacaatggaacggtggtaacttaccagtgccacactggaccagatggagaacagctgtttgagcttgtgggagaacggtcaatatattgcaccagcaaagatgatcaagttggtgtttggagcagccctccccctcggtgtatttctactaataaatgcacagctccagaagttgaaaatgcaattagagtaccaggaaacaggagtttctttaccctcactgagatcatcagatttagatgtcagcccgggtttgtcatggtagggtcccacactgtgcagtgccagaccaatggcagatgggggcccaagctgccacactgctccagggtgtgtcagccgcctccagaaatcctgcatggtgagcataccctaagccatcaggacaacttttcacctgggcaggaagtgttctacagctgtgagcccagctatgacctcagaggggctgcgtctctgcactgcacgccccagggagactggagccctgaagcccctagatgtacagtgaaatcctgtgatgacttcctgggccaactccctcatggccgtgtgctacttccacttaatctccagcttggggcaaaggtgtcctttgtttgcgatgaagggttccgattaaaaggcaggtctgctagtcattgtgtcttggctggaatgaaagccctttggaatagcagtgttccagtgtgtgaacaaatcttttgtccaaatcctccagctatccttaatgggagacacacaggaactccctttggagatattccctatggaaaagaaatatcttacgcatgcgacacccacccagacagagggatgaccttcaacctcattggggagagctccatccgctgcacaagtgaccctcaagggaatggggtttggagcagccctgcccctcgctgtgaactttctgttcctgctgcctgcccacatccacccaagatccaaaacgggcattacattggaggacacgtatctctatatcttcctgggatgacaatcagctacatttgtgaccccggctacctgttagtgggaaagggcttcattttctgtacagaccagggaatctggagccaattggatcattattgcaaagaagtaaattgtagcttcccactgtttatgaatggaatctcgaaggagttagaaatgaaaaaagtatatcactatggagattatgtgactttgaagtgtgaagatgggtatactctggaaggcagtccctggagccagtgccaggcggatgacagatgggaccctcctctggccaaatgtacctctcgtacacatgatgctctcatagttggcactttatctggtacgatcttctttattttactcatcattttcctctcttggataattctaaagcacagaaaaggcaataatgcacatgaaaaccctaaagaagtggctatccatttacattctcaaggaggcagcagcgttcatccccgaactctgcaaacaaatgaagaaaatagcagggtccttccttgacaaagtactatacagctgaagaacatctcgaatacaattttggtgggaaaggagccaattgatttcaacagaatcagatctgagcttcataaagtctttgaagtgacttcacagagacgcagacatgtgcacttgaagatgctgccccttccctggtacctagcaaagctcctgcctctttgtgtgcgtcactgtgaaacccccacccttctgcctcgtgctaaacgcacacagtatctagtcaggggaaaagactgcatttaggagatagaaaatagtttggattacttaaaggaataaggtgttgcctggaatttctggtttgtaaggtggtcactgttcttttttaaaatatttgtaatatggaatgggctcagtaagaagagcttggaaaatgcagaaagttatgaaaaataagtcacttataattatgctacctactgataaccactcctaatattttgattcattttctgcctatcttctttcacatatgtgtttttttacatacgtacttttcccccttagtttgtttccttttattttatagagcagaaccctagtcttttaaacagtttagagtgaaatatatgctatatcagtttttactttctctagggagaaaaattaatttactagaaaggcatgaaatgatcatgggaagagtggttaagactactgaagagaaatatttggaaaataagatttcgatatcttctttttttttgagatggagtctggctctgtctcccaggctggagtgcagtggcgtaatctcggctcactgcaagctccgcctcccgggttgacaccattttcctgcctcagcctcctgagtagttgggattaccagtagatgggactacaggcacctgccaacacgcccggctaatttttttgtatttttagtagagacggggtttcaccatgttagccaggatggtctggatctcctgacctcgtgatccacctgcctcggcctcccaaagtgctgcgattacaggcatgagccaccgcgcctggccgctttcgatattttctaaactttaattcaaaagcactttgtgctgtgttctatataaaaaacataataaaaattgaaatgaaagaataattgttattataaaagtactagcttacttttgtatggattcagaatatactaaattaactttttaaaacacaacttttaaaaaatgtatcaaaataataaacgtgttctgatatttttaaaataa

SEQ ID NO: 12708 - DNA, 7469 bp, Artificial Sequence
  derived and/or modified sequence
acactctgggcgcggagcacaatgattggtcactcctattttcgctgagcttttcctcttatttcagttttcttcgagatcaaatctggtttgtagatgtgcttggggagaatgggggcctcttctccaagaagcccggagcctgtcgggccgccggcgcccggtctccccttctgctgcggaggatccctgctggcggttgtggtgctgcttgcgctgccggtggcctggggtcaatgcaatgccccagaatggcttccatttgccaggcctaccaacctaactgatgaatttgagtttcccattgggacatatctgaactatgaatgccgccctggttattccggaagaccgttttctatcatctgcctaaaaaactcagtctggactggtgctaaggacaggtgcagacgtaaatcatgtcgtaatcctccagatcctgtgaatggcatggtgcatgtgatcaaaggcatccagttcggatcccaaattaaatattcttgtactaaaggataccgactcattggttcctcgtctgccacatgcatcatctcaggtgatactgtcatttgggataatgaaacacctatttgtgacagaattccttgtgggctaccccccaccatcaccaatggagatttcattagcaccaacagagagaattttcactatggatcagtggtgacctaccgctgcaatcctggaagcggagggagaaaggtgtttgagcttgtgggtgagccctccatatactgcaccagcaatgacgatcaagtgggcatctggagcggccccgcccctcagtgcattatacctaacaaatgcacgcctccaaatgtggaaaatggaatattggtatctgacaacagaagcttattttccttaaatgaagttgtggagtttaggtgtcagcctggctttgtcatgaaaggaccccgccgtgtgaagtgccaggccctgaacaaatgggagccggagctaccaagctgctccagggtatgtcagccacctccagatgtcctgcatgctgagcgtacccaaagggacaaggacaacttttcacctgggcaggaagtgttctacagctgtgagcccggctacgacctcagaggggctgcgtctatgcgctgcacaccccagggagactggagccctgcagcccccacatgtgaagtgaaatcctgtgatgacttcatgggccaacttcttaatggccgtgtgctatttccagtaaatctccagcttggagcaaaagtggattttgtttgtgatgaaggatttcaattaaaaggcagctctgctagttactgtgtcttggctggaatggaaagcctttggaatagcagtgttccagtgtgtgaacaaatcttttgtccaagtcctccagttattcctaatgggagacacacaggaaaacctctggaagtctttccctttgggaaaacagtaaattacacatgcgacccccacccagacagagggacgagcttcgacctcattggagagagcaccatccgctgcacaagtgaccctcaagggaatggggtttggagcagccctgcccctcgctgtggaattctgggtcactgtcaagccccagatcattttctgtttgccaagttgaaaacccaaaccaatgcatctgactttcccattgggacatctttaaagtacgaatgccgtcctgagtactacgggaggccattctctatcacatgtctagataacctggtctggtcaagtcccaaagatgtctgtaaacgtaaatcatgtaaaactcctccagatccagtgaatggcatggtgcatgtgatcacagacatccaggttggatccagaatcaactattcttgtactacagggcaccgactcattggtcactcatctgctgaatgtatcctctcgggcaatgctgcccattggagcacgaagccgccaatttgtcaacgaattccttgtgggctaccccccaccatcgccaatggagatttcattagcaccaacagagagaattttcactatggatcagtggtgacctaccgctgcaatcctggaagcggagggagaaaggtgtttgagcttgtgggtgagccctccatatactgcaccagcaatgacgatcaagtgggcatctggagcggcccggcccctcagtgcattatacctaacaaatgcacgcctccaaatgtggaaaatggaatattggtatctgacaacagaagcttattttccttaaatgaagttgtggagtttaggtgtcagcctggctttgtcatgaaaggaccccgccgtgtgaagtgccaggccctgaacaaatgggagccggagctaccaagctgctccagggtatgtcagccacctccagatgtcctgcatgctgagcgtacccaaagggacaaggacaacttttcacccgggcaggaagtgttctacagctgtgagcccggctatgacctcagaggggctgcgtctatgcgctgcacaccccagggagactggagccctgcagcccccacatgtgaagtgaaatcctgtgatgacttcatgggccaacttcttaatggccgtgtgctatttccagtaaatctccagcttggagcaaaagtggattttgtttgtgatgaaggatttcaattaaaaggcagctctgctagttattgtgtcttggctggaatggaaagcctttggaatagcagtgttccagtgtgtgaacaaatcttttgtccaagtcctccagttattcctaatgggagacacacaggaaaacctctggaagtctttccctttggaaaagcagtaaattacacatgcgacccccacccagacagagggacgagcttcgacctcattggagagagcaccatccgctgcacaagtgaccctcaagggaatggggtttggagcagccctgcccctcgctgtggaattctgggtcactgtcaagccccagatcattttctgtttgccaagttgaaaacccaaaccaatgcatctgactttcccattgggacatctttaaagtacgaatgccgtcctgagtactacgggaggccattctctatcacatgtctagataacctggtctggtcaagtcccaaagatgtctgtaaacgtaaatcatgtaaaactcctccagatccagtgaatggcatggtgcatgtgatcacagacatccaggttggatccagaatcaactattcttgtactacagggcaccgactcattggtcactcatctgctgaatgtatcctctcaggcaatactgcccattggagcacgaagccgccaatttgtcaacgaattccttgtgggctacccccaaccatcgccaatggagatttcattagcaccaacagagagaattttcactatggatcagtggtgacctaccgctgcaatcttggaagcagagggagaaaggtgtttgagcttgtgggtgagccctccatatactgcaccagcaatgacgatcaagtgggcatctggagcggccccgcccctcagtgcattatacctaacaaatgcacgcctccaaatgtggaaaatggaatattggtatctgacaacagaagcttattttccttaaatgaagttgtggagtttaggtgtcagcctggctttgtcatgaaaggaccccgccgtgtgaagtgccaggccctgaacaaatgggagccagagttaccaagctgctccagggtgtgtcagccgcctccagaaatcctgcatggtgagcataccccaagccatcaggacaacttttcacctgggcaggaagtgttctacagctgtgagcctggctatgacctcagaggggctgcgtctctgcactgcacaccccagggagactggagccctgaagccccgagatgtgcagtgaaatcctgtgatgacttcttgggtcaactccctcatggccgtgtgctatttccacttaatctccagcttggggcaaaggtgtcctttgtctgtgatgaagggtttcgcttaaagggcagttccgttagtcattgtgtcttggttggaatgagaagcctttggaataacagtgttcctgtgtgtgaacatatcttttgtccaaatcctccagctatccttaatgggagacacacaggaactccctctggagatattccctatggaaaagaaatatcttacacatgtgacccccacccagacagagggatgaccttcaacctcattggggagagcaccatccgctgcacaagtgaccctcatgggaatggggtttggagcagccctgcccctcgctgtgaactttctgttcgtgctggtcactgtaaaaccccagagcagtttccatttgccagtcctacgatcccaattaatgactttgagtttccagtcgggacatctttgaattatgaatgccgtcctgggtattttgggaaaatgttctctatctcctgcctagaaaacttggtctggtcaagtgttgaagacaactgtagacgaaaatcatgtggacctccaccagaacccttcaatggaatggtgcatataaacacagatacacagtttggatcaacagttaattattcttgtaatgaagggtttcgactcattggttccccatctactacttgtctcgtctcaggcaataatgtcacatgggataagaaggcacctatttgtgagatcatatcttgtgagccacctccaaccatatccaatggagacttctacagcaacaatagaacatcttttcacaatggaacggtggtaacttaccagtgccacactggaccagatggagaacagctgtttgagcttgtgggagaacggtcaatatattgcaccagcaaagatgatcaagttggtgtttggagcagccctccccctcggtgtatttctactaataaatgcacagctccagaagttgaaaatgcaattagagtaccaggaaacaggagtttctttaccctcactgagatcatcagatttagatgtcagcccgggtttgtcatggtagggtcccacactgtgcagtgccagaccaatggcagatgggggcccaagctgccacactgctccagggtgtgtcagccgcctccagaaatcctgcatggtgagcataccctaagccatcaggacaacttttcacctgggcaggaagtgttctacagctgtgagcccagctatgacctcagaggggctgcgtctctgcactgcacgccccagggagactggagccctgaagcccctagatgtacagtgaaatcctgtgatgacttcctgggccaactccctcatggccgtgtgctacttccacttaatctccagcttggggcaaaggtgtcctttgtttgcgatgaagggttccgattaaaaggcaggtctgctagtcattgtgtcttggctggaatgaaagccctttggaatagcagtgttccagtgtgtgaacaaatcttttgtccaaatcctccagctatccttaatgggagacacacaggaactccctttggagatattccctatggaaaagaaatatcttacgcatgcgacacccacccagacagagggatgaccttcaacctcattggggagagctccatccgctgcacaagtgaccctcaagggaatggggtttggagcagccctgcccctcgctgtgaactttctgttcctgctgcctgcccacatccacccaagatccaaaacgggcattacattggaggacacgtatctctatatcttcctgggatgacaatcagctacatttgtgaccccggctacctgttagtgggaaagggcttcattttctgtacagaccagggaatctggagccaattggatcattattgcaaagaagtaaattgtagcttcccactgtttatgaatggaatctcgaaggagttagaaatgaaaaaagtatatcactatggagattatgtgactttgaagtgtgaagatgggtatactctggaaggcagtccctggagccagtgccaggcggatgacagatgggaccctcctctggccaaatgtacctctcgtacacatgatgctctcatagttggcactttatctggtacgatcttctttattttactcatcattttcctctcttggataattctaaagcacagaaaaggcaataatgcacatgaaaaccctaaagaagtggctatccatttacattctcaaggaggcagcagcgttcatccccgaactctgcaaacaaatgaagaaaatagcagggtccttccttgacaaagtactatacagctgaagaacatctcgaatacaattttggtgggaaaggagccaattgatttcaacagaatcagatctgagcttcataaagtctttgaagtgacttcacagagacgcagacatgtgcacttgaagatgctgccccttccctggtacctagcaaagctcctgcctctttgtgtgcgtcactgtgaaacccccacccttctgcctcgtgctaaacgcacacagtatctagtcaggggaaaagactgcatttaggagatagaaaatagtttggattacttaaaggaataaggtgttgcctggaatttctggtttgtaaggtggtcactgttcttttttaaaatatttgtaatatggaatgggctcagtaagaagagcttggaaaatgcagaaagttatgaaaaataagtcacttataattatgctacctactgataaccactcctaatattttgattcattttctgcctatcttctttcacatatgtgtttttttacatacgtacttttcccccttagtttgtttccttttattttatagagcagaaccctagtcttttaaacagtttagagtgaaatatatgctatatcagtttttactttctctagggagaaaaattaatttactagaaaggcatgaaatgatcatgggaagagtggttaagactactgaagagaaatatttggaaaataagatttcgatatcttctttttttttgagatggagtctggctctgtctcccaggctggagtgcagtggcgtaatctcggctcactgcaagctccgcctcccgggttgacaccattttcctgcctcagcctcctgagtagttgggattaccagtagatgggactacaggcacctgccaacacgcccggctaatttttttgtatttttagtagagacggggtttcaccatgttagccaggatggtctggatctcctgacctcgtgatccacctgcctcggcctcccaaagtgctgcgattacaggcatgagccaccgcgcctggccgctttcgatattttctaaactttaattcaaaagcactttgtgctgtgttctatataaaaaacataataaaaattgaaatgaaagaataattgttattataaaagtactagcttacttttgtatggattcagaatatactaaattaactttttaaaacacaacttttaaaaaatgtatcaaaataataaacgtgttctgatatttttaaaataa

SEQ ID NO: 12709 - DNA, 6959 bp, Artificial Sequence
  derived and/or modified sequence
cttcgagatcaaatctggtttgtagatgtgcttggggagaatgggggcctcttctccaagaagcccggagcctgtcgggccgccggcgcccggtctccccttctgctgcggaggatccctgctggcggttgtggtgctgcttgcgctgccggtggcctggggtcaatgcaatgccccagaatggcttccatttgccaggcctaccaacctaactgatgaatttgagtttcccattgggacatatctgaactatgaatgccgccctggttattccggaagaccgttttctatcatctgcctaaaaaactcagtctggactggtgctaaggacaggtgcagacgtaaatcatgtcgtaatcctccagatcctgtgaatggcatggtgcatgtgatcaaaggcatccagttcggatcccaaattaaatattcttgtactaaaggataccgactcattggttcctcgtctgccacatgcatcatctcaggtgatactgtcatttgggataatgaaacacctatttgtgacagaattccttgtgggctaccccccaccatcaccaatggagatttcattagcaccaacagagagaattttcactatggatcagtggtgacctaccgctgcaatcctggaagcggagggagaaaggtgtttgagcttgtgggtgagccctccatatactgcaccagcaatgacgatcaagtgggcatctggagcggccccgcccctcagtgcattatacctaacaaatgcacgcctccaaatgtggaaaatggaatattggtatctgacaacagaagcttattttccttaaatgaagttgtggagtttaggtgtcagcctggctttgtcatgaaaggaccccgccgtgtgaagtgccaggccctgaacaaatgggagccggagctaccaagctgctccagggtatgtcagccacctccagatgtcctgcatgctgagcgtacccaaagggacaaggacaacttttcacctgggcaggaagtgttctacagctgtgagcccggctacgacctcagaggggctgcgtctatgcgctgcacaccccagggagactggagccctgcagcccccacatgtgaagtgaaatcctgtgatgacttcatgggccaacttcttaatggccgtgtgctatttccagtaaatctccagcttggagcaaaagtggattttgtttgtgatgaaggatttcaattaaaaggcagctctgctagttactgtgtcttggctggaatggaaagcctttggaatagcagtgttccagtgtgtgaacaaatcttttgtccaagtcctccagttattcctaatgggagacacacaggaaaacctctggaagtctttccctttgggaaaacagtaaattacacatgcgacccccacccagacagagggacgagcttcgacctcattggagagagcaccatccgctgcacaagtgaccctcaagggaatggggtttggagcagccctgcccctcgctgtggaattctgggtcactgtcaagccccagatcattttctgtttgccaagttgaaaacccaaaccaatgcatctgactttcccattgggacatctttaaagtacgaatgccgtcctgagtactacgggaggccattctctatcacatgtctagataacctggtctggtcaagtcccaaagatgtctgtaaacgtaaatcatgtaaaactcctccagatccagtgaatggcatggtgcatgtgatcacagacatccaggttggatccagaatcaactattcttgtactacagggcaccgactcattggtcactcatctgctgaatgtatcctctcgggcaatgctgcccattggagcacgaagccgccaatttgtcaacgaattccttgtgggctaccccccaccatcgccaatggagatttcattagcaccaacagagagaattttcactatggatcagtggtgacctaccgctgcaatcctggaagcggagggagaaaggtgtttgagcttgtgggtgagccctccatatactgcaccagcaatgacgatcaagtgggcatctggagcggcccggcccctcagtgcattatacctaacaaatgcacgcctccaaatgtggaaaatggaatattggtatctgacaacagaagcttattttccttaaatgaagttgtggagtttaggtgtcagcctggctttgtcatgaaaggaccccgccgtgtgaagtgccaggccctgaacaaatgggagccggagctaccaagctgctccagggtatgtcagccacctccagatgtcctgcatgctgagcgtacccaaagggacaaggacaacttttcacccgggcaggaagtgttctacagctgtgagcccggctatgacctcagaggggctgcgtctatgcgctgcacaccccagggagactggagccctgcagcccccacatgtgaagtgaaatcctgtgatgacttcatgggccaacttcttaatggccgtgtgctatttccagtaaatctccagcttggagcaaaagtggattttgtttgtgatgaaggatttcaattaaaaggcagctctgctagttattgtgtcttggctggaatggaaagcctttggaatagcagtgttccagtgtgtgaacaaatcttttgtccaagtcctccagttattcctaatgggagacacacaggaaaacctctggaagtctttccctttggaaaagcagtaaattacacatgcgacccccacccagacagagggacgagcttcgacctcattggagagagcaccatccgctgcacaagtgaccctcaagggaatggggtttggagcagccctgcccctcgctgtggaattctgggtcactgtcaagccccagatcattttctgtttgccaagttgaaaacccaaaccaatgcatctgactttcccattgggacatctttaaagtacgaatgccgtcctgagtactacgggaggccattctctatcacatgtctagataacctggtctggtcaagtcccaaagatgtctgtaaacgtaaatcatgtaaaactcctccagatccagtgaatggcatggtgcatgtgatcacagacatccaggttggatccagaatcaactattcttgtactacagggcaccgactcattggtcactcatctgctgaatgtatcctctcaggcaatactgcccattggagcacgaagccgccaatttgtcaacgaattccttgtgggctacccccaaccatcgccaatggagatttcattagcaccaacagagagaattttcactatggatcagtggtgacctaccgctgcaatcttggaagcagagggagaaaggtgtttgagcttgtgggtgagccctccatatactgcaccagcaatgacgatcaagtgggcatctggagcggccccgcccctcagtgcattatacctaacaaatgcacgcctccaaatgtggaaaatggaatattggtatctgacaacagaagcttattttccttaaatgaagttgtggagtttaggtgtcagcctggctttgtcatgaaaggaccccgccgtgtgaagtgccaggccctgaacaaatgggagccagagttaccaagctgctccagggtgtgtcagccgcctccagaaatcctgcatggtgagcataccccaagccatcaggacaacttttcacctgggcaggaagtgttctacagctgtgagcctggctatgacctcagaggggctgcgtctctgcactgcacaccccagggagactggagccctgaagccccgagatgtgcagtgaaatcctgtgatgacttcttgggtcaactccctcatggccgtgtgctatttccacttaatctccagcttggggcaaaggtgtcctttgtctgtgatgaagggtttcgcttaaagggcagttccgttagtcattgtgtcttggttggaatgagaagcctttggaataacagtgttcctgtgtgtgaacatatcttttgtccaaatcctccagctatccttaatgggagacacacaggaactccctctggagatattccctatggaaaagaaatatcttacacatgtgacccccacccagacagagggatgaccttcaacctcattggggagagcaccatccgctgcacaagtgaccctcatgggaatggggtttggagcagccctgcccctcgctgtgaactttctgttcgtgctggtcactgtaaaaccccagagcagtttccatttgccagtcctacgatcccaattaatgactttgagtttccagtcgggacatctttgaattatgaatgccgtcctgggtattttgggaaaatgttctctatctcctgcctagaaaacttggtctggtcaagtgttgaagacaactgtagacgaaaatcatgtggacctccaccagaacccttcaatggaatggtgcatataaacacagatacacagtttggatcaacagttaattattcttgtaatgaagggtttcgactcattggttccccatctactacttgtctcgtctcaggcaataatgtcacatgggataagaaggcacctatttgtgagatcatatcttgtgagccacctccaaccatatccaatggagacttctacagcaacaatagaacatcttttcacaatggaacggtggtaacttaccagtgccacactggaccagatggagaacagctgtttgagcttgtgggagaacggtcaatatattgcaccagcaaagatgatcaagttggtgtttggagcagccctccccctcggtgtatttctactaataaatgcacagctccagaagttgaaaatgcaattagagtaccaggaaacaggagtttctttaccctcactgagatcatcagatttagatgtcagcccgggtttgtcatggtagggtcccacactgtgcagtgccagaccaatggcagatgggggcccaagctgccacactgctccagggtgtgtcagccgcctccagaaatcctgcatggtgagcataccctaagccatcaggacaacttttcacctgggcaggaagtgttctacagctgtgagcccagctatgacctcagaggggctgcgtctctgcactgcacgccccagggagactggagccctgaagcccctagatgtacagtgaaatcctgtgatgacttcctgggccaactccctcatggccgtgtgctacttccacttaatctccagcttggggcaaaggtgtcctttgtttgcgatgaagggttccgattaaaaggcaggtctgctagtcattgtgtcttggctggaatgaaagccctttggaatagcagtgttccagtgtgtgaacaaatcttttgtccaaatcctccagctatccttaatgggagacacacaggaactccctttggagatattccctatggaaaagaaatatcttacgcatgcgacacccacccagacagagggatgaccttcaacctcattggggagagctccatccgctgcacaagtgaccctcaagggaatggggtttggagcagccctgcccctcgctgtgaactttctgttcctgctgcctgcccacatccacccaagatccaaaacgggcattacattggaggacacgtatctctatatcttcctgggatgacaatcagctacatttgtgaccccggctacctgttagtgggaaagggcttcattttctgtacagaccagggaatctggagccaattggatcattattgcaaagaagtaaattgtagcttcccactgtttatgaatggaatctcgaaggagttagaaatgaaaaaagtatatcactatggagattatgtgactttgaagtgtgaagatgggtatactctggaaggcagtccctggagccagtgccaggcggatgacagatgggaccctcctctggccaaatgtacctctcgtacacatgatgctctcatagttggcactttatctggtacgatcttctttattttactcatcattttcctctcttggataattctaaagcacagaaaaggcaataatgcacatgaaaaccctaaagaagtggctatccatttacattctcaaggaggcagcagcgttcatccccgaactctgcaaacaaatgaagaaaatagcagggtccttccttgacaaagtactatacagctgaagaacatctcgaatacaattttggtgggaaaggagccaattgatttcaacagaatcagatctgagcttcataaagtctttgaagtgacttcacagagacgcagacatgtgcacttgaagatgctgccccttccctggtacctagcaaagctcctgcctctttgtgtgcgtcactgtgaaacccccacccttctgcctcgtgctaaacgcacacagtatctagtcaggggaaaagactgcatttaggagatagaaaatagtttggattacttaaaggaataaggtgttgcctggaatttctggtttgtaaggtggtcactgttcttttttaaaatatttgtaatatggaatgggctcagtaagaagagcttggaaaatgcagaaagttatgaaaaataagtcacttataattatgctacctactgataaccactcctaatattttgattcattttctgcctatcttctttcacatatgtgtttttttacatacgtacttttcccccttagtttgtttccttttattttatagagcagaaccctagtcttttaaacagtttagagtgaaatatatgctatatcagtttttactttctctagggagaaaaattaatttactagaaaggcatgaaatgatcatgggaagagtggttaagactactgaagagaaatatttggaaaataagatttcgatatcttctttttttttgagatggagtctggctctgtctcccaggctggagtgcagtggcgtaatctcggctcactgcaagctccgcct

SEQ ID NO: 12710 - DNA, 6120 bp, Artificial Sequence
  derived and/or modified sequence
atgggcgccagcagccccagaagccccgagcccgtgggcccccccgcccccggcctgcccttctgctgcggcggcagcctgctggccgtggtggtgctgctggccctgcccgtggcctggggccagtgcaacgcccccgagtggctgcccttcgccagacccaccaacctgaccgacgagttcgagttccccatcggcacctacctgaactacgagtgcagacccggctacagcggcagacccttcagcatcatctgcctgaagaacagcgtgtggaccggcgccaaggacagatgcagaagaaagagctgcagaaacccccccgaccccgtgaacggcatggtgcacgtgatcaagggcatccagttcggcagccagatcaagtacagctgcaccaagggctacagactgatcggcagcagcagcgccacctgcatcatcagcggcgacaccgtgatctgggacaacgagacccccatctgcgacagaatcccctgcggcctgccccccaccatcgccaacggcgacttcatcagcaccaacagagagaacttccactacggcagcgtggtgacctacagatgcaaccccggcagcggcggcagaaaggtgttcgagctggtgggcgagcccagcatctactgcaccagcaacgacgaccaggtgggcatctggagcggccccgccccccagtgcatcatccccaacaagtgcaccccccccaacgtggagaacggcatcctggtgagcgacaacagaagcctgttcagcctgaacgaggtggtggagttcagatgccagcccggcttcgtgatgaagggccccagaagagtgaagtgccaggccctgaacaagtgggagcccgagctgcccagctgcagcagagtgtgccagcccccccccgacgtgctgcacgccgagagaacccagagagacaaggacaacttcagccccggccaggaggtgttctacagctgcgagcccggctacgacctgagaggcgccgccagcatgagatgcaccccccagggcgactggagccccgccgcccccacctgcgaggtgaagagctgcgacgacttcatgggccagctgctgaacggcagagtgctgttccccgtgaacctgcagctgggcgccaaggtggacttcgtgtgcgacgagggcttccagctgaagggcagcagcgccagctactgcgtgctggccggcatggagagcctgtggaacagcagcgtgcccgtgtgcgagcagatcttctgccccagcccccccgtgatccccaacggcagacacaccggcaagcccctggaggtgttccccttcggcaagaccgtgaactacacctgcgacccccaccccgacagaggcaccagcttcgacctgatcggcgagagcaccatcagatgcaccagcgacccccagggcaacggcgtgtggagcagccccgcccccagatgcggcatcctgggccactgccaggcccccgaccacttcctgttcgccaagctgaagacccagaccaacgccagcgacttccccatcggcaccagcctgaagtacgagtgcagacccgagtactacggcagacccttcagcatcacctgcctggacaacctggtgtggagcagccccaaggacgtgtgcaagagaaagagctgcaagaccccccccgaccccgtgaacggcatggtgcacgtgatcaccgacatccaggtgggcagcagaatcaactacagctgcaccaccggccacagactgatcggccacagcagcgccgagtgcatcctgagcggcaacgccgcccactggagcaccaagccccccatctgccagagaatcccctgcggcctgccccccaccatcgccaacggcgacttcatcagcaccaacagagagaacttccactacggcagcgtggtgacctacagatgcaaccccggcagcggcggcagaaaggtgttcgagctggtgggcgagcccagcatctactgcaccagcaacgacgaccaggtgggcatctggagcggccccgccccccagtgcatcatccccaacaagtgcaccccccccaacgtggagaacggcatcctggtgagcgacaacagaagcctgttcagcctgaacgaggtggtggagttcagatgccagcccggcttcgtgatgaagggccccagaagagtgaagtgccaggccctgaacaagtgggagcccgagctgcccagctgcagcagagtgtgccagcccccccccgacgtgctgcacgccgagagaacccagagagacaaggacaacttcagccccggccaggaggtgttctacagctgcgagcccggctacgacctgagaggcgccgccagcatgagatgcaccccccagggcgactggagccccgccgcccccacctgcgaggtgaagagctgcgacgacttcatgggccagctgctgaacggcagagtgctgttccccgtgaacctgcagctgggcgccaaggtggacttcgtgtgcgacgagggcttccagctgaagggcagcagcgccagctactgcgtgctggccggcatggagagcctgtggaacagcagcgtgcccgtgtgcgagcagatcttctgccccagcccccccgtgatccccaacggcagacacaccggcaagcccctggaggtgttccccttcggcaaggccgtgaactacacctgcgacccccaccccgacagaggcaccagcttcgacctgatcggcgagagcaccatcagatgcaccagcgacccccagggcaacggcgtgtggagcagccccgcccccagatgcggcatcctgggccactgccaggcccccgaccacttcctgttcgccaagctgaagacccagaccaacgccagcgacttccccatcggcaccagcctgaagtacgagtgcagacccgagtactacggcagacccttcagcatcacctgcctggacaacctggtgtggagcagccccaaggacgtgtgcaagagaaagagctgcaagaccccccccgaccccgtgaacggcatggtgcacgtgatcaccgacatccaggtgggcagcagaatcaactacagctgcaccaccggccacagactgatcggccacagcagcgccgagtgcatcctgagcggcaacaccgcccactggagcaccaagccccccatctgccagagaatcccctgcggcctgccccccaccatcgccaacggcgacttcatcagcaccaacagagagaacttccactacggcagcgtggtgacctacagatgcaacctgggcagcagaggcagaaaggtgttcgagctggtgggcgagcccagcatctactgcaccagcaacgacgaccaggtgggcatctggagcggccccgccccccagtgcatcatccccaacaagtgcaccccccccaacgtggagaacggcatcctggtgagcgacaacagaagcctgttcagcctgaacgaggtggtggagttcagatgccagcccggcttcgtgatgaagggccccagaagagtgaagtgccaggccctgaacaagtgggagcccgagctgcccagctgcagcagagtgtgccagcccccccccgagatcctgcacggcgagcacacccccagccaccaggacaacttcagccccggccaggaggtgttctacagctgcgagcccggctacgacctgagaggcgccgccagcctgcactgcaccccccagggcgactggagccccgaggcccccagatgcgccgtgaagagctgcgacgacttcctgggccagctgccccacggcagagtgctgttccccctgaacctgcagctgggcgccaaggtgagcttcgtgtgcgacgagggcttcagactgaagggcagcagcgtgagccactgcgtgctggtgggcatgagaagcctgtggaacaacagcgtgcccgtgtgcgagcacatcttctgccccaacccccccgccatcctgaacggcagacacaccggcacccccagcggcgacatcccctacggcaaggagatcagctacacctgcgacccccaccccgacagaggcatgaccttcaacctgatcggcgagagcaccatcagatgcaccagcgacccccacggcaacggcgtgtggagcagccccgcccccagatgcgagctgagcgtgagagccggccactgcaagacccccgagcagttccccttcgccagccccaccatccccatcaacgacttcgagttccccgtgggcaccagcctgaactacgagtgcagacccggctacttcggcaagatgttcagcatcagctgcctggagaacctggtgtggagcagcgtggaggacaactgcagaagaaagagctgcggccccccccccgagcccttcaacggcatggtgcacatcaacaccgacacccagttcggcagcaccgtgaactacagctgcaacgagggcttcagactgatcggcagccccagcaccacctgcctggtgagcggcaacaacgtgacctgggacaagaaggcccccatctgcgagatcatcagctgcgagcccccccccaccatcagcaacggcgacttctacagcaacaacagaaccagcttccacaacggcaccgtggtgacctaccagtgccacaccggccccgacggcgagcagctgttcgagctggtgggcgagagaagcatctactgcaccagcaaggacgaccaggtgggcgtgtggagcagccccccccccagatgcatcagcaccaacaagtgcaccgcccccgaggtggagaacgccatcagagtgcccggcaacagaagcttcttcaccctgaccgagatcatcagattcagatgccagcccggcttcgtgatggtgggcagccacaccgtgcagtgccagaccaacggcagatggggccccaagctgccccactgcagcagagtgtgccagcccccccccgagatcctgcacggcgagcacaccctgagccaccaggacaacttcagccccggccaggaggtgttctacagctgcgagcccagctacgacctgagaggcgccgccagcctgcactgcaccccccagggcgactggagccccgaggcccccagatgcaccgtgaagagctgcgacgacttcctgggccagctgccccacggcagagtgctgctgcccctgaacctgcagctgggcgccaaggtgagcttcgtgtgcgacgagggcttcagactgaagggcagaagcgccagccactgcgtgctggccggcatgaaggccctgtggaacagcagcgtgcccgtgtgcgagcagatcttctgccccaacccccccgccatcctgaacggcagacacaccggcacccccttcggcgacatcccctacggcaaggagatcagctacgcctgcgacacccaccccgacagaggcatgaccttcaacctgatcggcgagagcagcatcagatgcaccagcgacccccagggcaacggcgtgtggagcagccccgcccccagatgcgagctgagcgtgcccgccgcctgcccccacccccccaagatccagaacggccactacatcggcggccacgtgagcctgtacctgcccggcatgaccatcagctacatctgcgaccccggctacctgctggtgggcaagggcttcatcttctgcaccgaccagggcatctggagccagctggaccactactgcaaggaggtgaactgcagcttccccctgttcatgaacggcatcagcaaggagctggagatgaagaaggtgtaccactacggcgactacgtgaccctgaagtgcgaggacggctacaccctggagggcagcccctggagccagtgccaggccgacgacagatgggacccccccctggccaagtgcaccagcagaacccacgacgccctgatcgtgggcaccctgagcggcaccatcttcttcatcctgctgatcatcttcctgagctggatcatcctgaagcacagaaagggcaacaacgcccacgagaaccccaaggaggtggccatccacctgcacagccagggcggcagcagcgtgcaccccagaaccctgcagaccaacgaggagaacagcagagtgctgccctag

SEQ ID NO: 12711 - DNA, 6120 bp, Artificial Sequence
  derived and/or modified sequence
atgggcgccagcagccccagaagccccgagcccgtgggcccccccgcccccggcctgcccttctgctgcggcggcagcctgctggccgtggtggtgctgctggccctgcccgtggcctggggccagtgcaacgcccccgagtggctgcccttcgccagacccaccaacctgaccgacgagttcgagttccccatcggcacctacctgaactacgagtgcagacccggctacagcggcagacccttcagcatcatctgcctgaagaacagcgtgtggaccggcgccaaggacagatgcagaagaaagagctgcagaaacccccccgaccccgtgaacggcatggtgcacgtgatcaagggcatccagttcggcagccagatcaagtacagctgcaccaagggctacagactgatcggcagcagcagcgccacctgcatcatcagcggcgacaccgtgatctgggacaacgagacccccatctgcgacagaatcccctgcggcctgccccccaccatcaccaacggcgacttcatcagcaccaacagagagaacttccactacggcagcgtggtgacctacagatgcaaccccggcagcggcggcagaaaggtgttcgagctggtgggcgagcccagcatctactgcaccagcaacgacgaccaggtgggcatctggagcggccccgccccccagtgcatcatccccaacaagtgcaccccccccaacgtggagaacggcatcctggtgagcgacaacagaagcctgttcagcctgaacgaggtggtggagttcagatgccagcccggcttcgtgatgaagggccccagaagagtgaagtgccaggccctgaacaagtgggagcccgagctgcccagctgcagcagagtgtgccagcccccccccgacgtgctgcacgccgagagaacccagagagacaaggacaacttcagccccggccaggaggtgttctacagctgcgagcccggctacgacctgagaggcgccgccagcatgagatgcaccccccagggcgactggagccccgccgcccccacctgcgaggtgaagagctgcgacgacttcatgggccagctgctgaacggcagagtgctgttccccgtgaacctgcagctgggcgccaaggtggacttcgtgtgcgacgagggcttccagctgaagggcagcagcgccagctactgcgtgctggccggcatggagagcctgtggaacagcagcgtgcccgtgtgcgagcagatcttctgccccagcccccccgtgatccccaacggcagacacaccggcaagcccctggaggtgttccccttcggcaagaccgtgaactacacctgcgacccccaccccgacagaggcaccagcttcgacctgatcggcgagagcaccatcagatgcaccagcgacccccagggcaacggcgtgtggagcagccccgcccccagatgcggcatcctgggccactgccaggcccccgaccacttcctgttcgccaagctgaagacccagaccaacgccagcgacttccccatcggcaccagcctgaagtacgagtgcagacccgagtactacggcagacccttcagcatcacctgcctggacaacctggtgtggagcagccccaaggacgtgtgcaagagaaagagctgcaagaccccccccgaccccgtgaacggcatggtgcacgtgatcaccgacatccaggtgggcagcagaatcaactacagctgcaccaccggccacagactgatcggccacagcagcgccgagtgcatcctgagcggcaacgccgcccactggagcaccaagccccccatctgccagagaatcccctgcggcctgccccccaccatcgccaacggcgacttcatcagcaccaacagagagaacttccactacggcagcgtggtgacctacagatgcaaccccggcagcggcggcagaaaggtgttcgagctggtgggcgagcccagcatctactgcaccagcaacgacgaccaggtgggcatctggagcggccccgccccccagtgcatcatccccaacaagtgcaccccccccaacgtggagaacggcatcctggtgagcgacaacagaagcctgttcagcctgaacgaggtggtggagttcagatgccagcccggcttcgtgatgaagggccccagaagagtgaagtgccaggccctgaacaagtgggagcccgagctgcccagctgcagcagagtgtgccagcccccccccgacgtgctgcacgccgagagaacccagagagacaaggacaacttcagccccggccaggaggtgttctacagctgcgagcccggctacgacctgagaggcgccgccagcatgagatgcaccccccagggcgactggagccccgccgcccccacctgcgaggtgaagagctgcgacgacttcatgggccagctgctgaacggcagagtgctgttccccgtgaacctgcagctgggcgccaaggtggacttcgtgtgcgacgagggcttccagctgaagggcagcagcgccagctactgcgtgctggccggcatggagagcctgtggaacagcagcgtgcccgtgtgcgagcagatcttctgccccagcccccccgtgatccccaacggcagacacaccggcaagcccctggaggtgttccccttcggcaagaccgtgaactacacctgcgacccccaccccgacagaggcaccagcttcgacctgatcggcgagagcaccatcagatgcaccagcgacccccagggcaacggcgtgtggagcagccccgcccccagatgcggcatcctgggccactgccaggcccccgaccacttcctgttcgccaagctgaagacccagaccaacgccagcgacttccccatcggcaccagcctgaagtacgagtgcagacccgagtactacggcagacccttcagcatcacctgcctggacaacctggtgtggagcagccccaaggacgtgtgcaagagaaagagctgcaagaccccccccgaccccgtgaacggcatggtgcacgtgatcaccgacatccaggtgggcagcagaatcaactacagctgcaccaccggccacagactgatcggccacagcagcgccgagtgcatcctgagcggcaacaccgcccactggagcaccaagccccccatctgccagagaatcccctgcggcctgccccccaccatcgccaacggcgacttcatcagcaccaacagagagaacttccactacggcagcgtggtgacctacagatgcaacctgggcagcagaggcagaaaggtgttcgagctggtgggcgagcccagcatctactgcaccagcaacgacgaccaggtgggcatctggagcggccccgccccccagtgcatcatccccaacaagtgcaccccccccaacgtggagaacggcatcctggtgagcgacaacagaagcctgttcagcctgaacgaggtggtggagttcagatgccagcccggcttcgtgatgaagggccccagaagagtgaagtgccaggccctgaacaagtgggagcccgagctgcccagctgcagcagagtgtgccagcccccccccgagatcctgcacggcgagcacacccccagccaccaggacaacttcagccccggccaggaggtgttctacagctgcgagcccggctacgacctgagaggcgccgccagcctgcactgcaccccccagggcgactggagccccgaggcccccagatgcgccgtgaagagctgcgacgacttcctgggccagctgccccacggcagagtgctgttccccctgaacctgcagctgggcgccaaggtgagcttcgtgtgcgacgagggcttcagactgaagggcagcagcgtgagccactgcgtgctggtgggcatgagaagcctgtggaacaacagcgtgcccgtgtgcgagcacatcttctgccccaacccccccgccatcctgaacggcagacacaccggcacccccagcggcgacatcccctacggcaaggagatcagctacacctgcgacccccaccccgacagaggcatgaccttcaacctgatcggcgagagcaccatcagatgcaccagcgacccccacggcaacggcgtgtggagcagccccgcccccagatgcgagctgagcgtgagagccggccactgcaagacccccgagcagttccccttcgccagccccaccatccccatcaacgacttcgagttccccgtgggcaccagcctgaactacgagtgcagacccggctacttcggcaagatgttcagcatcagctgcctggagaacctggtgtggagcagcgtggaggacaactgcagaagaaagagctgcggccccccccccgagcccttcaacggcatggtgcacatcaacaccgacacccagttcggcagcaccgtgaactacagctgcaacgagggcttcagactgatcggcagccccagcaccacctgcctggtgagcggcaacaacgtgacctgggacaagaaggcccccatctgcgagatcatcagctgcgagcccccccccaccatcagcaacggcgacttctacagcaacaacagaaccagcttccacaacggcaccgtggtgacctaccagtgccacaccggccccgacggcgagcagctgttcgagctggtgggcgagagaagcatctactgcaccagcaaggacgaccaggtgggcgtgtggagcagccccccccccagatgcatcagcaccaacaagtgcaccgcccccgaggtggagaacgccatcagagtgcccggcaacagaagcttcttcaccctgaccgagatcatcagattcagatgccagcccggcttcgtgatggtgggcagccacaccgtgcagtgccagaccaacggcagatggggccccaagctgccccactgcagcagagtgtgccagcccccccccgagatcctgcacggcgagcacaccctgagccaccaggacaacttcagccccggccaggaggtgttctacagctgcgagcccagctacgacctgagaggcgccgccagcctgcactgcaccccccagggcgactggagccccgaggcccccagatgcaccgtgaagagctgcgacgacttcctgggccagctgccccacggcagagtgctgctgcccctgaacctgcagctgggcgccaaggtgagcttcgtgtgcgacgagggcttcagactgaagggcagaagcgccagccactgcgtgctggccggcatgaaggccctgtggaacagcagcgtgcccgtgtgcgagcagatcttctgccccaacccccccgccatcctgaacggcagacacaccggcacccccttcggcgacatcccctacggcaaggagatcagctacgcctgcgacacccaccccgacagaggcatgaccttcaacctgatcggcgagagcagcatcagatgcaccagcgacccccagggcaacggcgtgtggagcagccccgcccccagatgcgagctgagcgtgcccgccgcctgcccccacccccccaagatccagaacggccactacatcggcggccacgtgagcctgtacctgcccggcatgaccatcagctacatctgcgaccccggctacctgctggtgggcaagggcttcatcttctgcaccgaccagggcatctggagccagctggaccactactgcaaggaggtgaactgcagcttccccctgttcatgaacggcatcagcaaggagctggagatgaagaaggtgtaccactacggcgactacgtgaccctgaagtgcgaggacggctacaccctggagggcagcccctggagccagtgccaggccgacgacagatgggacccccccctggccaagtgcaccagcagaacccacgacgccctgatcgtgggcaccctgagcggcaccatcttcttcatcctgctgatcatcttcctgagctggatcatcctgaagcacagaaagggcaacaacgcccacgagaaccccaaggaggtggccatccacctgcacagccagggcggcagcagcgtgcaccccagaaccctgcagaccaacgaggagaacagcagagtgctgccctag

SEQ ID NO: 12712 - DNA, 6120 bp, Artificial Sequence
  derived and/or modified sequence
atgggcgccagcagccccagaagccccgagcccgtgggcccccccgcccccggcctgcccttctgctgcggcggcagcctgctggccgtggtggtgctgctggccctgcccgtggcctggggccagtgcaacgcccccgagtggctgcccttcgccagacccaccaacctgaccgacgagttcgagttccccatcggcacctacctgaactacgagtgcagacccggctacagcggcagacccttcagcatcatctgcctgaagaacagcgtgtggaccggcgccaaggacagatgcagaagaaagagctgcagaaacccccccgaccccgtgaacggcatggtgcacgtgatcaagggcatccagttcggcagccagatcaagtacagctgcaccaagggctacagactgatcggcagcagcagcgccacctgcatcatcagcggcgacaccgtgatctgggacaacgagacccccatctgcgacagaatcccctgcggcctgccccccaccatcaccaacggcgacttcatcagcaccaacagagagaacttccactacggcagcgtggtgacctacagatgcaaccccggcagcggcggcagaaaggtgttcgagctggtgggcgagcccagcatctactgcaccagcaacgacgaccaggtgggcatctggagcggccccgccccccagtgcatcatccccaacaagtgcaccccccccaacgtggagaacggcatcctggtgagcgacaacagaagcctgttcagcctgaacgaggtggtggagttcagatgccagcccggcttcgtgatgaagggccccagaagagtgaagtgccaggccctgaacaagtgggagcccgagctgcccagctgcagcagagtgtgccagcccccccccgacgtgctgcacgccgagagaacccagagagacaaggacaacttcagccccggccaggaggtgttctacagctgcgagcccggctacgacctgagaggcgccgccagcatgagatgcaccccccagggcgactggagccccgccgcccccacctgcgaggtgaagagctgcgacgacttcatgggccagctgctgaacggcagagtgctgttccccgtgaacctgcagctgggcgccaaggtggacttcgtgtgcgacgagggcttccagctgaagggcagcagcgccagctactgcgtgctggccggcatggagagcctgtggaacagcagcgtgcccgtgtgcgagcagatcttctgccccagcccccccgtgatccccaacggcagacacaccggcaagcccctggaggtgttccccttcggcaagaccgtgaactacacctgcgacccccaccccgacagaggcaccagcttcgacctgatcggcgagagcaccatcagatgcaccagcgacccccagggcaacggcgtgtggagcagccccgcccccagatgcggcatcctgggccactgccaggcccccgaccacttcctgttcgccaagctgaagacccagaccaacgccagcgacttccccatcggcaccagcctgaagtacgagtgcagacccgagtactacggcagacccttcagcatcacctgcctggacaacctggtgtggagcagccccaaggacgtgtgcaagagaaagagctgcaagaccccccccgaccccgtgaacggcatggtgcacgtgatcaccgacatccaggtgggcagcagaatcaactacagctgcaccaccggccacagactgatcggccacagcagcgccgagtgcatcctgagcggcaacgccgcccactggagcaccaagccccccatctgccagagaatcccctgcggcctgccccccaccatcgccaacggcgacttcatcagcaccaacagagagaacttccactacggcagcgtggtgacctacagatgcaaccccggcagcggcggcagaaaggtgttcgagctggtgggcgagcccagcatctactgcaccagcaacgacgaccaggtgggcatctggagcggccccgccccccagtgcatcatccccaacaagtgcaccccccccaacgtggagaacggcatcctggtgagcgacaacagaagcctgttcagcctgaacgaggtggtggagttcagatgccagcccggcttcgtgatgaagggccccagaagagtgaagtgccaggccctgaacaagtgggagcccgagctgcccagctgcagcagagtgtgccagcccccccccgacgtgctgcacgccgagagaacccagagagacaaggacaacttcagccccggccaggaggtgttctacagctgcgagcccggctacgacctgagaggcgccgccagcatgagatgcaccccccagggcgactggagccccgccgcccccacctgcgaggtgaagagctgcgacgacttcatgggccagctgctgaacggcagagtgctgttccccgtgaacctgcagctgggcgccaaggtggacttcgtgtgcgacgagggcttccagctgaagggcagcagcgccagctactgcgtgctggccggcatggagagcctgtggaacagcagcgtgcccgtgtgcgagcagatcttctgccccagcccccccgtgatccccaacggcagacacaccggcaagcccctggaggtgttccccttcggcaaggccgtgaactacacctgcgacccccaccccgacagaggcaccagcttcgacctgatcggcgagagcaccatcagatgcaccagcgacccccagggcaacggcgtgtggagcagccccgcccccagatgcggcatcctgggccactgccaggcccccgaccacttcctgttcgccaagctgaagacccagaccaacgccagcgacttccccatcggcaccagcctgaagtacgagtgcagacccgagtactacggcagacccttcagcatcacctgcctggacaacctggtgtggagcagccccaaggacgtgtgcaagagaaagagctgcaagaccccccccgaccccgtgaacggcatggtgcacgtgatcaccgacatccaggtgggcagcagaatcaactacagctgcaccaccggccacagactgatcggccacagcagcgccgagtgcatcctgagcggcaacaccgcccactggagcaccaagccccccatctgccagagaatcccctgcggcctgccccccaccatcgccaacggcgacttcatcagcaccaacagagagaacttccactacggcagcgtggtgacctacagatgcaacctgggcagcagaggcagaaaggtgttcgagctggtgggcgagcccagcatctactgcaccagcaacgacgaccaggtgggcatctggagcggccccgccccccagtgcatcatccccaacaagtgcaccccccccaacgtggagaacggcatcctggtgagcgacaacagaagcctgttcagcctgaacgaggtggtggagttcagatgccagcccggcttcgtgatgaagggccccagaagagtgaagtgccaggccctgaacaagtgggagcccgagctgcccagctgcagcagagtgtgccagcccccccccgagatcctgcacggcgagcacacccccagccaccaggacaacttcagccccggccaggaggtgttctacagctgcgagcccggctacgacctgagaggcgccgccagcctgcactgcaccccccagggcgactggagccccgaggcccccagatgcgccgtgaagagctgcgacgacttcctgggccagctgccccacggcagagtgctgttccccctgaacctgcagctgggcgccaaggtgagcttcgtgtgcgacgagggcttcagactgaagggcagcagcgtgagccactgcgtgctggtgggcatgagaagcctgtggaacaacagcgtgcccgtgtgcgagcacatcttctgccccaacccccccgccatcctgaacggcagacacaccggcacccccagcggcgacatcccctacggcaaggagatcagctacacctgcgacccccaccccgacagaggcatgaccttcaacctgatcggcgagagcaccatcagatgcaccagcgacccccacggcaacggcgtgtggagcagccccgcccccagatgcgagctgagcgtgagagccggccactgcaagacccccgagcagttccccttcgccagccccaccatccccatcaacgacttcgagttccccgtgggcaccagcctgaactacgagtgcagacccggctacttcggcaagatgttcagcatcagctgcctggagaacctggtgtggagcagcgtggaggacaactgcagaagaaagagctgcggccccccccccgagcccttcaacggcatggtgcacatcaacaccgacacccagttcggcagcaccgtgaactacagctgcaacgagggcttcagactgatcggcagccccagcaccacctgcctggtgagcggcaacaacgtgacctgggacaagaaggcccccatctgcgagatcatcagctgcgagcccccccccaccatcagcaacggcgacttctacagcaacaacagaaccagcttccacaacggcaccgtggtgacctaccagtgccacaccggccccgacggcgagcagctgttcgagctggtgggcgagagaagcatctactgcaccagcaaggacgaccaggtgggcgtgtggagcagccccccccccagatgcatcagcaccaacaagtgcaccgcccccgaggtggagaacgccatcagagtgcccggcaacagaagcttcttcaccctgaccgagatcatcagattcagatgccagcccggcttcgtgatggtgggcagccacaccgtgcagtgccagaccaacggcagatggggccccaagctgccccactgcagcagagtgtgccagcccccccccgagatcctgcacggcgagcacaccctgagccaccaggacaacttcagccccggccaggaggtgttctacagctgcgagcccagctacgacctgagaggcgccgccagcctgcactgcaccccccagggcgactggagccccgaggcccccagatgcaccgtgaagagctgcgacgacttcctgggccagctgccccacggcagagtgctgctgcccctgaacctgcagctgggcgccaaggtgagcttcgtgtgcgacgagggcttcagactgaagggcagaagcgccagccactgcgtgctggccggcatgaaggccctgtggaacagcagcgtgcccgtgtgcgagcagatcttctgccccaacccccccgccatcctgaacggcagacacaccggcacccccttcggcgacatcccctacggcaaggagatcagctacgcctgcgacacccaccccgacagaggcatgaccttcaacctgatcggcgagagcagcatcagatgcaccagcgacccccagggcaacggcgtgtggagcagccccgcccccagatgcgagctgagcgtgcccgccgcctgcccccacccccccaagatccagaacggccactacatcggcggccacgtgagcctgtacctgcccggcatgaccatcagctacatctgcgaccccggctacctgctggtgggcaagggcttcatcttctgcaccgaccagggcatctggagccagctggaccactactgcaaggaggtgaactgcagcttccccctgttcatgaacggcatcagcaaggagctggagatgaagaaggtgtaccactacggcgactacgtgaccctgaagtgcgaggacggctacaccctggagggcagcccctggagccagtgccaggccgacgacagatgggacccccccctggccaagtgcaccagcagaacccacgacgccctgatcgtgggcaccctgagcggcaccatcttcttcatcctgctgatcatcttcctgagctggatcatcctgaagcacagaaagggcaacaacgcccacgagaaccccaaggaggtggccatccacctgcacagccagggcggcagcagcgtgcaccccagaaccctgcagaccaacgaggagaacagcagagtgctgccctag

SEQ ID NO: 12713 - protein, 381 aa, Artificial Sequence
  derived and/or modified sequence
MTVARPSVPAALPLLGELPRLLLLVLLCLPAVWGDCGLPPDVPNAQPALEGRTSFPEDTVITYKCEESFVKIPGEKDSVICLKGSQWSDIEEFCNRSCEVPTRLNSASLKQPYITQNYFPVGTVVEYECRPGYRREPSLSPKLTCLQNLKWSTAVEFCKKKSCPNPGEIRNGQIDVPGGILFGATISFSCNTGYKLFGSTSSFCLISGSSVQWSDPLPECREIYCPAPPQIDNGIIQGERDHYGYRQSVTYACNKGFTMIGEHSIYCTVNNDEGEWSGPPPECRGKSLTSKVPPTVQKPTTVNVPTTEVSPTSQKTTTKTTTPNAQATRSTPVSRTTKHFHETTPNKGSGTTSGTTRLLSGHTCFTLTGLLGTLVTMGLLT

SEQ ID NO: 12714 - protein, 317 aa, Artificial Sequence
  derived and/or modified sequence
MTVARPSVPAALPLLGELPRLLLLVLLCLPAVWGDCGLPPDVPNAQPALEGRTSFPEDTVITYKCEESFVKIPGEKDSVICLKGSQWSDIEEFCNQKSCPNPGEIRNGQIDVPGGILFGATISFSCNTGYKLFGSTSSFCLISGSSVQWSDPLPECREIYCPAPPQIDNGIIQGERDHYGYRQSVTYACNKGFTMIGEHSIYCTVNNDEGEWSGPPPECRGKSLTSKVPPTVQKPTTVNVPTTEVSPTSQKTTTKTTTPNAQATRSTPVSRTTKHFHETTPNKGSGTTSGQLTLFSGHTCFTLTGLLGTLVTMGLLT

SEQ ID NO: 12715 - DNA, 1095 bp, Artificial Sequence
  derived and/or modified sequence
atgacggtggcgcggccttccgtcccagcagccttgcctcttctgggcgaattaccaagattgctgctgctagttctgctgtgcctccctgctgtgtggggggactgcggcctgcctccagacgtgccaaacgctcagcccgccttggaggggagaacctcatttcctgaggacacagtgatcacctacaaatgcgaggagagtttcgtcaaaattccaggggagaaagactctgtgatttgtctcaagggtagtcaatggagcgatatcgaggagttttgcaaccgctcctgcgaagttcccacaagattaaacagcgctagcctgaaacaaccttacatcacgcagaactacttccctgttggtacggtggtggagtacgagtgccgccccgggtataggagagagccctcactctcccccaaactcacttgtttacaaaatctcaaatggagcacagctgtggaattttgcaaaaaaaaatcttgtcctaaccccggtgaaattcgcaacggccagatcgatgttccgggaggcattctcttcggcgccaccatcagcttttcttgtaacacagggtataagctgtttggctcgactagtagcttttgcttgatttccggctcttcagtgcagtggagcgatcctttacctgaatgcagggagatttattgcccggctcctccccagatcgacaatgggatcattcagggtgaaagagaccattacgggtaccgtcaaagtgtgacctacgcctgcaacaaaggtttcactatgattggagagcacagcatctactgcacagtgaataatgatgaaggcgagtggagcggacctcctcctgagtgccggggtaaatctctcaccagcaaagttccaccgacagtacagaaacccacaaccgtcaatgtgcctaccactgaggtgagcccaacaagccagaagactactaccaagacaactacgcctaatgctcaggctacgagatccacgcctgtctcacgaacaacgaagcacttccacgaaacaacaccaaacaagggatcaggcactacttccggaacaacaagactgctttctgttctttttatgtag

SEQ ID NO: 12716 - DNA, 1146 bp, Artificial Sequence
  derived and/or modified sequence
atgaccgtggctcggcctagcgtgcccgcagccctgccgctgctcggcgagttgcctcgccttctgcttctggtgctgttgtgtctaccagctgtctggggtgactgtgggcttccacctgacgtgccaaacgcccaaccagctttggaaggacggacatcctttcccgaggacacagtaattacttataagtgcgaggagagcttcgtgaagatccctggcgaaaaagactctgtgatctgtctcaaaggaagccagtggagtgacatcgaggaattctgcaataggagttgtgaagtgccaacaaggctgaacagcgcttctctcaagcaaccatacatcacccagaactattttcccgtgggaaccgttgtggagtacgaatgccgacccggatacaggcgcgaacccagcttgtcacccaagcttacatgccttcagaatctgaaatggagcaccgccgtggaattctgtaaaaagaagtcatgccctaaccctggcgaaattcgtaacgggcagatcgatgtccccggaggcatactgtttggtgccacgattagttttagctgtaataccggatacaagctgtttggatctacaagctccttctgcctaatctcaggcagttcagtgcagtggagtgacccactccccgaatgccgtgagatctattgccccgcgccccctcagatcgataatggcattatccagggcgagcgagaccactatggctatagacaaagtgttacttacgcctgtaataagggctttaccatgattggcgaacattcaatttattgtactgtcaacaacgatgagggcgaatggtcgggcccacccccggaatgtagggggaaaagcctgacttcgaaagtgcccccgacggtgcaaaagccaacgactgtgaacgtacctacaacagaagtctcgcccacctcacaaaaaaccaccaccaaaacaaccacacccaacgctcaggctacgagatccaccccagtgtcaaggacaacaaaacactttcacgagactacaccaaacaagggctctggcaccacatcaggcaccactcgtctcctctccggacatacctgcttcacactgaccggtctgttaggtaccctggtgaccatgggcctgctgacttag

SEQ ID NO: 12717 - DNA, 390 bp, Artificial Sequence
  derived and/or modified sequence
atgacggtagcacgaccgtctgtgcctgccgctcttcctctgctaggagagttgccccgactacttcttttggtgctgctctgcctgcctgcggtctggggtgattgcggtctacctcctgacgtcccaaacgcacagcctgcactcgagggccggacttcctttcccgaagacacggtgataacttacaagtgcgaggaatcattcgtcaagattcctggcgagaaagatagcgttatctgtctgaaggggtctcagtggagcgatatcgaggaattttgtaacagaagttgcgaggtgcccacacggctgcagaagaggactttctccatcaccaaaacgaatctcccctcagagtttaaaatggtacactctagcagaatcttgtag

SEQ ID NO: 12718 - DNA, 954 bp, Artificial Sequence
  derived and/or modified sequence
atgaccgtggcaagacctagcgttccagccgccctgcctctgctgggagagctcccgcgcctgctcctgctagtcctgctgtgtttacctgccgtatggggagattgcgggctgcctccagatgtgcccaatgcccaaccagccctggagggccgaaccagtttccctgaggacaccgttatcacgtataagtgtgaagagagttttgtgaagattcccggggagaaagatagcgtcatttgtttaaaggggtcacagtggagcgacattgaggaattctgcaaccagaaaagctgtccgaacccaggagagatcagaaatggccagatcgatgttccaggtggcattctctttggcgccactattagcttctcctgtaacactgggtacaaattgttcggaagtacgagctcattttgtctgatttccggcagctctgtgcaatggagcgatccactgccagagtgccgcgagatctattgtccggccccaccccagatcgacaacggaataatccagggcgaaagggaccactatgggtaccggcaaagcgtgacttatgcctgtaacaaagggtttaccatgatcggagagcactctatatattgtaccgtcaataatgacgagggcgagtggtccgggccaccgccagaatgcaggggtaagtccctgaccagcaaggttcctcccaccgtgcagaagccaaccactgtgaatgtgcccacgacagaggtaagccctacgtcacagaaaactaccacgaagaccacaacaccaaatgcccaggccacacgctctacgccggtctcaaggacaaccaagcatttccacgaaaccacgcccaacaaagggagcggcactacctctggccagttgaccctattcagcggtcacacttgctttaccctcacaggactcctcgggacgctggtgacaatgggactgctgacatag

SEQ ID NO: 12719 - DNA, 1095 bp, Artificial Sequence
  derived and/or modified sequence
atgacagtggcccggcccagcgtgcctgctgccctgcccctgctgggggagctgccccggctgctgctgctggtgctgctgtgcctgcctgctgtgtggggagactgtggcctgcccccagatgtgcccaatgcccagcctgccctggagggccgcaccagcttcccagaagatactgtcatcacctacaagtgtgaggagagctttgtgaagatccctggagagaaggacagcgtcatctgcctgaagggcagccagtggagcgacatcgaggagttctgcaacagaagctgtgaggtgcccacccggctgaacagcgccagcctgaagcagccctacatcacccagaactacttccctgtgggcaccgtggtggagtatgagtgcaggcctggctaccgccgggagcccagcctgagccccaagctgacctgcctgcagaacctgaagtggagcacagctgtggagttctgcaagaagaagagctgccccaaccctggagagatcagaaatggccagattgatgtgcctgggggcatcctgtttggagccaccatctccttcagctgcaacacaggctacaagctgtttggcagcaccagcagcttctgcctgatcagcggcagctctgtgcagtggagcgaccccctgcctgaatgtcgggagatctactgcccagccccaccccagattgacaatggcatcatccagggcgagcgggaccactacggctaccggcagagcgtgacctacgcctgcaacaagggcttcaccatgattggagagcacagcatctactgcaccgtgaacaatgatgaaggagagtggagcggccccccacctgagtgccggggcaagagcctgaccagcaaggtgcccccaacagtgcagaagcccaccaccgtgaatgtgcccaccacagaggtgagccccaccagccagaagaccaccaccaagaccaccaccccaaatgcccaggccaccaggagcacccctgtgtccaggaccaccaagcacttccacgagaccacccccaacaagggcagcggcaccaccagcggcaccacccggctgctgtctgtgctcttcatgtag

SEQ ID NO: 12720 - DNA, 1146 bp, Artificial Sequence
  derived and/or modified sequence
atgacagtggcccggcccagcgtgcctgctgccctgcccctgctgggggagctgccccggctgctgctgctggtgctgctgtgcctgcctgctgtgtggggagactgtggcctgcccccagatgtgcccaatgcccagcctgccctggagggccgcaccagcttcccagaagatactgtcatcacctacaagtgtgaggagagctttgtgaagatccctggagagaaggacagcgtcatctgcctgaagggcagccagtggagcgacatcgaggagttctgcaacagaagctgtgaggtgcccacccggctgaacagcgccagcctgaagcagccctacatcacccagaactacttccctgtgggcaccgtggtggagtatgagtgcaggcctggctaccgccgggagcccagcctgagccccaagctgacctgcctgcagaacctgaagtggagcacagctgtggagttctgcaagaagaagagctgccccaaccctggagagatcagaaatggccagattgatgtgcctgggggcatcctgtttggagccaccatctccttcagctgcaacacaggctacaagctgtttggcagcaccagcagcttctgcctgatcagcggcagctctgtgcagtggagcgaccccctgcctgaatgtcgggagatctactgcccagccccaccccagattgacaatggcatcatccagggcgagcgggaccactacggctaccggcagagcgtgacctacgcctgcaacaagggcttcaccatgattggagagcacagcatctactgcaccgtgaacaatgatgaaggagagtggagcggccccccacctgagtgccggggcaagagcctgaccagcaaggtgcccccaacagtgcagaagcccaccaccgtgaatgtgcccaccacagaggtgagccccaccagccagaagaccaccaccaagaccaccaccccaaatgcccaggccaccaggagcacccctgtgtccaggaccaccaagcacttccacgagaccacccccaacaagggcagcggcaccaccagcggcaccacccggctgctgagcggccacacctgcttcaccctgaccggcctgctgggcaccctggtgaccatgggcctgctgacctag

SEQ ID NO: 12721 - DNA, 390 bp, Artificial Sequence
  derived and/or modified sequence
atgacagtggcccggcccagcgtgcctgctgccctgcccctgctgggggagctgccccggctgctgctgctggtgctgctgtgcctgcctgctgtgtggggagactgtggcctgcccccagatgtgcccaatgcccagcctgccctggagggccgcaccagcttcccagaagatactgtcatcacctacaagtgtgaggagagctttgtgaagatccctggagagaaggacagcgtcatctgcctgaagggcagccagtggagcgacatcgaggagttctgcaacagaagctgtgaggtgcccacccggctgcagaagaggaccttcagcatcaccaagaccaacctgcccagcgagttcaagatggtgcacagcagccgcatcctgtag

SEQ ID NO: 12722 - DNA, 954 bp, Artificial Sequence
  derived and/or modified sequence
atgacagtggcccggcccagcgtgcctgctgccctgcccctgctgggggagctgccccggctgctgctgctggtgctgctgtgcctgcctgctgtgtggggagactgtggcctgcccccagatgtgcccaatgcccagcctgccctggagggccgcaccagcttcccagaagatactgtcatcacctacaagtgtgaggagagctttgtgaagatccctggagagaaggacagcgtcatctgcctgaagggcagccagtggagcgacatcgaggagttctgcaaccagaagagctgccccaaccctggagagatcagaaatggccagattgatgtgcctgggggcatcctgtttggagccaccatctccttcagctgcaacacaggctacaagctgtttggcagcaccagcagcttctgcctgatcagcggcagctctgtgcagtggagcgaccccctgcctgaatgtcgggagatctactgcccagccccaccccagattgacaatggcatcatccagggcgagcgggaccactacggctaccggcagagcgtgacctacgcctgcaacaagggcttcaccatgattggagagcacagcatctactgcaccgtgaacaatgatgaaggagagtggagcggccccccacctgagtgccggggcaagagcctgaccagcaaggtgcccccaacagtgcagaagcccaccaccgtgaatgtgcccaccacagaggtgagccccaccagccagaagaccaccaccaagaccaccaccccaaatgcccaggccaccaggagcacccctgtgtccaggaccaccaagcacttccacgagaccacccccaacaagggcagcggcaccaccagcggccagctgaccctcttcagcggccacacctgcttcaccctgaccggcctgctgggcaccctggtgaccatgggcctgctgacctag

SEQ ID NO: 12723 - DNA, 1095 bp, Artificial Sequence
  derived and/or modified sequence
atgaccgtggcccggcccagcgtgcccgccgccctgcccctgctgggagagctcccccgcctgttgctactagtgctgctgtgcctgccagctgtgtggggagactgcgggttaccaccggatgtaccaaacgcacagccagcactcgaaggaaggacctcatttccggaggatacggtcatcacatacaagtgcgaggagagtttcgtgaagattcctggagagaaagacagcgtgatttgccttaaggggtcccagtggtctgacatcgaggaattttgtaaccgctcatgtgaggtccctacaaggttgaactctgccagcttaaaacaaccatacattacccaaaactacttccctgtgggcaccgtcgtggaatacgagtgccggccaggctatagacgcgaaccctcattgtctccaaagctgacttgcctgcagaacttgaagtggagcaccgccgtcgagttctgtaagaagaaatcctgccctaatcccggagagattcgtaacggtcagatcgacgtcccaggaggaatcctgtttggtgctaccattagtttttcttgcaacaccggctataagcttttcggtagtaccagcagcttctgtcttatctctggttctagtgtccaatggtctgacccgctccctgaatgtcgtgaaatctactgccccgctcctccccagattgataatgggatcatccagggtgaaagggatcactatggctaccgccagagtgtgacttatgcatgcaacaagggtttcacgatgattggggaacattcaatttattgcacggtgaacaacgatgaaggtgagtggagtgggccaccccccgaatgcagaggcaaatcactgaccagcaaggtgccgccaacggtccagaagccgactaccgtgaatgtcccgaccacggaagtgagtcctacatctcagaaaaccaccactaaaacaacaacaccaaatgcacaggcaacacgcagcactcccgtttcgaggaccactaagcacttccatgaaactacaccgaataagggatctggaaccacgtccggtactaccaggttattgagcgtgctattcatgtag

SEQ ID NO: 12724 - DNA, 1146 bp, Artificial Sequence
  derived and/or modified sequence
atgaccgtggcccggcccagcgtgcccgccgccctgcccctgctgggagagctgccacggctcttgctcctcgtcctcctctgccttccagctgtatggggtgattgcggcctacccccagatgtgcccaatgcccaacccgccctggagggccgtacctcctttcccgaggatacagttatcacctacaagtgtgaggagtcattcgtaaagattcccggggagaaggactctgtaatctgcctcaaaggaagccaatggtccgacattgaggagttttgcaacaggtcatgtgaggtccctaccaggctgaactcggcttctctaaaacaaccttacattacacaaaattacttccccgtcgggaccgttgtggagtacgaatgtcggcccggctaccggagagagccttcactgtcccccaagttgacttgtctccagaatctgaaatggagcacagccgtcgagttttgtaagaaaaagtcctgccctaatcccggggaaatcaggaatggccagatagatgttcctgggggaattctgttcggggcgaccatctcattttcgtgtaacacgggttataagctgttcggctcaacatcctccttctgcctgatttcaggaagcagtgttcagtggagtgaccccttgccagagtgccgcgagatctactgcccagccccgcctcagatagacaacggcatcatccagggcgagagggaccattacgggtaccgccagtccgtgacatacgcttgcaacaaaggcttcacaatgatcggcgaacatagcatatattgcactgtgaataacgatgaaggtgagtggtccgggccaccgccggagtgccgcggcaagtcactcacaagtaaggtgccacctaccgtgcagaaacccactactgtgaacgtcccgacgactgaggtttctcctacgtcgcagaagactaccaccaagacaaccaccccaaatgctcaggctactcgctctaccccagttagccggacgaccaaacactttcacgaaacaacacctaacaaaggatccggcactacctccggcacaacacggctgctctccggacacacatgttttacactgaccggactattaggtacccttgtcaccatgggcttgctgacatag

SEQ ID NO: 12725 - DNA, 390 bp, Artificial Sequence
  derived and/or modified sequence
atgaccgtggcccggcccagcgtgcccgccgccctgcccctgctgggcgaactaccgcgcctgttacttttggtgttattatgtctgccggcagtttggggtgactgcggccttccgccggatgtgccaaatgcccagccagctctcgagggccgtacctctttccctgaagataccgtcatcacttacaaatgtgaggagtcctttgtaaagatcccgggggagaaggattctgtcatttgtttgaaggggtcccagtggtccgatatcgaggagttctgtaatcgttcctgcgaggtacccacacggctacaaaaacggactttttctattaccaaaactaacctgccgtcggagtttaagatggtccacagcagcaggattctatag

SEQ ID NO: 12726 - DNA, 954 bp, Artificial Sequence
  derived and/or modified sequence
atgaccgtggcccggcccagcgtgcccgccgccctgcccctgctgggtgaactccctcgattgctgttactggtgctactctgcctgccggctgtctggggggactgcgggctacccccagatgtaccgaatgcccaaccagcgctagagggcagaacctctttccccgaagataccgttataacctacaaatgcgaggagagtttcgtcaagatcccaggcgaaaaggattcagtaatatgtttgaagggcagtcagtggagtgatatagaagagttctgtaatcaaaagagttgtcctaatcccggcgagatccgcaatggccaaatcgacgtacctggggggattctgttcggagctacaatttccttctcctgtaacacaggttacaagctgttcggcagtactagctctttttgcttgatttccggatctagcgtccagtggtccgatcctctgcctgagtgccgcgagatctattgtccagcgcctcctcagatcgacaacggaatcattcagggcgagagggaccactatggctaccggcagagcgtgacctatgcatgtaacaaagggtttacaatgatcggcgagcattctatttactgtaccgtaaacaacgacgagggcgagtggagtgggcctcctccagagtgtaggggcaagagtctgacctcgaaagtgcctcccacagtgcagaaacccacaacagtgaacgtgcctaccaccgaagtaagcccgaccagccagaagacaacaacaaagacgactacccccaacgctcaagctactcgctctactccggtgtcccgcaccactaagcattttcacgagacaacccctaataaaggctcaggaactaccagtggccagctgactctgttttctgggcatacttgcttcactctgaccggactcctgggcacgctcgtaactatgggcctcctcacatag

SEQ ID NO: 12727 - DNA, 1095 bp, Artificial Sequence
  derived and/or modified sequence
atgactgtggcaaggccatctgtccctgcggctctgcccctcttgggcgaactgccacgactgttacttctagtgctcctctgcctgcccgctgtatggggcgattgcggcctgcctcccgatgttcccaatgcgcagcctgccctggaggggagaaccagcttcccagaggacacagtgatcacctataagtgcgaagagtcctttgtgaaaatcccaggagagaaggattccgtcatttgcctgaagggttcacagtggagcgacatcgaagagttttgtaacagaagttgcgaagtgcctacaagactgaatagcgccagtctgaagcagccttatataacacaaaattattttcccgtgggcaccgtggtcgagtatgagtgcagacccggatataggagagaaccttctctttcaccaaagttgacctgtctccaaaacctgaagtggtccaccgccgtggaattctgtaaaaaaaagtcttgcccaaatcccggagagatcagaaacgggcagatcgacgtgccaggaggcatactattcggggctaccattagcttctcatgtaatacaggctacaagctcttcggcagcacaagtagcttctgtctcataagcggatctagtgttcagtggagtgatcccctgcccgagtgtcgagaaatatactgtcctgcgccaccgcaaatcgacaatggcattattcagggagaacgcgaccactacggttaccgtcagagcgtaacgtacgcctgcaataagggattcaccatgattggtgagcactctatatactgtactgtgaacaatgatgaaggagaatggtcaggaccaccacccgagtgtcgaggtaaaagcctgacatccaaggtgccacctactgtacagaagccaactaccgtcaatgtgcctaccaccgaagtgtcccctacgagccagaagactactaccaaaaccaccacccctaatgcgcaggccactaggtctacccccgtcagcagaaccaccaaacacttccatgagacaacccccaacaaggggtctggaactacttccggaacaacccgtctgctgagcgttctgttcatgtag

SEQ ID NO: 12728 - DNA, 1146 bp, Artificial Sequence
  derived and/or modified sequence
atgaccgtggcccgacctagtgtgcccgctgctcttcccctgcttggcgaactccctagactactgctactggttctgctttgtcttccggctgtgtggggggattgtggccttcctccagatgttcctaatgcccagcccgcactcgaggggagaacctcttttcctgaagataccgtgattacctataagtgcgaggaaagctttgtgaaaatacctggggaaaaggactcagtcatctgtcttaaagggtctcagtggtccgacatcgaggagttttgtaacaggtcgtgtgaggtccctactaggcttaactcagcctcccttaagcagccctatatcacccagaattactttcccgtaggaaccgttgttgagtatgagtgccggccagggtacaggagggagccgtccttatcgcccaagctgacttgtctgcaaaatttaaagtggtctactgcagtcgagttctgcaaaaaaaagtcttgcccaaatcctggagaaatcagaaacggccagatcgatgttccgggtgggatcctctttggggctaccatctctttttcatgtaacacggggtacaaactgttcggttccacctccagtttctgtctgatcagtgggtcctccgttcagtggtctgaccctctgcccgagtgtcgcgaaatctactgccccgctccccctcagatcgacaatggtattatccagggcgaaagagaccactatggttacagacaaagcgtgacatacgcttgcaacaagggctttacgatgatcggcgaacacagcatttactgtacggtaaacaatgatgagggagagtggtcagggccacctccagagtgccggggtaagtctcttacttccaaagtgccacccacagtgcagaagcccaccacagtgaacgtgcccaccacagaagtgtctcctacaagccagaaaacaacgactaagaccaccactcctaacgctcaagctacaagatctacaccagtctctaggaccacaaaacactttcatgagactactccaaataagggttctggaacaaccagtgggactacacgcctgctgtctggacacacttgctttacccttacgggtctcctgggcacactcgtgactatgggactccttacctag

SEQ ID NO: 12729 - DNA, 390 bp, Artificial Sequence
  derived and/or modified sequence
atgaccgttgcccgaccatccgtgcccgctgccctccccttgctcggagagttaccgaggttgttgctacttgtactcctgtgtctgccagctgtttggggagattgtggattgccaccagacgtgccaaacgcacagcctgcattggagggtcggaccagcttcccggaggataccgtgatcacctataagtgcgaggaatcttttgtgaaaattccgggtgagaaagattccgtgatctgtctcaagggaagtcagtggtccgatatagaagaattttgtaataggagttgcgaggtccctaccagactgcagaagaggacctttagcataactaaaacgaatctgcctagtgagttcaaaatggttcattccagccgcatcctctag

SEQ ID NO: 12730 - DNA, 954 bp, Artificial Sequence
  derived and/or modified sequence
atgacagtggctcggccttcagtgcccgcagcactccccctcctgggagagctcccacgtctgctcctgttagtgctgctgtgcctgccagcggtttggggtgattgcggccttccccctgacgttccgaacgcccagcccgcactagagggtcggaccagtttccccgaagacaccgttataacctataaatgcgaagagtcattcgtaaagatccctggtgagaaagactcagtcatctgtttaaagggctcccagtggtccgatatcgaggaattttgcaatcaaaaaagctgccccaatcccggtgaaatccgcaacggccaaatcgacgtgcccggtggaatcctgttcggtgctacaattagcttttcttgcaataccggatacaagctattcgggtctacatcgtctttttgtctgatcagcgggtctagtgtgcagtggagcgatcccctgcctgagtgtagggagatttactgccctgcccctccacagattgacaatggaattattcagggagagcgcgatcactacggatatcggcagagcgtgacatacgcttgtaacaagggatttacaatgatcggcgagcacagcatttattgtacggtgaataatgatgaaggggaatggtcgggccctccccctgagtgcaggggcaagtccctcactagcaaagtgccacctactgtgcaaaaaccaactactgtgaatgtacccaccactgaggtaagccccacctctcaaaagaccaccacgaagactaccacacctaacgctcaagccacccgcagcacccctgtgtcccgcaccacaaaacacttccatgagacgaccccaaacaagggatcaggaaccacaagcggacagttgacgctctttagcggccacacgtgcttcacgctgaccggacttcttggcacactggttaccatggggctgctcacatag

SEQ ID NO: 12731 - DNA, 2760 bp, Artificial Sequence
  derived and/or modified sequence
gagtctagggcccccggggcgtatgacgccggagccctctgaccgcacctctgaccacaacaaacccctactccacccgtcttgtttgtcccacccttggtgacgcagagccccagcccagaccccgcccaaagcactcatttaactggtattgcggagccacgaggcttctgcttactgcaactcgctccggccgctgggcgtagctgcgactcggcggagtcccggcggcgcgtccttgttctaacccggcgcgccatgaccgtcgcgcggccgagcgtgcccgcggcgctgcccctcctcggggagctgccccggctgctgctgctggtgctgttgtgcctgccggccgtgtggggtgactgtggccttcccccagatgtacctaatgcccagccagctttggaaggccgtacaagttttcccgaggatactgtaataacgtacaaatgtgaagaaagctttgtgaaaattcctggcgagaaggactcagtgatctgccttaagggcagtcaatggtcagatattgaagagttctgcaatcgtagctgcgaggtgccaacaaggctaaattctgcatccctcaaacagccttatatcactcagaattattttccagtcggtactgttgtggaatatgagtgccgtccaggttacagaagagaaccttctctatcaccaaaactaacttgccttcagaatttaaaatggtccacagcagtcgaattttgtaaaaagaaatcatgccctaatccgggagaaatacgaaatggtcagattgatgtaccaggtggcatattatttggtgcaaccatctccttctcatgtaacacagggtacaaattatttggctcgacttctagtttttgtcttatttcaggcagctctgtccagtggagtgacccgttgccagagtgcagagaaatttattgtccagcaccaccacaaattgacaatggaataattcaaggggaacgtgaccattatggatatagacagtctgtaacgtatgcatgtaataaaggattcaccatgattggagagcactctatttattgtactgtgaataatgatgaaggagagtggagtggcccaccacctgaatgcagaggaaaatctctaacttccaaggtcccaccaacagttcagaaacctaccacagtaaatgttccaactacagaagtctcaccaacttctcagaaaaccaccacaaaaaccaccacaccaaatgctcaagcaacacggagtacacctgtttccaggacaaccaagcattttcatgaaacaaccccaaataaaggaagtggaaccacttcaggtactacccgtcttctatctgggcacacgtgtttcacgttgacaggtttgcttgggacgctagtaaccatgggcttgctgacttagccaaagaagagttaagaagaaaatacacacaagtatacagactgttcctagtttcttagacttatctgcatattggataaaataaatgcaattgtgctcttcatttaggatgctttcattgtctttaagatgtgttaggaatgtcaacagagcaaggagaaaaaaggcagtcctggaatcacattcttagcacacctacacctcttgaaaatagaacaacttgcagaattgagagtgattcctttcctaaaagtgtaagaaagcatagagatttgttcgtatttagaatgggatcacgaggaaaagagaaggaaagtgatttttttccacaagatctgtaatgttatttccacttataaaggaaataaaaaatgaaaaacattatttggatatcaaaagcaaataaaaacccaattcagtctcttctaagcaaaattgctaaagagagatgaaccacattataaagtaatctttggctgtaaggcattttcatctttccttcgggttggcaaaatattttaaaggtaaaacatgctggtgaaccaggggtgttgatggtgataagggaggaatatagaatgaaagactgaatcttcctttgttgcacaaatagagtttggaaaaagcctgtgaaaggtgtcttctttgacttaatgtctttaaaagtatccagagatactacaatattaacataagaaaagattatatattatttctgaatcgagatgtccatagtcaaatttgtaaatcttattcttttgtaatatttatttatatttatttatgacagtgaacattctgattttacatgtaaaacaagaaaagttgaagaagatatgtgaagaaaaatgtatttttcctaaatagaaataaatgatcccattttttggtatcatgtagtatgtgaaatttattcttaaacgtgactactttatttctaaataagaaattccctacctgcttcctacaagcagttcagaatgccatgccttggttgtcctagtgtgaataattttcagctactttaaaattatattgtactttctcaagcatgtcatatcctttcctattagagtatctatattacttgttactgatttacctgaaggcaatctgattaatttctaggtttttaccatattcttgtcatcttgccaattacattttaagtgttagactagactaagatgtactagttgtatagaatataactagatttattatggcaatgtttattttgtcattttgcttcatctgttttgttgttgaagtactttaaatttcatacgttcatggcatttcactgtaaagactttaatgtgtatttcttaaaataaaactttttttcctccttaa

SEQ ID NO: 12732 - DNA, 1297 bp, Artificial Sequence
  derived and/or modified sequence
actgcaactcgctccggccgctgggcgtagctgcgactcggcggagtcccggcggcgcgtccttgttctaacccggcgcgccatgaccgtcgcgcggccgagcgtgcccgcggcgctgcccctcctcggggagctgccccggctgctgctgctggtgctgttgtgcctgccggccgtgtggggtgactgtggccttcccccagatgtacctaatgcccagccagctttggaaggccgtacaagttttcccgaggatactgtaataacgtacaaatgtgaagaaagctttgtgaaaattcctggcgagaaggactcagtgatctgccttaagggcagtcaatggtcagatattgaagagttctgcaatcgtagctgcgaggtgccaacaaggttacagaagagaaccttctctatcaccaaaactaacttgccttcagaatttaaaatggtccacagcagtcgaattttgtaaaaagaaatcatgccctaatccgggagaaatacgaaatggtcagattgatgtaccaggtggcatattatttggtgcaaccatctccttctcatgtaacacagggtacaaattatttggctcgacttctagtttttgtcttatttcaggcagctctgtccagtggagtgacccgttgccagagtgcagagaaatttattgtccagcaccaccacaaattgacaatggaataattcaaggggaacgtgaccattatggatatagacagtctgtaacgtatgcatgtaataaaggattcaccatgattggagagcactctatttattgtactgtgaataatgatgaaggagagtggagtggcccaccacctgaatgcagaggaaaatctctaacttccaaggtcccaccaacagttcagaaacctaccacagtaaatgttccaactacagaagtctcaccaacttctcagaaaaccaccacaaaaaccaccacaccaaatgctcaagcaacacggagtacacctgtttccaggacaaccaagcattttcatgaaacaaccccaaataaaggaagtggaaccacttcaggtactacccgtcttctatctgggcacacgtgtttcacgttgacaggtttgcttgggacgctagtaaccatgggcttgctgacttagccaaagaagagttaagaagaaaatacacacaagtatacagactgttcctagtttcttagacttatctgcatattggataaaataaatgcaattgtgctcttcatttaggatgctttcattgtctttaagatgtgttaggaatgtcaacagagcaa

SEQ ID NO: 12733 - DNA, 1033 bp, Artificial Sequence
  derived and/or modified sequence
gcaactcgctccggccgctgggcgtagctgcgactcggcggagtcccggcggcgcgtccttgttctaacccggcgcgccatgaccgtcgcgcggccgagcgtgcccgcggcgctgcccctcctcggggagctgccccggctgctgctgctggtgctgttgtgcctgccggccgtgtggggtgactgtggccttcccccagatgtacctaatgcccagccagctttggaaggccgtacaagttttcccgaggatactgtaataacgtacaaatgtgaagaaagctttgtgaaaattcctggcgagaaggactcagtgatctgccttaagggcagtcaatggtcagatattgaagagttctgcaatcagaaatcatgccctaatccgggagaaatacgaaatggtcagattgatgtaccaggtggcatattatttggtgcaaccatctccttctcatgtaacacagggtacaaattatttggctcgacttctagtttttgtcttatttcaggcagctctgtccagtggagtgacccgttgccagagtgcagagaaatttattgtccagcaccaccacaaattgacaatggaataattcaaggggaacgtgaccattatggatatagacagtctgtaacgtatgcatgtaataaaggattcaccatgattggagagcactctatttattgtactgtgaataatgatgaaggagagtggagtggcccaccacctgaatgcagaggaaaatctctaacttccaaggtcccaccaacagttcagaaacctaccacagtaaatgttccaactacagaagtctcaccaacttctcagaaaaccaccacaaaaaccaccacaccaaatgctcaagcaacacggagtacacctgtttccaggacaaccaagcattttcatgaaacaaccccaaataaaggaagtggaaccacttcaggtcagttgacactgttttcagggcacacgtgtttcacgttgacaggtttgcttgggacgctagtaaccatgggcttgctgacttag

SEQ ID NO: 12734 - DNA, 1095 bp, Artificial Sequence
  derived and/or modified sequence
atgaccgtggccagacccagcgtgcccgccgccctgcccctgctgggcgagctgcccagactgctgctgctggtgctgctgtgcctgcccgccgtgtggggcgactgcggcctgccccccgacgtgcccaacgcccagcccgccctggagggcagaaccagcttccccgaggacaccgtgatcacctacaagtgcgaggagagcttcgtgaagatccccggcgagaaggacagcgtgatctgcctgaagggcagccagtggagcgacatcgaggagttctgcaacagaagctgcgaggtgcccaccagactgaacagcgccagcctgaagcagccctacatcacccagaactacttccccgtgggcaccgtggtggagtacgagtgcagacccggctacagaagagagcccagcctgagccccaagctgacctgcctgcagaacctgaagtggagcaccgccgtggagttctgcaagaagaagagctgccccaaccccggcgagatcagaaacggccagatcgacgtgcccggcggcatcctgttcggcgccaccatcagcttcagctgcaacaccggctacaagctgttcggcagcaccagcagcttctgcctgatcagcggcagcagcgtgcagtggagcgaccccctgcccgagtgcagagagatctactgccccgcccccccccagatcgacaacggcatcatccagggcgagagagaccactacggctacagacagagcgtgacctacgcctgcaacaagggcttcaccatgatcggcgagcacagcatctactgcaccgtgaacaacgacgagggcgagtggagcggccccccccccgagtgcagaggcaagagcctgaccagcaaggtgccccccaccgtgcagaagcccaccaccgtgaacgtgcccaccaccgaggtgagccccaccagccagaagaccaccaccaagaccaccacccccaacgcccaggccaccagaagcacccccgtgagcagaaccaccaagcacttccacgagaccacccccaacaagggcagcggcaccaccagcggcaccaccagactgctgagcgtgctgttcatgtag

SEQ ID NO: 12735 - DNA, 1146 bp, Artificial Sequence
  derived and/or modified sequence
atgaccgtggccagacccagcgtgcccgccgccctgcccctgctgggcgagctgcccagactgctgctgctggtgctgctgtgcctgcccgccgtgtggggcgactgcggcctgccccccgacgtgcccaacgcccagcccgccctggagggcagaaccagcttccccgaggacaccgtgatcacctacaagtgcgaggagagcttcgtgaagatccccggcgagaaggacagcgtgatctgcctgaagggcagccagtggagcgacatcgaggagttctgcaacagaagctgcgaggtgcccaccagactgaacagcgccagcctgaagcagccctacatcacccagaactacttccccgtgggcaccgtggtggagtacgagtgcagacccggctacagaagagagcccagcctgagccccaagctgacctgcctgcagaacctgaagtggagcaccgccgtggagttctgcaagaagaagagctgccccaaccccggcgagatcagaaacggccagatcgacgtgcccggcggcatcctgttcggcgccaccatcagcttcagctgcaacaccggctacaagctgttcggcagcaccagcagcttctgcctgatcagcggcagcagcgtgcagtggagcgaccccctgcccgagtgcagagagatctactgccccgcccccccccagatcgacaacggcatcatccagggcgagagagaccactacggctacagacagagcgtgacctacgcctgcaacaagggcttcaccatgatcggcgagcacagcatctactgcaccgtgaacaacgacgagggcgagtggagcggccccccccccgagtgcagaggcaagagcctgaccagcaaggtgccccccaccgtgcagaagcccaccaccgtgaacgtgcccaccaccgaggtgagccccaccagccagaagaccaccaccaagaccaccacccccaacgcccaggccaccagaagcacccccgtgagcagaaccaccaagcacttccacgagaccacccccaacaagggcagcggcaccaccagcggcaccaccagactgctgagcggccacacctgcttcaccctgaccggcctgctgggcaccctggtgaccatgggcctgctgacctag

SEQ ID NO: 12736 - DNA, 390 bp, Artificial Sequence
  derived and/or modified sequence
atgaccgtggccagacccagcgtgcccgccgccctgcccctgctgggcgagctgcccagactgctgctgctggtgctgctgtgcctgcccgccgtgtggggcgactgcggcctgccccccgacgtgcccaacgcccagcccgccctggagggcagaaccagcttccccgaggacaccgtgatcacctacaagtgcgaggagagcttcgtgaagatccccggcgagaaggacagcgtgatctgcctgaagggcagccagtggagcgacatcgaggagttctgcaacagaagctgcgaggtgcccaccagactgcagaagagaaccttcagcatcaccaagaccaacctgcccagcgagttcaagatggtgcacagcagcagaatcctgtag

SEQ ID NO: 12737 - DNA, 954 bp, Artificial Sequence
  derived and/or modified sequence
atgaccgtggccagacccagcgtgcccgccgccctgcccctgctgggcgagctgcccagactgctgctgctggtgctgctgtgcctgcccgccgtgtggggcgactgcggcctgccccccgacgtgcccaacgcccagcccgccctggagggcagaaccagcttccccgaggacaccgtgatcacctacaagtgcgaggagagcttcgtgaagatccccggcgagaaggacagcgtgatctgcctgaagggcagccagtggagcgacatcgaggagttctgcaaccagaagagctgccccaaccccggcgagatcagaaacggccagatcgacgtgcccggcggcatcctgttcggcgccaccatcagcttcagctgcaacaccggctacaagctgttcggcagcaccagcagcttctgcctgatcagcggcagcagcgtgcagtggagcgaccccctgcccgagtgcagagagatctactgccccgcccccccccagatcgacaacggcatcatccagggcgagagagaccactacggctacagacagagcgtgacctacgcctgcaacaagggcttcaccatgatcggcgagcacagcatctactgcaccgtgaacaacgacgagggcgagtggagcggccccccccccgagtgcagaggcaagagcctgaccagcaaggtgccccccaccgtgcagaagcccaccaccgtgaacgtgcccaccaccgaggtgagccccaccagccagaagaccaccaccaagaccaccacccccaacgcccaggccaccagaagcacccccgtgagcagaaccaccaagcacttccacgagaccacccccaacaagggcagcggcaccaccagcggccagctgaccctgttcagcggccacacctgcttcaccctgaccggcctgctgggcaccctggtgaccatgggcctgctgacctag

SEQ ID NO: 12738 - protein, 271 aa, Artificial Sequence
  derived and/or modified sequence
MAKVPDMFEDLKNCYSENEEDSSSIDHLSLNQKSFYHVSYGPLHEGCMDQSVSLSISETSKTSKLTFKESMVVVATNGKVLKKRRLSLSQSITDDDLEAIANDSEEEIIKPRSAPFSFLSNVKYNFMRIIKYEFILNDALNQSIIRANDQYLTAAALHNLDEAVKFDMGAYKSSKDDAKITVILRISKTQLYVTAQDEDQPVLLKEMPEIPKTITGSETNLLFFWETHGTKNYFTSVAHPNLFIATKQDYWVCLAGGPPSITDFQILENQA

SEQ ID NO: 12739 - DNA, 816 bp, Artificial Sequence
  derived and/or modified sequence
atggccaaggtgcccgacatgttcgaggacctgaagaactgctacagcgagaacgaggaggacagcagcagcatcgaccacctgagcctgaaccagaagagcttctaccacgtgagctacggccccctgcacgagggctgcatggaccagagcgtgagcctgagcatcagcgagaccagcaagaccagcaagctgaccttcaaggagagcatggtggtggtggccaccaacggcaaggtgctgaagaagagaagactgagcctgagccagagcatcaccgacgacgacctggaggccatcgccaacgacagcgaggaggagatcatcaagcccagaagcgcccccttcagcttcctgagcaacgtgaagtacaacttcatgagaatcatcaagtacgagttcatcctgaacgacgccctgaaccagagcatcatcagagccaacgaccagtacctgaccgccgccgccctgcacaacctggacgaggccgtgaagttcgacatgggcgcctacaagagcagcaaggacgacgccaagatcaccgtgatcctgagaatcagcaagacccagctgtacgtgaccgcccaggacgaggaccagcccgtgctgctgaaggagatgcccgagatccccaagaccatcaccggcagcgagaccaacctgctgttcttctgggagacccacggcaccaagaactacttcaccagcgtggcccaccccaacctgttcatcgccaccaagcaggactactgggtgtgcctggccggcggcccccccagcatcaccgacttccagatcctggagaaccaggcctag

SEQ ID NO: 12740 - DNA, 816 bp, Artificial Sequence
  derived and/or modified sequence
atggctaaggttcccgacatgttcgaagatctgaagaactgctattcagaaaacgaagaagactctagtagtattgatcacctctcgctaaatcagaagtctttttaccatgtgagctatgggcccctccacgaagggtgtatggatcagagtgtctcactatcaatcagcgagacgtccaagacatcgaagcttacttttaaagagagcatggtcgtcgtcgccaccaacgggaaggtgcttaagaaacggagacttagcttgagccagtctatcacagacgacgatctcgaggccattgcaaatgattccgaggaggagattatcaagcctagatccgccccatttagttttttgtcaaacgtcaaatacaattttatgcggatcatcaagtatgagtttatcttaaacgatgcactgaaccagagcatcatcagggccaacgatcagtatcttaccgcggccgccctgcataatctggacgaggcagtgaaattcgatatgggggcatacaaaagctctaaagacgacgctaagatcaccgttattttgcggattagcaaaacccaactctacgttacagcccaagacgaggaccagcccgtccttcttaaggagatgcccgaaatcccaaagacaatcacaggatcagagacaaacttgctgtttttctgggagacccatggcactaagaattacttcacgtccgtggcgcatcccaacttgtttatagcaaccaagcaggattactgggtatgcctggccggcgggcctccctccattaccgactttcaaatcttggagaaccaagcctag

SEQ ID NO: 12741 - DNA, 816 bp, Artificial Sequence
  derived and/or modified sequence
atggccaaggtgcctgacatgtttgaggacctgaagaactgctacagtgaaaatgaggaggacagcagcagcattgaccacctgagcctgaaccagaagagcttctaccacgtgtcctatggccccctgcacgagggctgcatggaccagagcgtgtccctgagcatcagcgagaccagcaagaccagcaagctgaccttcaaggagagcatggtggtggtggccaccaacgggaaggtgctgaagaagaggcggctgagcctgagccagagcatcacagatgatgacctggaggccatcgccaatgacagcgaggaggagatcatcaagcccaggtctgcccccttctccttcctgagcaatgtgaagtacaacttcatgaggatcatcaagtatgagttcatcctgaatgatgccctgaaccagagcatcatccgggccaatgaccagtacctgacagctgctgccctgcacaacctggatgaagctgtgaagtttgacatgggcgcctacaagagcagcaaggatgatgccaagatcaccgtcatcctgcgcatcagcaagacccagctgtatgtgacagcccaggatgaggaccagcctgtgctgctgaaggagatgcctgagatccccaagaccatcactggaagtgagaccaacctgctcttcttctgggagacccacggcaccaagaactacttcacctctgtggcccaccccaacctcttcatcgccaccaagcaggactactgggtgtgcctggccggcggcccccccagcatcacagacttccagatcctggagaaccaggcctag

SEQ ID NO: 12742 - DNA, 816 bp, Artificial Sequence
  derived and/or modified sequence
atggccaaggtgcccgacatgttcgaggacctgaagaactgctacagtgagaacgaagaagatagtagcagcatagaccatctgtctctcaaccagaagagtttttaccacgtgtcttatggcccccttcacgagggctgtatggaccagtctgtgtctctttccatctccgaaacttctaagacctctaagctgacttttaaggagagtatggtggtggttgcaacgaacggcaaggtactgaaaaaacgcaggctatccctttctcaatccattactgatgacgacctggaagcaatagccaacgacagtgaggaggagatcatcaagccacggagcgctcctttttcattccttagcaacgtcaaatataattttatgcggataatcaaatatgagtttatcttgaacgacgcgctgaaccagagtatcattagagccaatgaccaatacctcaccgctgccgccctccacaatctagacgaagcagtgaaatttgacatgggcgcttataaatctagcaaagatgatgctaaaatcacagttattttacggatctctaagacccagctgtacgttaccgcccaggatgaggatcaacccgtgctcctgaaagagatgcctgagatcccaaagaccatcactgggagtgagacaaatctgctgttcttctgggagacacacggtacgaagaattattttacaagcgtggctcatcctaatctgttcatagccacaaaacaggactactgggtttgcttggccggtgggcctcctagtatcacagacttccaaattctggagaatcaggcctag

SEQ ID NO: 12743 - DNA, 816 bp, Artificial Sequence
  derived and/or modified sequence
atggccaaggtacccgacatgtttgaagatctcaaaaattgctattctgaaaacgaggaagattcatcctctattgatcacttgtctctgaatcagaaaagcttctatcacgttagctacgggcctctacatgaagggtgtatggaccaatcagtgagtctgtctatttctgagacttcaaaaaccagcaagctcaccttcaaggagagcatggtcgttgtggccaccaatggaaaagtcctcaagaagaggcgtctgagcttgtctcagtcgataactgacgacgacctcgaggcaattgctaacgactcggaagaagagattatcaagcctagaagcgctcccttcagctttctcagcaacgtcaagtataactttatgcggattatcaagtacgaattcatactgaatgacgctctgaaccagtcaatcattagggccaacgaccagtatctgacggcagccgcacttcacaacctggacgaagccgtcaaattcgacatgggggcatacaagagtagtaaagacgacgctaagatcacagtgatcctgcgaatttcaaagacccagctgtatgtgacagctcaggacgaagatcagcccgtcctacttaaggagatgccagagattcctaaaactatcaccggtagtgaaactaacctcctcttcttctgggagacgcacggaacgaagaactacttcacaagcgttgcacatccaaacctcttcatagctaccaaacaggactactgggtttgcttggctggcggtccgccttcaatcacagatttccagatactcgaaaatcaagcctag

SEQ ID NO: 12744 - DNA, 2124 bp, Artificial Sequence
  derived and/or modified sequence
ttccctgtaaattccccgttttgacgacgcacttgtagccacgtagccacgcctacttaagacaattacaaaaggcgaagaagactgactcaggcttaagctgccagccagagagggagtcatttcattggcgtttgagtcagcaaagaagtcaagatggccaaagttccagacatgtttgaagacctgaagaactgttacagtgaaaatgaagaagacagttcctccattgatcatctgtctctgaatcagaaatccttctatcatgtaagctatggcccactccatgaaggctgcatggatcaatctgtgtctctgagtatctctgaaacctctaaaacatccaagcttaccttcaaggagagcatggtggtagtagcaaccaacgggaaggttctgaagaagagacggttgagtttaagccaatccatcactgatgatgacctggaggccatcgccaatgactcagaggaagaaatcatcaagcctaggtcagcaccttttagcttcctgagcaatgtgaaatacaactttatgaggatcatcaaatacgaattcatcctgaatgacgccctcaatcaaagtataattcgagccaatgatcagtacctcacggctgctgcattacataatctggatgaagcagtgaaatttgacatgggtgcttataagtcatcaaaggatgatgctaaaattaccgtgattctaagaatctcaaaaactcaattgtatgtgactgcccaagatgaagaccaaccagtgctgctgaaggagatgcctgagatacccaaaaccatcacaggtagtgagaccaacctcctcttcttctgggaaactcacggcactaagaactatttcacatcagttgcccatccaaacttgtttattgccacaaagcaagactactgggtgtgcttggcaggggggccaccctctatcactgactttcagatactggaaaaccaggcgtaggtctggagtctcacttgtctcacttgtgcagtgttgacagttcatatgtaccatgtacatgaagaagctaaatcctttactgttagtcatttgctgagcatgtactgagccttgtaattctaaatgaatgtttacactctttgtaagagtggaaccaacactaacatataatgttgttatttaaagaacaccctatattttgcatagtaccaatcattttaattattattcttcataacaattttaggaggaccagagctactgactatggctaccaaaaagactctacccatattacagatgggcaaattaaggcataagaaaactaagaaatatgcacaatagcagttgaaacaagaagccacagacctaggatttcatgatttcatttcaactgtttgccttctacttttaagttgctgatgaactcttaatcaaatagcataagtttctgggacctcagttttatcattttcaaaatggagggaataatacctaagccttcctgccgcaacagttttttatgctaatcagggaggtcattttggtaaaatacttcttgaagccgagcctcaagatgaaggcaaagcacgaaatgttattttttaattattatttatatatgtatttataaatatatttaagataattataatatactatatttatgggaaccccttcatcctctgagtgtgaccaggcatcctccacaatagcagacagtgttttctgggataagtaagtttgatttcattaatacagggcattttggtccaagttgtgcttatcccatagccaggaaactctgcattctagtacttgggagacctgtaatcatataataaatgtacattaattaccttgagccagtaattggtccgatctttgactcttttgccattaaacttacctgggcattcttgtttcaattccacctgcaatcaagtcctacaagctaaaattagatgaactcaactttgacaaccatgagaccactgttatcaaaactttcttttctggaatgtaatcaatgtttcttctaggttctaaaaattgtgatcagaccataatgttacattattatcaacaatagtgattgatagagtgttatcagtcataactaaataaagcttgcaacaaaattctctgaca

SEQ ID NO: 12745 - protein, 269 aa, Artificial Sequence
  derived and/or modified sequence
MAEVPELASEMMAYYSGNEDDLFFEADGPKQMKCSFQDLDLCPLDGGIQLRISDHHYSKGFRQAASVVVAMDKLRKMLVPCPQTFQENDLSTFFPFIFEEEPIFFDTWDNEAYVHDAPVRSLNCTLRDSQQKSLVMSGPYELKALHLQGQDMEQQVVFSMSFVQGEESNDKIPVALGLKEKNLYLSCVLKDDKPTLQLESVDPKNYPKKKMEKRFVFNKIEINNKLEFESAQFPNWYISTSQAENMPVFLGGTKGGQDITDFTMQFVSS

SEQ ID NO: 12746 - protein, 111 aa, Artificial Sequence
  derived and/or modified sequence
MAEVPELASEMMAYYSGNEDDLFFEADGPKQMKCSFQDLDLCPLDGGIQLRISDHHYSKGFRQAASVVVAMDKLRKMLVPCPQTFQENDLSTFFPFIFEEEPIFFDTWDNE

SEQ ID NO: 12747 - protein, 143 aa, Artificial Sequence
  derived and/or modified sequence
MAEVPELASEMMAYYSGNEDDLFFEADGPKQMKCSFQDLDLCPLDGGIQLRISDHHYSKGFRQAASVVVAMDKLRKMLVPCPQTFQENDLSTFFPFIFEEEPIFFDTWDNEAYVHDAPVRSLNCTLRDSQQKSLVMSGPYELK

SEQ ID NO: 12748 - protein, 125 aa, Artificial Sequence
  derived and/or modified sequence
MAEVPELASEMMAYYSGNEDDLFFEADGPKQMKCSFQDLDLCPLDGGIQLRISDHHYSKGFRQAASVVVAMDKLRKMLVPCPQTFQENDLSTFFPFIFEEEPIFFDTWDNEAYVHDAPVRSLNCT

SEQ ID NO: 12749 - DNA, 810 bp, Artificial Sequence
  derived and/or modified sequence
atggccgaggtgcccgagctggccagcgagatgatggcctactacagcggcaacgaggacgacctgttcttcgaggccgacggccccaagcagatgaagtgcagcttccaggacctggacctgtgccccctggacggcggcatccagctgagaatcagcgaccaccactacagcaagggcttcagacaggccgccagcgtggtggtggccatggacaagctgagaaagatgctggtgccctgcccccagaccttccaggagaacgacctgagcaccttcttccccttcatcttcgaggaggagcccatcttcttcgacacctgggacaacgaggcctacgtgcacgacgcccccgtgagaagcctgaactgcaccctgagagacagccagcagaagagcctggtgatgagcggcccctacgagctgaaggccctgcacctgcagggccaggacatggagcagcaggtggtgttcagcatgagcttcgtgcagggcgaggagagcaacgacaagatccccgtggccctgggcctgaaggagaagaacctgtacctgagctgcgtgctgaaggacgacaagcccaccctgcagctggagagcgtggaccccaagaactaccccaagaagaagatggagaagagattcgtgttcaacaagatcgagatcaacaacaagctggagttcgagagcgcccagttccccaactggtacatcagcaccagccaggccgagaacatgcccgtgttcctgggcggcaccaagggcggccaggacatcaccgacttcaccatgcagttcgtgagcagctag

SEQ ID NO: 12750 - DNA, 336 bp, Artificial Sequence
  derived and/or modified sequence
atggccgaggtgcccgagctggccagcgagatgatggcctactacagcggcaacgaggacgacctgttcttcgaggccgacggccccaagcagatgaagtgcagcttccaggacctggacctgtgccccctggacggcggcatccagctgagaatcagcgaccaccactacagcaagggcttcagacaggccgccagcgtggtggtggccatggacaagctgagaaagatgctggtgccctgcccccagaccttccaggagaacgacctgagcaccttcttccccttcatcttcgaggaggagcccatcttcttcgacacctgggacaacgagtag

SEQ ID NO: 12751 - DNA, 432 bp, Artificial Sequence
  derived and/or modified sequence
atggccgaggtgcccgagctggccagcgagatgatggcctactacagcggcaacgaggacgacctgttcttcgaggccgacggccccaagcagatgaagtgcagcttccaggacctggacctgtgccccctggacggcggcatccagctgagaatcagcgaccaccactacagcaagggcttcagacaggccgccagcgtggtggtggccatggacaagctgagaaagatgctggtgccctgcccccagaccttccaggagaacgacctgagcaccttcttccccttcatcttcgaggaggagcccatcttcttcgacacctgggacaacgaggcctacgtgcacgacgcccccgtgagaagcctgaactgcaccctgagagacagccagcagaagagcctggtgatgagcggcccctacgagctgaagtag

SEQ ID NO: 12752 - DNA, 378 bp, Artificial Sequence
  derived and/or modified sequence
atggccgaggtgcccgagctggccagcgagatgatggcctactacagcggcaacgaggacgacctgttcttcgaggccgacggccccaagcagatgaagtgcagcttccaggacctggacctgtgccccctggacggcggcatccagctgagaatcagcgaccaccactacagcaagggcttcagacaggccgccagcgtggtggtggccatggacaagctgagaaagatgctggtgccctgcccccagaccttccaggagaacgacctgagcaccttcttccccttcatcttcgaggaggagcccatcttcttcgacacctgggacaacgaggcctacgtgcacgacgcccccgtgagaagcctgaactgcacctag

SEQ ID NO: 12753 - DNA, 810 bp, Artificial Sequence
  derived and/or modified sequence
atggctgaagtgcctgaattagcaagtgagatgatggcgtactacagcggaaacgaggatgatctcttttttgaggcagacggacccaagcaaatgaaatgtagtttccaggatctcgatttgtgtccactcgacgggggtatccagctgcgcatctcagatcaccattacagtaaggggtttagacaagcagcgtcagtggttgtggcaatggataaactgcggaagatgctagtcccttgccctcagacgtttcaggagaatgacctgtccacattcttcccattcattttcgaagaggaaccaattttttttgacacttgggataacgaagcctatgtgcatgatgctcccgtgcgcagtctcaattgtacactgcgggattcacagcagaaatctctggttatgtctgggccctacgaactgaaggccctgcacctgcagggccaggacatggagcagcaggtggttttctccatgtcctttgtacagggtgaggagagcaacgataagattcccgtggcactggggttaaaggagaagaacctctacctctcttgcgtgttgaaggatgataaaccaacattgcagctggagagcgtggatccgaaaaactatcccaagaagaaaatggagaaacgcttcgtgtttaacaaaatagagatcaataataagctggaatttgagagcgcacaattcccaaattggtacatctccacctctcaggcggagaacatgccagtatttctcgggggtaccaaaggagggcaagacatcacagactttaccatgcagtttgtgtctagctag

SEQ ID NO: 12754 - DNA, 336 bp, Artificial Sequence
  derived and/or modified sequence
atggcggaggtcccagaactagcttccgaaatgatggcatactattcagggaacgaggatgacctgttcttcgaggctgacgggcccaagcagatgaaatgcagctttcaagatctggatttatgccccctggatggcgggattcagctgcgcatctccgaccaccattactctaaggggtttagacaggccgccagtgtagttgtggctatggacaagctgcgtaaaatgctcgtaccttgtcctcagacgtttcaggaaaatgaccttagtaccttttttccctttatcttcgaggaggagcctatcttcttcgacacatgggataacgagtag

SEQ ID NO: 12755 - DNA, 432 bp, Artificial Sequence
  derived and/or modified sequence
atggctgaggtgcccgagttggcttctgagatgatggcctactacagcggcaatgaagacgacctgtttttcgaagccgatggccccaagcagatgaaatgctcattccaagatctggacttgtgtccactggatggagggattcagctgcgaatcagtgaccatcattactctaaggggtttcggcaggccgcctccgtcgtcgtcgcaatggacaaattacgaaaaatgcttgttccatgcccacagacattccaggaaaacgacctgagcaccttcttcccattcatattcgaggaagagcccatcttcttcgatacctgggacaacgaagcatatgtgcatgatgcccctgtaagatccctgaattgcacacttagagattcacagcagaaatcactggtgatgtccgggccctatgaattaaagtag

SEQ ID NO: 12756 - DNA, 378 bp, Artificial Sequence
  derived and/or modified sequence
atggccgaagtgcctgagcttgcatcagaaatgatggcctattacagcggcaatgaggatgatttgttctttgaggccgacggacctaaacagatgaagtgcagcttccaggacttagatttgtgccccttggacggggggattcaattgaggatttctgatcaccactattcaaagggttttagacaggccgccagtgtagtggtggccatggacaaactacggaagatgctggtgccctgcccacagacatttcaggaaaacgacctgagcactttttttccattcattttcgaggaagaacccatctttttcgacacatgggacaatgaagcctacgtccacgacgcccctgttaggagcctgaattgcacctag

SEQ ID NO: 12757 - DNA, 810 bp, Artificial Sequence
  derived and/or modified sequence
atggccgaggtgcctgagctggccagcgagatgatggcctactacagcggaaatgaagatgacctcttctttgaagcagatggccccaagcagatgaagtgcagcttccaggacctggacctgtgccccctggatggcggcatccagctgcgcatcagtgaccaccactacagcaagggcttccggcaggccgcctctgtggtggtggccatggacaagctgaggaagatgctggtgccctgcccccagaccttccaggagaatgacctgagcaccttcttccccttcatctttgaggaggagcccatcttctttgacacctgggacaatgaggcctacgtgcatgatgcccctgtgcgcagcctgaactgcaccctgcgggacagccagcagaagagcctggtgatgagcggcccctatgagctgaaggccctgcacctgcagggccaggacatggagcagcaggtggtgttctccatgagctttgtgcagggcgaggagagcaatgacaagatccctgtggccctgggcctgaaggagaagaacctgtacctgagctgtgtgctgaaggatgacaagcccaccctgcagctggagagcgtggaccccaagaactaccccaagaagaagatggagaagagatttgtgttcaacaagattgagatcaacaacaagctggagtttgagagcgcccagttccccaactggtacatcagcaccagccaggccgagaacatgcctgtgttcctgggcggcaccaagggcggccaggacatcacagacttcaccatgcagtttgtgagcagctag

SEQ ID NO: 12758 - DNA, 336 bp, Artificial Sequence
  derived and/or modified sequence
atggccgaggtgcctgagctggccagcgagatgatggcctactacagcggaaatgaagatgacctcttctttgaagcagatggccccaagcagatgaagtgcagcttccaggacctggacctgtgccccctggatggcggcatccagctgcgcatcagtgaccaccactacagcaagggcttccggcaggccgcctctgtggtggtggccatggacaagctgaggaagatgctggtgccctgcccccagaccttccaggagaatgacctgagcaccttcttccccttcatctttgaggaggagcccatcttctttgacacctgggacaatgaatag

SEQ ID NO: 12759 - DNA, 432 bp, Artificial Sequence
  derived and/or modified sequence
atggccgaggtgcctgagctggccagcgagatgatggcctactacagcggaaatgaagatgacctcttctttgaagcagatggccccaagcagatgaagtgcagcttccaggacctggacctgtgccccctggatggcggcatccagctgcgcatcagtgaccaccactacagcaagggcttccggcaggccgcctctgtggtggtggccatggacaagctgaggaagatgctggtgccctgcccccagaccttccaggagaatgacctgagcaccttcttccccttcatctttgaggaggagcccatcttctttgacacctgggacaatgaggcctacgtgcatgatgcccctgtgcgcagcctgaactgcaccctgcgggacagccagcagaagagcctggtgatgagcggcccctatgagctgaagtag

SEQ ID NO: 12760 - DNA, 378 bp, Artificial Sequence
  derived and/or modified sequence
atggccgaggtgcctgagctggccagcgagatgatggcctactacagcggaaatgaagatgacctcttctttgaagcagatggccccaagcagatgaagtgcagcttccaggacctggacctgtgccccctggatggcggcatccagctgcgcatcagtgaccaccactacagcaagggcttccggcaggccgcctctgtggtggtggccatggacaagctgaggaagatgctggtgccctgcccccagaccttccaggagaatgacctgagcaccttcttccccttcatctttgaggaggagcccatcttctttgacacctgggacaatgaggcctacgtgcatgatgcccctgtgcgcagcctgaactgcacctag

SEQ ID NO: 12761 - DNA, 1631 bp, Artificial Sequence
  derived and/or modified sequence
accaatactcttttcccctttcctttaacttgattgtgaaatcaggtattcaacagagaaatttctcagcctcctacttctgcttttgaaagccataaaaacagcgagggagaaactggcagataccaaacctcttcgaggcacaaggcacaacaggctgctctgggattctcttcagccaatcttcattgctcaagtgtctgaagcagccatggcagaagtacctgagctcgccagtgaaatgatggcttattacagtggcaatgaggatgacttgttctttgaagctgatggccctaaacagatgaagtgctccttccaggacctggacctctgccctctggatggcggcatccagctacgaatctccgaccaccactacagcaagggcttcaggcaggccgcgtcagttgttgtggccatggacaagctgaggaagatgctggttccctgcccacagaccttccaggagaatgacctgagcaccttctttcccttcatctttgaagaagaacctatcttcttcgacacatgggataacgaggcttatgtgcacgatgcacctgtacgatcactgaactgcacgctccgggactcacagcaaaaaagcttggtgatgtctggtccatatgaactgaaagctctccacctccagggacaggatatggagcaacaagtggtgttctccatgtcctttgtacaaggagaagaaagtaatgacaaaatacctgtggccttgggcctcaaggaaaagaatctgtacctgtcctgcgtgttgaaagatgataagcccactctacagctggagagtgtagatcccaaaaattacccaaagaagaagatggaaaagcgatttgtcttcaacaagatagaaatcaataacaagctggaatttgagtctgcccagttccccaactggtacatcagcacctctcaagcagaaaacatgcccgtcttcctgggagggaccaaaggcggccaggatataactgacttcaccatgcaatttgtgtcttcctaaagagagctgtacccagagagtcctgtgctgaatgtggactcaatccctagggctggcagaaagggaacagaaaggtttttgagtacggctatagcctggactttcctgttgtctacaccaatgcccaactgcctgccttagggtagtgctaagaggatctcctgtccatcagccaggacagtcagctctctcctttcagggccaatccccagcccttttgttgagccaggcctctctcacctctcctactcacttaaagcccgcctgacagaaaccacggccacatttggttctaagaaaccctctgtcattcgctcccacattctgatgagcaaccgcttccctatttatttatttatttgtttgtttgttttattcattggtctaatttattcaaagggggcaagaagtagcagtgtctgtaaaagagcctagtttttaatagctatggaatcaattcaatttggactggtgtgctctctttaaatcaagtcctttaattaagactgaaaatatataagctcagattatttaaatgggaatatttataaatgagcaaatatcatactgttcaatggttctgaaataaacttcactgaagaaaaaaaaa

SEQ ID NO: 12762 - DNA, 580 bp, Artificial Sequence
  derived and/or modified sequence
actttaatcttccttacaactaggtgctaagggagtctctctgtctctctgcctctttgtgtgtatgcatattctctctctctctctctttctttctctgtctctccctctccttccctctctgcctccctctctcagctttttgcaaaaatgccaggtgtaatataatgcttatgactcgggaaatattctgggaatggatactgcttatctaacagctgacaccctaaaggtgtctgaagcagccatggcagaagtacctgagctcgccagtgaaatgatggcttattacagtggcaatgaggatgacttgttctttgaagctgatggccctaaacagatgaagtgctccttccaggacctggacctctgccctctggatggcggcatccagctacgaatctccgaccaccactacagcaagggcttcaggcaggccgcgtcagttgttgtggccatggacaagctgaggaagatgctggttccctgcccacagaccttccaggagaatgacctgagcaccttctttcccttcatctttgaagaagaacctatcttcttcgacacatgggataacgag

SEQ ID NO: 12763 - DNA, 581 bp, Artificial Sequence
  derived and/or modified sequence
gaaagccataaaaacagcgagggagaaactggcagataccaaacctcttcgaggcacaaggcacaacaggctgctctgggattctcttcagccaatcttcattgctcaagtatgactttaatcttccttacaactaggtgtctgaagcagccatggcagaagtacctgagctcgccagtgaaatgatggcttattacagtggcaatgaggatgacttgttctttgaagctgatggccctaaacagatgaagtgctccttccaggacctggacctctgccctctggatggcggcatccagctacgaatctccgaccaccactacagcaagggcttcaggcaggccgcgtcagttgttgtggccatggacaagctgaggaagatgctggttccctgcccacagaccttccaggagaatgacctgagcaccttctttcccttcatctttgaagaagaacctatcttcttcgacacatgggataacgaggcttatgtgcacgatgcacctgtacgatcactgaactgcacgctccgggactcacagcaaaaaagcttggtgatgtctggtccatatgaactgaaa

SEQ ID NO: 12764 - DNA, 581 bp, Artificial Sequence
  derived and/or modified sequence
aatacattgctagttggggtttggtttagcaaatgcttttctctagacccaaaggacttctctttcacacattcattcatttactcagagatcatttctttgcatgactgccatgcactggatgctgagagaaatcacacatgaacgtagccgtcatggggaagtcactcattttctcctttttacacaggtgtctgaagcagccatggcagaagtacctgagctcgccagtgaaatgatggcttattacagtggcaatgaggatgacttgttctttgaagctgatggccctaaacagatgaagtgctccttccaggacctggacctctgccctctggatggcggcatccagctacgaatctccgaccaccactacagcaagggcttcaggcaggccgcgtcagttgttgtggccatggacaagctgaggaagatgctggttccctgcccacagaccttccaggagaatgacctgagcaccttctttcccttcatctttgaagaagaacctatcttcttcgacacatgggataacgaggcttatgtgcacgatgcacctgtacgatcactgaactgcacgc

SEQ ID NO: 12765 - DNA, 810 bp, Artificial Sequence
  derived and/or modified sequence
atggccgaggtgcccgagctggccagcgagatgatggcctactactccgggaacgaggatgatctattttttgaagcagacggtcctaaacagatgaagtgttcattccaagacctggatctgtgtccgctggacggtgggatccagctcaggatatctgatcaccattattccaagggttttcgtcaggccgcttctgtggtggtggcaatggataaactgcgcaagatgctggtgccctgtccccagacgttccaggaaaatgacttaagcaccttcttcccttttatttttgaagaggagccaatctttttcgatacgtgggacaatgaggcttatgttcacgatgccccggtgaggagcttgaattgcacactgcgtgactcccagcagaaaagcttggtgatgagcgggccatatgagctcaaggctctgcacctgcagggccaggatatggaacagcaagttgtcttctcaatgtcattcgtgcaaggcgaggaaagtaacgataagatccctgttgcgctgggacttaaagaaaagaatctgtatctgagttgcgtgttgaaggatgacaaacctaccttacagctggagagcgtggatcccaagaattaccccaaaaaaaagatggagaagcgattcgtgtttaacaaaattgagatcaacaacaagctggagtttgaatctgcacagttccctaactggtacatttcaactagtcaggctgaaaatatgcctgtctttctcggaggaaccaaagggggccaagacataaccgactttaccatgcagttcgtgagttcctag

SEQ ID NO: 12766 - DNA, 336 bp, Artificial Sequence
  derived and/or modified sequence
atggccgaggtgcccgagctggccagcgagatgatggcctactactctggaaatgaggacgacttgttcttcgaagctgatgggccaaaacagatgaagtgctcctttcaggacctagacctatgcccccttgacggcggaattcagcttagaatttccgaccatcattactcaaaagggttccgccaggctgcctccgtggtggtggccatggataagttaagaaaaatgcttgtgccctgtccacagacctttcaggagaatgatcttagcacattttttcctttcatatttgaggaggaacccattttcttcgatacctgggataacgagtag

SEQ ID NO: 12767 - DNA, 432 bp, Artificial Sequence
  derived and/or modified sequence
atggccgaggtgcccgagctggccagcgagatgatggcctactacagcggcaacgaggacgatttgttctttgaggccgacggaccaaaacagatgaagtgttcctttcaagacttagatttgtgccctctggatggcggaatccagctgcggatttcagaccaccactactcgaaggggtttagacaagcggccagcgtcgtggtggcaatggacaaattacgaaagatgctggttccatgccctcagacatttcaggagaacgatctgagcaccttcttcccattcatttttgaagaggagccaatattcttcgacacctgggacaatgaggcctacgttcacgacgctcctgtacgttccctcaactgtaccctgcgcgactcacagcaaaagtcccttgtaatgtctggaccttacgagttaaagtag

SEQ ID NO: 12768 - DNA, 378 bp, Artificial Sequence
  derived and/or modified sequence
atggccgaggtgcccgagctggccagcgagatgatggcctactacagtggaaacgaggatgatctgtttttcgaagccgacggtcccaaacaaatgaagtgctccttccaggacctcgacctctgtcctctagacgggggaattcagttgcggataagcgaccatcactactctaaaggtttcaggcaagccgcgtctgtggtggttgcgatggacaagttgagaaagatgttggtgccgtgcccgcaaaccttccaggagaatgacctaagcacgttctttccttttatctttgaggaggaacctatcttctttgacacctgggataatgaggcatatgtccacgatgctcctgtcaggtcgctgaactgtacatag

SEQ ID NO: 12769 - DNA, 810 bp, Artificial Sequence
  derived and/or modified sequence
atggcagaggtgcctgaacttgcgagcgagatgatggcatactattcaggcaacgaggatgacctgtttttcgaggctgatggcccaaagcagatgaaatgcagttttcaagacctcgacctgtgtcccctagacggaggaattcagcttcgaatttccgatcaccattactccaagggcttcaggcaggcagcctctgtcgttgtagccatggacaaacttcggaagatgctcgtgccctgcccccagaccttccaggagaacgatttatccacattttttccctttatctttgaggaggagccaatctttttcgacacatgggataacgaagcttacgtccatgatgcccctgtaaggtctctgaactgcaccctgcgtgactctcagcagaagtccttagtaatgtccggcccttatgagctcaaggccttgcatctgcaaggccaggacatggagcagcaggtagtcttcagtatgagtttcgtacagggagaagaatcaaacgataagatccccgtggcattagggctgaaagagaagaatctttacctctcctgcgtgctgaaggatgacaaaccgaccctccagttggaatcagtagatcccaaaaactacccaaaaaaaaagatggagaagcgcttcgtgttcaacaagatcgagatcaataataagctcgagttcgagtctgcacagttccccaattggtatattagcacatctcaagcggaaaatatgcctgtgtttctgggaggaaccaaggggggtcaggatataacagactttactatgcagttcgtgtcatcatag

SEQ ID NO: 12770 - DNA, 336 bp, Artificial Sequence
  derived and/or modified sequence
atggctgaagttcccgagctggccagcgagatgatggcttactacagtggaaacgaggacgaccttttttttgaagccgacggtcctaagcagatgaaatgcagcttccaggatctggacctctgtccgttggatgggggaatccagcttagaatctctgaccatcattactcgaaaggcttccgccaagcggcttcagtggttgtcgctatggataaattgagaaagatgttagtgccatgtccacaaacatttcaggagaacgacctcagcacttttttcccttttatttttgaagaagaaccgatcttcttcgatacatgggacaatgagtag

SEQ ID NO: 12771 - DNA, 432 bp, Artificial Sequence
  derived and/or modified sequence
atggcagaggtgccagagctggcttcagaaatgatggcctactacagcggcaacgaggacgatcttttcttcgaagccgacggtcccaagcaaatgaaatgtagttttcaggacctcgacctgtgtccactggacggcggaatccaacttcgcatcagcgaccaccactatagtaagggtttccgacaagctgcctctgttgtggtggccatggacaaacttcgaaaaatgctggtcccatgcccgcagacttttcaagaaaacgacctcagcacttttttcccgttcatcttcgaggaggagcctatcttttttgacacctgggacaatgaggcttatgtgcatgatgccccagtgcggtccttgaactgtactctgcgtgacagtcagcagaagtctttggtgatgagcggaccttatgaactgaagtag

SEQ ID NO: 12772 - DNA, 378 bp, Artificial Sequence
  derived and/or modified sequence
atggccgaagtgcccgagctggcctccgagatgatggcttactattcggggaatgaggatgacctgttctttgaggcagacggtcctaaacaaatgaaatgctcttttcaggatctggatctctgcccactggacggtggcattcaactccgcatctcggaccaccactacagcaaggggttccgccaggctgcatctgtggtggtggcgatggataaactccgtaaaatgctggtgccctgtccacagacctttcaagaaaacgatttatctaccttctttccatttatcttcgaggaagagcctatcttcttcgacacatgggataatgaggcctatgtgcatgatgccccagtgcgtagtctgaattgcacgtag

SEQ ID NO: 12773 - protein, 159 aa, Artificial Sequence
  derived and/or modified sequence
MALETICRPSGRKSSKMQAFRIWDVNQKTFYLRNNQLVAGYLQGPNVNLEEKIDVVPIEPHALFLGIHGGKMCLSCVKSGDETRLQLEAVNITDLSENRKQDKRFAFIRSDSGPTTSFESAACPGWFLCTAMEADQPVSLTNMPDEGVMVTKFYFQEDE

SEQ ID NO: 12774 - protein, 143 aa, Artificial Sequence
  derived and/or modified sequence
MQAFRIWDVNQKTFYLRNNQLVAGYLQGPNVNLEEKIDVVPIEPHALFLGIHGGKMCLSCVKSGDETRLQLEAVNITDLSENRKQDKRFAFIRSDSGPTTSFESAACPGWFLCTAMEADQPVSLTNMPDEGVMVTKFYFQEDE

SEQ ID NO: 12775 - DNA, 480 bp, Artificial Sequence
  derived and/or modified sequence
atggccctggagaccatctgcagacccagcggcagaaagagcagcaagatgcaggccttcagaatctgggacgtgaaccagaagaccttctacctgagaaacaaccagctggtggccggctacctgcagggccccaacgtgaacctggaggagaagatcgacgtggtgcccatcgagccccacgccctgttcctgggcatccacggcggcaagatgtgcctgagctgcgtgaagagcggcgacgagaccagactgcagctggaggccgtgaacatcaccgacctgagcgagaacagaaagcaggacaagagattcgccttcatcagaagcgacagcggccccaccaccagcttcgagagcgccgcctgccccggctggttcctgtgcaccgccatggaggccgaccagcccgtgagcctgaccaacatgcccgacgagggcgtgatggtgaccaagttctacttccaggaggacgagtag

SEQ ID NO: 12776 - DNA, 480 bp, Artificial Sequence
  derived and/or modified sequence
atggctctggagacaatttgcagaccgtccgggcggaagtcaagcaaaatgcaggcttttcgtatctgggacgtcaaccagaagacattctacctgcgcaacaatcaattagttgcgggttacctccaggggcctaatgtcaatttggaggagaaaattgatgtagtccctattgagccccatgcgctattcctgggaatccatggagggaagatgtgtttgtcttgcgtgaagtcaggagacgaaaccaggctccaattggaggcggtgaacatcaccgacctgagcgagaatagaaagcaggataaacgatttgccttcatacggagtgactcaggccctaccacatcctttgagagcgctgcctgccccgggtggtttctgtgcactgccatggaagccgaccagccagtctcattaaccaacatgcccgacgagggagtcatggtcacaaaattctactttcaggaggacgaatag

SEQ ID NO: 12777 - DNA, 480 bp, Artificial Sequence
  derived and/or modified sequence
atggccctggagaccatctgccggcccagcggcaggaagagcagcaagatgcaggccttccgcatctgggatgtgaaccagaagaccttctacctgaggaacaaccagctggtggccggctacctgcagggccccaacgtgaacctggaggagaagattgatgtggtgcccatcgagccccacgccctcttcctgggcatccacggcggcaagatgtgcctgagctgtgtgaagtctggagatgagacccggctgcagctggaggccgtgaacatcacagacctgtctgaaaataggaagcaggacaagagatttgccttcatccgcagtgacagcggccccaccaccagctttgagagcgctgcctgccccggctggttcctgtgcacagccatggaggccgaccagcctgtgtccctgaccaacatgccagatgaaggagtgatggtgaccaagttctacttccaggaggatgaatag

SEQ ID NO: 12778 - DNA, 1747 bp, Artificial Sequence
  derived and/or modified sequence
agctccaccctgggagggactgtggcccaggtactgcccgggtgctactttatgggcagcagctcagttgagttagagtctggaagacctcagaagacctcctgtcctatgaggccctccccatggctttagagacgatctgccgaccctctgggagaaaatccagcaagatgcaagccttcagaatctgggatgttaaccagaagaccttctatctgaggaacaaccaactagttgctggatacttgcaaggaccaaatgtcaatttagaagaaaagatagatgtggtacccattgagcctcatgctctgttcttgggaatccatggagggaagatgtgcctgtcctgtgtcaagtctggtgatgagaccagactccagctggaggcagttaacatcactgacctgagcgagaacagaaagcaggacaagcgcttcgccttcatccgctcagacagtggccccaccaccagttttgagtctgccgcctgccccggttggttcctctgcacagcgatggaagctgaccagcccgtcagcctcaccaatatgcctgacgaaggcgtcatggtcaccaaattctacttccaggaggacgagtagtactgcccaggcctgcctgttcccattcttgcatggcaaggactgcagggactgccagtccccctgccccagggctcccggctatgggggcactgaggaccagccattgaggggtggaccctcagaaggcgtcacaacaacctggtcacaggactctgcctcctcttcaactgaccagcctccatgctgcctccagaatggtctttctaatgtgtgaatcagagcacagcagcccctgcacaaagcccttccatgtcgcctctgcattcaggatcaaaccccgaccacctgcccaacctgctctcctcttgccactgcctcttcctccctcattccaccttcccatgccctggatccatcaggccacttgatgacccccaaccaagtggctcccacaccctgttttacaaaaaagaaaagaccagtccatgagggaggtttttaagggtttgtggaaaatgaaaattaggatttcatgatttttttttttcagtccccgtgaaggagagcccttcatttggagattatgttctttcggggagaggctgaggacttaaaatattcctgcatttgtgaaatgatggtgaaagtaagtggtagcttttcccttctttttcttctttttttgtgatgtcccaacttgtaaaaattaaaagttatggtactatgttagccccataattttttttttccttttaaaacacttccataatctggactcctctgtccaggcactgctgcccagcctccaagctccatctccactccagattttttacagctgcctgcagtactttacctcctatcagaagtttctcagctcccaaggctctgagcaaatgtggctcctgggggttctttcttcctctgctgaaggaataaattgctccttgacattgtagagcttctggcacttggagacttgtatgaaagatggctgtgcctctgcctgtctcccccaccgggctgggagctctgcagagcaggaaacatgactcgtatatgtctcaggtccctgcagggccaagcacctagcctcgctcttggcaggtactcagcgaatgaatgctgtatatgttgggtgcaaagttccctacttcctgtgacttcagctctgttttacaataaaatcttgaaaatgccta

SEQ ID NO: 12779 - DNA, 1922 bp, Artificial Sequence
  derived and/or modified sequence
gggcagctccaccctgggagggactgtggcccaggtactgcccgggtgctactttatgggcagcagctcagttgagttagagtctggaagacctcagaagacctcctgtcctatgaggccctccccatggctttagggggattataaaactaatcatcaaagccaagaaggcaagagcaagcatgtaccgctgaaaacacaagataactgcataagtaatgactttcagtgcagattcatagctaacccataaactgctggggcaaaaatcatcttggaaggctctgaacctcagaaaggattcacaagacgatctgccgaccctctgggagaaaatccagcaagatgcaagccttcagaatctgggatgttaaccagaagaccttctatctgaggaacaaccaactagttgctggatacttgcaaggaccaaatgtcaatttagaagaaaagatagatgtggtacccattgagcctcatgctctgttcttgggaatccatggagggaagatgtgcctgtcctgtgtcaagtctggtgatgagaccagactccagctggaggcagttaacatcactgacctgagcgagaacagaaagcaggacaagcgcttcgccttcatccgctcagacagtggccccaccaccagttttgagtctgccgcctgccccggttggttcctctgcacagcgatggaagctgaccagcccgtcagcctcaccaatatgcctgacgaaggcgtcatggtcaccaaattctacttccaggaggacgagtagtactgcccaggcctgcctgttcccattcttgcatggcaaggactgcagggactgccagtccccctgccccagggctcccggctatgggggcactgaggaccagccattgaggggtggaccctcagaaggcgtcacaacaacctggtcacaggactctgcctcctcttcaactgaccagcctccatgctgcctccagaatggtctttctaatgtgtgaatcagagcacagcagcccctgcacaaagcccttccatgtcgcctctgcattcaggatcaaaccccgaccacctgcccaacctgctctcctcttgccactgcctcttcctccctcattccaccttcccatgccctggatccatcaggccacttgatgacccccaaccaagtggctcccacaccctgttttacaaaaaagaaaagaccagtccatgagggaggtttttaagggtttgtggaaaatgaaaattaggatttcatgatttttttttttcagtccccgtgaaggagagcccttcatttggagattatgttctttcggggagaggctgaggacttaaaatattcctgcatttgtgaaatgatggtgaaagtaagtggtagcttttcccttctttttcttctttttttgtgatgtcccaacttgtaaaaattaaaagttatggtactatgttagccccataattttttttttccttttaaaacacttccataatctggactcctctgtccaggcactgctgcccagcctccaagctccatctccactccagattttttacagctgcctgcagtactttacctcctatcagaagtttctcagctcccaaggctctgagcaaatgtggctcctgggggttctttcttcctctgctgaaggaataaattgctccttgacattgtagagcttctggcacttggagacttgtatgaaagatggctgtgcctctgcctgtctcccccaccgggctgggagctctgcagagcaggaaacatgactcgtatatgtctcaggtccctgcagggccaagcacctagcctcgctcttggcaggtactcagcgaatgaatgctgtatatgttgggtgcaaagttccctacttcctgtgacttcagctctgttttacaataaaatcttgaaaatgccta

SEQ ID NO: 12780 - DNA, 480 bp, Artificial Sequence
  derived and/or modified sequence
atggccctggagaccatctgccggcccagcggccggaagagcagcaagatgcaagcattccgcatttgggacgttaatcagaagacattctatctgcgcaataaccagctcgtggctggatatctgcagggacctaatgtgaatcttgaggaaaagattgatgtggttccgatagaaccgcatgctctgttccttgggattcatggcggcaagatgtgtctgtcctgcgtcaagagcggcgacgaaacccgattacagctggaggctgtgaacatcacagacctctcagaaaatcggaagcaggataaacggtttgcctttatccggtcagactcaggacccacaacctcgtttgagtctgcggcgtgccctggctggttcttatgtacagccatggaagcagaccagccagtgtccttaaccaacatgccagacgaaggtgtgatggtgactaaattctactttcaggaggacgaatag

SEQ ID NO: 12781 - DNA, 480 bp, Artificial Sequence
  derived and/or modified sequence
atggcgttggagacaatatgtagaccttcagggagaaagagctccaagatgcaggcgttcagaatctgggatgtcaaccagaagacgttttacctgagaaataaccagctggttgccggatacctccagggcccaaacgtgaacctagaggagaaaatcgacgtggtcccgatcgaacctcacgcgctctttctgggtatacacggtgggaaaatgtgtctctcatgcgtgaaaagcggagatgaaacacgcctgcagcttgaagccgttaacatcacagacctgagcgagaatagaaagcaggacaagcgatttgcttttatcagatcagacagcggccctaccacctcatttgagagtgcagcttgtccaggctggttcctatgcaccgctatggaggctgaccagcctgtgtcacttacgaatatgccagatgagggcgtgatggttactaaattttacttccaggaggacgagtag

SEQ ID NO: 12782 - protein, 550 aa, Artificial Sequence
  derived and/or modified sequence
MTGDKGPQRLSGSSYGSISSPTSPTSPGPQQAPPRETYLSEKIPIPDTKPGTFSLRKLWAFTGPGFLMSIAFLDPGNIESDLQAGAVAGFKLLWVLLWATVLGLLCQRLAARLGVVTGKDLGEVCHLYYPKVPRTVLWLTIELAIVGSDMQEVIGTAIAFNLLSAGRIPLWGGVLITIVDTFFFLFLDNYGLRKLEAFFGLLITIMALTFGYEYVVARPEQGALLRGLFLPSCPGCGHPELLQAVGIVGAIIMPHNIYLHSALVKSREIDRARRADIREANMYFLIEATIALSVSFIINLFVMAVFGQAFYQKTNQAAFNICANSSLHDYAKIFPMNNATVAVDIYQGGVILGCLFGPAALYIWAIGLLAAGQSSTMTGTYAGQFVMEGFLRLRWSRFARVLLTRSCAILPTVLVAVFRDLRDLSGLNDLLNVLQSLLLPFAVLPILTFTSMPTLMQEFANGLLNKVVTSSIMVLVCAINLYFVVSYLPSLPHPAYFGLAALLAAAYLGLSTYLVWTCCLAHGATFLAHSSHHHFLYGLLEEDQKGETSG

SEQ ID NO: 12783 - protein, 163 aa, Artificial Sequence
  derived and/or modified sequence
MTGDKGPQRLSGSSYGSISSPTSPTSPGPQQAPPRETYLSEKIPIPDTKPGTFSLRKLWAFTGPGFLMSIAFLDPGNIESDLQAGAVAGFKLLWVLLWATVLGLLCQRLAARLGVVTGKDLGEVCHLYYPKSESRSVAQSGVQWCDVSSLQPLPPRCPAPSSG

SEQ ID NO: 12784 - DNA, 1653 bp, Artificial Sequence
  derived and/or modified sequence
atgaccggcgacaagggcccccagagactgagcggcagcagctacggcagcatcagcagccccaccagccccaccagccccggcccccagcaggccccccccagagagacctacctgagcgagaagatccccatccccgacaccaagcccggcaccttcagcctgagaaagctgtgggccttcaccggccccggcttcctgatgagcatcgccttcctggaccccggcaacatcgagagcgacctgcaggccggcgccgtggccggcttcaagctgctgtgggtgctgctgtgggccaccgtgctgggcctgctgtgccagagactggccgccagactgggcgtggtgaccggcaaggacctgggcgaggtgtgccacctgtactaccccaaggtgcccagaaccgtgctgtggctgaccatcgagctggccatcgtgggcagcgacatgcaggaggtgatcggcaccgccatcgccttcaacctgctgagcgccggcagaatccccctgtggggcggcgtgctgatcaccatcgtggacaccttcttcttcctgttcctggacaactacggcctgagaaagctggaggccttcttcggcctgctgatcaccatcatggccctgaccttcggctacgagtacgtggtggccagacccgagcagggcgccctgctgagaggcctgttcctgcccagctgccccggctgcggccaccccgagctgctgcaggccgtgggcatcgtgggcgccatcatcatgccccacaacatctacctgcacagcgccctggtgaagagcagagagatcgacagagccagaagagccgacatcagagaggccaacatgtacttcctgatcgaggccaccatcgccctgagcgtgagcttcatcatcaacctgttcgtgatggccgtgttcggccaggccttctaccagaagaccaaccaggccgccttcaacatctgcgccaacagcagcctgcacgactacgccaagatcttccccatgaacaacgccaccgtggccgtggacatctaccagggcggcgtgatcctgggctgcctgttcggccccgccgccctgtacatctgggccatcggcctgctggccgccggccagagcagcaccatgaccggcacctacgccggccagttcgtgatggagggcttcctgagactgagatggagcagattcgccagagtgctgctgaccagaagctgcgccatcctgcccaccgtgctggtggccgtgttcagagacctgagagacctgagcggcctgaacgacctgctgaacgtgctgcagagcctgctgctgcccttcgccgtgctgcccatcctgaccttcaccagcatgcccaccctgatgcaggagttcgccaacggcctgctgaacaaggtggtgaccagcagcatcatggtgctggtgtgcgccatcaacctgtacttcgtggtgagctacctgcccagcctgccccaccccgcctacttcggcctggccgccctgctggccgccgcctacctgggcctgagcacctacctggtgtggacctgctgcctggcccacggcgccaccttcctggcccacagcagccaccaccacttcctgtacggcctgctggaggaggaccagaagggcgagaccagcggctag

SEQ ID NO: 12785 - DNA, 1653 bp, Artificial Sequence
  derived and/or modified sequence
atgacaggtgacaagggtccccaaagactgtccggttcctcatatgggagcattagtagtccaacttctccaacatctcccggtccacagcaagcaccccctcgagagacctatctctcagaaaagattcctatccctgatactaagcccgggacattttcactgagaaaactgtgggcttttactgggcctggcttcttgatgtcgattgccttcttagacccggggaacattgaaagtgatctgcaggcaggcgcggttgctggatttaagctgctctgggttcttttgtgggccaccgtgctgggactgctgtgccagagactggccgctagactcggggtggtaactggcaaagatctgggagaggtgtgccacctgtattatccaaaagtgccccgaaccgtgctgtggctaactatagagctggccatagtggggagcgacatgcaggaggtgatcgggacggctatagcgtttaatctgctgagcgctggccgaattcctttgtggggtggagtcctcatcacaattgtggacaccttcttttttttattcctcgacaactacggactgcggaagctggaggccttcttcgggctcttgattaccatcatggcgctcacctttggatatgaatacgtggtcgctagacctgaacagggggctcttctcaggggattgtttctaccttcttgtcccggctgcggtcacccagaattactccaggctgtgggcattgttggagctattatcatgccccacaatatctatttgcattctgcactggtcaagtcccgggagatagatcgcgccagacgcgccgacatcagagaagccaacatgtatttcctgatcgaggctactatcgcgctgagcgtgagctttataattaacctgtttgtgatggcagtgtttggtcaggccttctatcagaagacgaatcaagcagctttcaacatctgtgccaattctagtcttcacgattacgcgaagatcttccccatgaacaacgccaccgtggcagtggatatttatcaaggtggtgttatccttgggtgtctgttcggcccagcagccctatacatctgggcgattggcctgctggctgccggccagtccagtacgatgacagggacttatgctggccagttcgtaatggagggattcctaagactcaggtggtctaggttcgcaagggtcctgttgacccgatcctgtgctatactaccaactgttttggttgcggtgttccgagatttgcgcgatctttcggggcttaatgacctactgaacgtactgcagtctttgctcctaccttttgctgtgctccccatattgacattcacttccatgccaacgttgatgcaggagttcgctaacgggttactgaacaaggttgtgacgtcctcaatcatggttctggtgtgcgcaataaatctttactttgtcgtctcttacctgccgagcttacctcatcccgcgtattttgggcttgccgctcttttggctgctgcctacctgggactgagcacctatctcgtttggacttgctgcctcgctcatggggccacctttcttgctcattcatcccatcaccattttctatatggcctgttagaggaagaccagaaaggtgaaacctctggctag

SEQ ID NO: 12786 - DNA, 1653 bp, Artificial Sequence
  derived and/or modified sequence
atgaccggggacaagggcccccagaggctgagcggcagcagctatggcagcatcagcagccccaccagccccaccagccctggcccccagcaggccccaccccgggagacctacctgtctgagaagatccccatcccagacaccaagccaggcaccttcagcctgaggaagctgtgggccttcaccggccctggcttcctgatgagcatcgccttcctggaccccggcaacatcgagagtgacctgcaggccggggctgtggccggcttcaagctgctgtgggtgctgctgtgggccaccgtgctgggcctgctgtgccagaggctggccgcccggctgggcgtggtgacaggcaaggacctgggggaggtgtgccacctgtactaccccaaggtgcccaggacagtgctgtggctgaccatcgagctggccatcgtgggcagtgacatgcaggaggtgattggaacagccatcgccttcaacctgctgtctgctggccgcatccccctgtggggcggcgtgctgatcaccatcgtggacaccttcttcttcctgttcctggacaactacggcctgaggaagctggaggccttcttcggcctgctgatcaccatcatggccctgaccttcggctatgaatatgtggtggcccggcctgagcagggcgccctgctgcggggcctcttcctgcccagctgccccggctgcggccaccctgagctgctgcaggccgtgggcatcgtgggcgccatcatcatgccccacaacatctacctgcacagcgccctggtgaagagccgggagattgaccgggccaggagagctgacatccgggaggccaacatgtacttcctgattgaggccaccatcgccctgtctgtgtccttcatcatcaacctgtttgtgatggctgtgtttggccaggccttctaccagaagaccaaccaggccgccttcaacatctgtgccaacagcagcctgcatgactatgccaagatcttccccatgaacaatgccaccgtggccgtggacatctaccagggcggcgtcatcctgggctgcctgtttggacctgctgccctgtacatctgggccatcggcctgctggccgccggccagagcagcaccatgacaggcacctacgccggccagtttgtgatggagggcttcctgcggctgcgctggagcagatttgcccgggtgctgctgaccaggagctgtgccatcctgcccaccgtgctggtggccgtgttccgggacctgcgggacctgagcggcctgaatgacctgctgaatgtgctgcagagcctgctgctgccctttgctgtgctgcccatcctgaccttcacctccatgcccaccctgatgcaggagtttgccaacggcctgctgaacaaggtggtgaccagcagcatcatggtgctggtgtgtgccatcaacctgtactttgtggtgtcctacctgcccagcctgccccacccagcctacttcggcctggccgccctgctggccgccgcctacctgggcctgagcacctacctggtgtggacctgctgcctggcccacggggccaccttcctggcccacagcagccaccaccacttcctgtatggcctgctggaggaggaccagaagggggagaccagcggctag

SEQ ID NO: 12787 - DNA, 1653 bp, Artificial Sequence
  derived and/or modified sequence
atgaccggcgacaagggcccccagcggctgagcggcagcagctacgggagcatttcatcgccaacctcccccacatcacctggccctcagcaagcccccccgcgcgagacatacctgtccgagaaaataccaattccagacactaaacctggcaccttctctttgcgtaaactctgggctttcactgggccaggattcctcatgtctatcgccttccttgatcccggcaacattgaatccgacctccaggccggggctgtcgccggattcaagctcttatgggtactgctgtgggccacagttctcggactactgtgccagcggctcgccgcaagattgggagtggtgaccggcaaagacttgggcgaagtttgtcacctgtattaccccaaagtcccaaggaccgttctctggcttaccatcgagctagctatagttggctctgacatgcaagaggtgattgggaccgcaatagcgttcaacttactttccgcgggccgaatacccctgtggggtggcgttctgataactatcgttgacacattcttctttcttttccttgacaattacggactccgcaaattagaagcctttttcggactgttaatcaccataatggccctcacctttggctacgaatacgtcgtggctcgccccgaacagggtgcattactgcgaggcctgtttctcccatcttgccccggctgtggccacccggagctgttgcaggcagtgggcatcgttggcgctattatcatgccccacaatatctatctgcacagcgcactcgtgaagtctagagagatcgacagagctaggagagcggatatcagggaggcgaacatgtatttcctcattgaggccaccatcgcccttagtgtctctttcataataaatctgttcgtgatggccgttttcgggcaggctttctatcagaagacgaaccaggcagctttcaatatctgtgcaaacagttccctgcacgactacgctaaaattttcccaatgaacaacgccacagtggccgtggacatctaccagggcggagtgatcctgggatgtctgtttggccccgccgctctatacatctgggcaattggactcctggccgccggccagtcatccacgatgactgggacttacgcagggcaatttgtgatggaaggattcctgaggctgcgctggtctcgctttgcacgggtactgctgactcgctcatgcgcgatactcccaacagtgctggttgctgtgttcagggatctgcgcgatctgtccggcctgaatgacctgttgaacgtccttcaatcactactgcttccgtttgcggtgcttcctatcttaacatttacgtcaatgccgaccctgatgcaggaattcgccaatggcctgttgaacaaggtcgtaacttcatcgatcatggtgctggtatgcgcgattaacctctacttcgttgtttcatatttgccatccctaccccaccccgcatacttcgggttggccgctctgttagcagccgcctatctcggcctcagcacctatctggtgtggacgtgctgtctcgctcacggtgctacttttttggcccactcctcccatcatcactttctctacgggctgctggaggaggaccaaaagggggaaacctctggatag

SEQ ID NO: 12788 - DNA, 1653 bp, Artificial Sequence
  derived and/or modified sequence
atgacaggagacaaggggcctcaacgtctcagcggctcttcctacggatccatatctagccctaccagcccaactagtccgggaccacagcaagcgccaccacgggagacatacctcagcgagaaaattccaattccggataccaagcccggaacgttttctctccgcaagttatgggcgtttacaggtcccggattccttatgagtattgcttttttagatccaggtaatatagagtcggatctccaggccggagctgtagcagggtttaagttactctgggtgctgttgtgggccacagtccttgggctgttgtgtcagcggctggcggctaggctcggggtggttacagggaaggacctgggagaggtgtgccacctctattatcccaaggtacctagaactgtactgtggctgactattgagctggccattgtgggttccgacatgcaagaagtgatcggaacggctattgctttcaatctcttgagtgctggcaggatacccctctggggcggagttttaattactatcgttgacacatttttttttttattcctggacaactatggcctacgaaaacttgaggcctttttcggtttgcttataaccattatggcactcacgttcggatatgaatatgtggttgctcgcccagagcagggcgctctgctgagaggactctttctcccgtcctgcccagggtgtgggcacccagaactgctgcaagcggtcgggatcgttggagccataatcatgcctcataacatctacctccacagtgcacttgtcaagtcacgcgagatcgatagggctcgccgtgccgacatcagagaagctaatatgtactttctcatcgaagctaccattgccctgagcgtgtctttcataatcaacctgtttgtgatggctgtctttggtcaagccttttaccagaagactaaccaggcagctttcaatatttgtgctaacagctctctgcacgattatgcaaagatatttcctatgaacaatgcgacagtcgcggttgacatttaccaaggtggcgtcattctggggtgcctatttggccctgccgcactgtatatttgggctatcggactattggcagcaggccaatcgtccacgatgactggcacctatgcaggccagttcgtcatggagggctttctcagattacgatggtcgcggtttgccagggtgcttctgaccaggtcttgcgccattttgccaactgtcctagtagctgtattccgcgacctcagggaccttagcgggctgaacgacctccttaatgtcctccagagtcttctgttaccttttgctgtccttccaatccttacttttactagcatgccaacactcatgcaggagttcgctaatggtcttcttaataaggtagtcacctcttccatcatggttctcgtgtgtgcgatcaacttgtatttcgttgttagttatttgccctccctacctcatcccgcttactttggcctcgccgctttactggcagctgcataccttggactgagcacatatctcgtctggacatgctgcctagcacacggcgctaccttcctggcccacagtagccaccatcattttctgtacgggttactggaggaggaccagaaaggagagacctcaggatag

SEQ ID NO: 12789 - DNA, 492 bp, Artificial Sequence
  derived and/or modified sequence
atgaccggcgacaaaggaccacagcgtctctccgggtctagctatgggagtatatcttcccccaccagtcctacatcccctgggccccagcaagcgcccccaagagaaacatacctgtcggagaaaatccccatccccgacaccaaaccaggtacattctccctgaggaaactgtgggccttcacaggtccaggatttctgatgtcaatcgcatttctggaccccgggaacatcgaatcagatctccaggccggagcggtggcgggtttcaaactcctatgggtgttgctgtgggcaactgtgctcggtttgctgtgccagcggctagcggcacgcttgggagtcgttacaggcaaggatttgggcgaggtgtgccatctctattatcccaagagcgagtcacgttctgtcgcacagtccggggtacaatggtgtgacgtctccagcttacagcctttaccaccgcggtgtcctgccccctcgtcaggctag

SEQ ID NO: 12790 - DNA, 492 bp, Artificial Sequence
  derived and/or modified sequence
atgaccggggacaagggcccccagaggctgagcggcagcagctatggcagcatcagcagccccaccagccccaccagccctggcccccagcaggccccaccccgggagacctacctgtctgagaagatccccatcccagacaccaagccaggcaccttcagcctgaggaagctgtgggccttcaccggccctggcttcctgatgagcatcgccttcctggaccccggcaacatcgagagtgacctgcaggccggggctgtggccggcttcaagctgctgtgggtgctgctgtgggccaccgtgctgggcctgctgtgccagaggctggccgcccggctgggcgtggtgacaggcaaggacctgggggaggtgtgccacctgtactaccccaagtctgagagccgctctgtggcccagagcggcgtgcagtggtgtgatgtgagcagcctgcagcccctgcccccacgctgcccagcccccagcagcggctag

SEQ ID NO: 12791 - DNA, 492 bp, Artificial Sequence
  derived and/or modified sequence
atgaccggcgacaagggcccccagcggctgagcggcagcagctacggctccatcagttcccccactagcccgacttctcccggaccacaacaggctccaccgagggagacatatctatccgaaaaaatccccattcctgacaccaaaccaggtacgttcagtctccgtaaactttgggcgttcacggggccggggttccttatgagtatcgcatttctggacccgggcaacatcgagtcagacttgcaggccggggctgtggcaggattcaagttgctgtgggtgctgttatgggccacagttctcggtctgctctgccaacgattggccgcgcggctgggggtggttacgggaaaggatctgggagaagtctgtcacctgtactatccgaagagcgagtctcggagcgtggctcagagcggtgttcagtggtgtgatgtgtccagtttacagcctttacctccaaggtgtccagccccctccagtgggtag

SEQ ID NO: 12792 - DNA, 492 bp, Artificial Sequence
  derived and/or modified sequence
atgactggcgacaaagggccacagcggttgagcggtagctcttacgggtcaataagttcccccacgtctcccacctcacctggaccccagcaggcgccaccgcgagaaacatatctctccgaaaagataccaatccccgacaccaaacccggtacgttctctctgcgcaagctgtgggcattcacaggcccaggctttctgatgtccatcgcctttttagaccccggaaatatcgagtcagatttgcaggctggcgctgttgctggctttaaactactctgggtgctgttgtgggccactgtgcttggcctgttgtgccaacgtctggcggcacggctcggggtggtgaccggtaaggatctgggcgaggtgtgtcatctttattaccccaagtcagagtctcgctctgttgcccagtcaggtgtgcagtggtgcgacgtgtcgagcctgcagccgctccccccacggtgcccggctccaagttccggatag

SEQ ID NO: 12793 - DNA, 3852 bp, Artificial Sequence
  derived and/or modified sequence
acagaacacggggtgcctggaaggggaacagatgtgttgtggggcacagggcaggctgggaggggaacaaaggtccactccatgggtaaccagacccttccgccagggctggccacttctgcctttggaaaatgtttcacaacgccccatgttgtgtgtgtgtgtgaatcggccgatgtgaaccgaatgttgatgtaagaggcagggcactcggctgcggatgggtaacagggcgtgggctggcacacttacttgcaccagtgcccagagagggggtgcaggctgaggagctgcccagagcaccgctcacactcccagagtacctgaagtcggcatttcaatgacaggtgacaagggtccccaaaggctaagcgggtccagctatggttccatctccagcccgaccagcccgaccagcccagggccacagcaagcacctcccagagagacctacctgagtgagaagatccccatcccagacacaaaaccgggcaccttcagcctgcggaagctatgggccttcacggggcctggcttcctcatgagcattgctttcctggacccaggaaacatcgagtcagatcttcaggctggcgccgtggcgggattcaaacttctctgggtgctgctctgggccaccgtgttgggcttgctctgccagcgactggctgcacgtctgggcgtggtgacaggcaaggacttgggcgaggtctgccatctctactaccctaaggtgccccgcaccgtcctctggctgaccatcgagctagccattgtgggctccgacatgcaggaagtcatcggcacggccattgcattcaatctgctctcagctggacgaatcccactctggggtggcgtcctcatcaccatcgtggacaccttcttcttcctcttcctcgataactacgggctgcggaagctggaagctttttttggactccttataaccattatggccttgacctttggctatgagtatgtggtggcgcgtcctgagcagggagcgcttcttcggggcctgttcctgccctcgtgcccgggctgcggccaccccgagctgctgcaggcggtgggcattgttggcgccatcatcatgccccacaacatctacctgcactcggccctggtcaagtctcgagagatagaccgggcccgccgagcagacatcagagaagccaacatgtacttcctgattgaggccaccatcgccctgtccgtctcctttatcatcaacctctttgtcatggctgtctttgggcaggccttctaccagaaaaccaaccaggctgcgttcaacatctgtgccaacagcagcctccacgactacgccaagatcttccccatgaacaacgccaccgtggccgtggacatttaccaggggggcgtgatcctgggctgcctgttcggccccgcggccctctacatctgggccataggtctcctggcggctgggcagagctccaccatgacgggcacctacgcgggacagttcgtgatggagggcttcctgaggctgcggtggtcacgcttcgcccgtgtcctcctcacccgctcctgcgccatcctgcccaccgtgctcgtggctgtcttccgggacctgagggacttgtcgggcctcaatgatctgctcaacgtgctgcagagcctgctgctcccgttcgccgtgctgcccatcctcacgttcaccagcatgcccaccctcatgcaggagtttgccaatggcctgctgaacaaggtcgtcacctcttccatcatggtgctagtctgcgccatcaacctctacttcgtggtcagctatctgcccagcctgccccaccctgcctacttcggccttgcagccttgctggccgcagcctacctgggcctcagcacctacctggtctggacctgttgccttgcccacggagccacctttctggcccacagctcccaccaccacttcctgtatgggctccttgaagaggaccagaaaggggagacctctggctaggcccacaccagggcctggctgggagtggcatgtatgacgtgactggcctgctggatgtggagggggcgcgtgcaggcagcaggatagagtgggacagttcctgagaccagccaacctgggggctttagggacctgctgtttcctagcgcagccatgtgattaccctctgggtctcagtgtcctcatctgtaaaatggagacaccaccacccttgccatggaggttaagcactttaacacagtgtctggcacttgggacaaaaacaaacaaacgaaaaacatttcaaaaggtatttattgagcacctgcaggcgtgacctgacagcccaagggtgggtggggtgagggcttgaggacttgggcgggacacaggctccaaactggagcttgaaatagtgtctgatgaatgttaaattatctatctatctatttatttatttatttgagacagggaaagggtctccctctgttgccaaggctggagtgcagtggcgcaatcttaactcattgcaacctccaccttctgggttcaagcgattctctttattcagccccgggagtggcgcgcgccaccacgcccagctaatttgtgtattttcagcagagacggggtttgccatgctggccaggctggtctcgaactgctggattcaagtgatccgcccatctccgtctcccaaagtgctgggaattacaggcgtgagccaccaaacccggcctgattaaagttaaataaatactagttcccttctcgtccaaaggagcagggaatgggaaccgggaaggcacgaagtctctaaagcatccagaagacccctacaccagggtctggtccgctcctattcgccgcagcctttctgttccgcctgcaacccattttccagacagtaaaacggcggcgcacttctttctccgtcaggcaccaggtcataaggaacccaagagtctgtgcctctgaggcccaaattatttgctgtttcctcaggggagccggcggccgcgactcccacgccgcgccgttaccgctccctctctgctgactgctccccctaggggcagagacggtcccgacgcccgccatcccgccccggcctcacccctccccgccaggcggaacgacgcggggaggcgggcgctcggggctcgcgccaggggccccagaatccttcggggagagtgggtgggaggaagctgtgtgggcggggagccccctctgccttagggagcggctgggcacccattcgccccattcaggggctgcactttatagacgttccctaggctgtttctaggctcccccaagtccctcctccagcctcgtcgggtccctcagaccccagcccaggacctgcggagggccgcagcgaggagaggccaacaggcctttccctagagttgaacctgggccgggtgttgcacctggaagaacccccgatttcctggggacccagcagggcaggcggcctggctccgcgctcaggtccggacgcttgtttatgagaagaatttcctctttcttaaaagggcaacgatgcgagtgggtccctcaaggagagaagagatgggaccggtctggtgcgacctgggcaagcgctgcagagggtacctgggcaagagggccgcccgcctcctctgggtttggcactggagaagatgggtccatgccagctgaaggaggagatggatgggggacgtttagcgaagaaaggcatctcccagatcctttagcctcctggaagtgcccccgttgtaccccctacacacccctcttggcattgagtgccagtcctctgccaggctctgtgttacaagttggggagggcggcaaagtcccgaattaaagatgtcagttctcaagga

SEQ ID NO: 12794 - DNA, 492 bp, Artificial Sequence
  derived and/or modified sequence
atgaccggcgacaagggcccccagagactgagcggcagcagctacggcagcatcagcagccccaccagccccaccagccccggcccccagcaggccccccccagagagacctacctgagcgagaagatccccatccccgacaccaagcccggcaccttcagcctgagaaagctgtgggccttcaccggccccggcttcctgatgagcatcgccttcctggaccccggcaacatcgagagcgacctgcaggccggcgccgtggccggcttcaagctgctgtgggtgctgctgtgggccaccgtgctgggcctgctgtgccagagactggccgccagactgggcgtggtgaccggcaaggacctgggcgaggtgtgccacctgtactaccccaagagcgagagcagaagcgtggcccagagcggcgtgcagtggtgcgacgtgagcagcctgcagcccctgccccccagatgccccgcccccagcagcggctag

SEQ ID NO: 12795 - protein, 352 aa, Artificial Sequence [sequence omitted]

SEQ ID NO: 12796 - protein, 332 aa, Artificial Sequence
  derived and/or modified sequence
LPKNQCEANRSPPPASALLTGVHLWFCNMLVILILINCKRLKSMTDIYLLNLAISDLFFLLTVPFWAHYAAAQWDFGNTMCQLLTGLYFIGFFSGIFFIILLTIDRYLAVVHAVFALKARTVTFGVVTSVITWVVAVFASLPGIIFTRSQKEGLHYTCSSHFPYSQYQFWKNFQTLKIVILGLVLPLLVMVICYSGILKTLLRCRNEKKRHRAVRLIFTIMIVYFLFWAPYNIVLLLNTFQEFFGLNNCSSSNRLDQAMQVTETLGMTHCCINPIIYAFVGEKFRNYLLVFFQKHIAKRFCKCCSIFQQEAPERASSVYTRSTGEQEISVGL

SEQ ID NO: 12797 - DNA, 1059 bp, Artificial Sequence
  derived and/or modified sequence
atggactaccaggttagcagtcccatatacgacatcaactattatacctcagaaccctgtcagaaaattaatgtgaagcagattgctgcgcggctcctccctcctctgtattctcttgttttcattttcggatttgtagggaacatgctcgtcatccttattctaattaactgcaaacgcctgaagtctatgaccgacatctatctgctaaacctggccatttcagacctgtttttcctgttgactgtgccattctgggcccactacgcagctgcacagtgggattttggcaatacaatgtgtcagctcctgacggggctgtattttatcggctttttttccggcatcttttttatcatcctattgacgatagatcgatacctcgctgtcgttcacgctgtgtttgctctgaaggccagaaccgtaacattcggcgtggtcacgagtgtaattacatgggttgtggcggtgtttgctagcctgcccggcatcattttcactaggagccaaaaggagggtcttcactatacttgtagcagtcactttccttacagccagtatcaattttggaagaattttcagaccctgaaaatagtcattctggggctggttctacctctgctggtgatggtgatatgttattccggcatcctcaaaacgctgctgaggtgtagaaacgagaaaaaaagacaccgggctgtcagactgatctttacaatcatgatagtatatttcctcttttgggccccgtataatatcgtgctgttgttaaacacctttcaggagttctttggcctcaataactgcagcagctccaatcgtctagaccaggccatgcaggttaccgaaactctgggaatgacgcactgctgcattaatccaattatatacgcgtttgttggagaaaagtttaggaattacctgcttgtgttctttcagaagcacatcgccaagcgtttttgcaagtgctgcagcatatttcagcaggaggcccccgaaagggcctccagtgtctacactaggagcaccggtgaacaggagatcagcgtgggtctgtag

SEQ ID NO: 12798 - DNA, 1059 bp, Artificial Sequence
  derived and/or modified sequence
atggactatcaggtctcatctccaatctacgacattaactattacacgtcagagccctgccaaaaaatcaatgttaagcagatcgccgcgaggttgctgcctcccctgtactccctggtgtttatctttggcttcgtgggtaatatgctagtgatactgattctgataaactgcaagcgccttaagagcatgacagacatttatttgctgaacttagctatatccgatctctttttccttctaaccgtgcccttttgggctcattacgccgcggcccagtgggacttcggaaacacaatgtgccaactgttaaccggcttgtactttattggatttttttctgggatcttcttcatcatactcctcaccatagatcgatatctggccgtcgtacatgcagtcttcgccctcaaggcccgtactgtaacgtttggagtcgtgacgagtgtgataacctgggtagtagccgtttttgcgagcctgcctggaatcatctttactcggagccagaaggagggactgcactacacctgtagcagccacttcccatacagccagtaccaattctggaaaaactttcaaaccttgaaaattgtgatccttggactcgtgttgcctctgttggtgatggttatttgttacagtggcatcctgaagacccttctgagatgtcgaaatgaaaaaaaacgccaccgtgctgttcgtttgatattcaccatcatgatagtatactttctgttttgggctccatacaacattgtgctgttgctgaacaccttccaggagttctttggtctaaataactgcagctccagtaaccgactcgatcaggcaatgcaggtgaccgagacactggggatgacgcactgttgtatcaacccaatcatttatgccttcgtgggagaaaagtttcggaactacttacttgtttttttccaaaaacatattgcgaaacgtttttgcaaatgttgttctatcttccagcaggaggcccccgaacgggcttcaagcgtctatactcgctcaactggcgaacaggagatcagcgtaggattgtag

SEQ ID NO: 12799 - DNA, 999 bp, Artificial Sequence
  derived and/or modified sequence
ctgcctaagaatcagtgtgaggccaacagaagccctcccccggctagcgcactgctcaccggcgtacacctgtggttttgcaacatgttagttattctgatccttattaactgcaagaggcttaaatcgatgactgacatatatctgttgaatcttgcaatcagcgatctgttcttcttactgaccgtccctttttgggcacattacgcagccgcccagtgggactttggcaacacaatgtgtcagctgctaaccggactgtattttataggattctttagtgggatcttcttcattatcctcctcaccattgataggtatctggccgtggtgcacgccgttttcgccttgaaggcccgcacagtcactttcggggtagtaacgtctgtgatcacttgggttgttgcagtgtttgccagtctcccaggcattatctttactagaagtcaaaaagagggccttcattatacttgcagctcacatttcccctattctcagtaccagttctggaaaaactttcagaccttgaagattgtgatcctgggactagtgctgcctctgctcgttatggttatatgttattccggcatcctgaaaactctcctacgatgccggaatgaaaagaagcgccatcgggcagtccggctgatcttcaccatcatgatcgtgtacttcttgttctgggctccttacaacatcgtgctcttactcaatacattccaagagttcttcgggctcaacaattgctcttctagtaacaggctggatcaggccatgcaggtcacagagactttgggaatgacccactgttgtatcaatccaatcatttatgcctttgttggagaaaagttccggaactacctgctggtgttctttcagaaacatatcgcaaagcgcttttgcaaatgttgctctatcttccaacaggaggctccagagagagcgagttcagtttacacgcgtagtacgggtgagcaggaaatcagtgttggactgtag

SEQ ID NO: 12800 - DNA, 1059 bp, Artificial Sequence
  derived and/or modified sequence
atggattaccaagtgagctctccgatttacgatatcaattattacacaagcgagccctgccagaaaatcaatgtgaagcagattgctgctcgtctgctcccccccctttactctctggtttttatatttgggtttgtgggcaatatgctggtgatccttatactgataaattgcaaacgactgaaaagtatgactgacatctatctgttgaacctcgctattagcgatctgtttttcctgcttacagtcccattttgggcccactacgccgccgctcagtgggattttggcaacactatgtgtcagctgctgacaggcctttactttattggattcttttccgggatcttcttcattattctcctcacaatagacagatacttagcggtagttcatgctgtgttcgcgttgaaagctcgcacagttacatttggcgtggtcacctccgttataacctgggttgtcgccgttttcgcaagtttgccaggtattatctttacgaggagtcagaaggaagggctccactacacttgtagctctcacttcccatactctcagtaccagttctggaagaactttcaaaccctcaagattgtgattttgggacttgtgttgcccctacttgttatggtgatctgctactctggcatcctaaagactctcctcagatgccggaatgagaaaaagaggcatagggctgtgcgactcatttttacgatcatgatcgtctactttctcttctgggccccctataatatagttcttttactgaacacgtttcaagagttctttggtctgaacaattgcagctcttctaatcgcctcgatcaggcaatgcaggtaacagaaacattggggatgacacattgttgcatcaatcctataatctacgccttcgtgggggagaagttcagaaactatttgttggtgttctttcagaagcacatcgctaagaggttctgtaagtgctgtagcatctttcagcaagaagcacctgagagggccagttcagtgtacacacggtcgacaggtgagcaggagattagtgtaggcttgtag

SEQ ID NO: 12801 - DNA, 1059 bp, Artificial Sequence
  derived and/or modified sequence
atggactaccaggtgagcagccccatctatgacatcaactactacaccagcgagccctgccagaagatcaacgtgaagcagattgctgcccggctgctgccccccctgtacagcctggtgttcatctttggatttgtgggcaacatgctggtgatcctgatcctgatcaactgcaagaggctgaagtccatgacagacatctacctgctgaacctggccatcagtgacctcttcttcctgctgactgtgcccttctgggcccactacgccgccgcccagtgggactttggaaacaccatgtgccagctgctgaccggcctgtacttcatcggcttcttcagcggcatcttcttcatcatcctgctgaccatcgaccgctacctggccgtggtgcatgctgtgtttgccctgaaggccaggacagtgaccttcggcgtggtgaccagcgtcatcacctgggtggtggccgtgtttgccagcctgcccggcatcatcttcaccaggagccagaaggagggcctgcactacacctgcagcagccacttcccctacagccagtaccagttctggaagaacttccagaccctgaagatcgtcatcctgggcctggtgctgcccctgctggtgatggtgatctgctacagcggcatcctgaagaccctgctgcgctgcagaaatgagaagaagaggcacagagctgtgcggctcatcttcaccatcatgattgtgtacttcctgttctgggccccctacaacatcgtgctgctgctgaacaccttccaggagttcttcggcctgaacaactgcagcagcagcaaccggctggaccaggccatgcaggtgacagagaccctgggcatgacccactgctgcatcaaccccatcatctatgcctttgtgggggagaagttcaggaactacctgctggtgttcttccagaagcacatcgccaagcgcttctgcaagtgctgcagcatcttccagcaggaggcccctgagcgggccagctctgtgtacaccaggagcactggagagcaggagatctctgtgggcctgtag

SEQ ID NO: 12802 - DNA, 999 bp, Artificial Sequence
  derived and/or modified sequence
ctgcccaagaaccagtgtgaggccaacagaagccccccaccagccagcgccctgctgactggagtgcacctgtggttctgcaacatgctggtgatcctgatcctgatcaactgcaagaggctgaagtccatgacagacatctacctgctgaacctggccatcagtgacctcttcttcctgctgactgtgcccttctgggcccactacgccgccgcccagtgggactttggaaacaccatgtgccagctgctgaccggcctgtacttcatcggcttcttcagcggcatcttcttcatcatcctgctgaccatcgaccgctacctggccgtggtgcatgctgtgtttgccctgaaggccaggacagtgaccttcggcgtggtgaccagcgtcatcacctgggtggtggccgtgtttgccagcctgcccggcatcatcttcaccaggagccagaaggagggcctgcactacacctgcagcagccacttcccctacagccagtaccagttctggaagaacttccagaccctgaagatcgtcatcctgggcctggtgctgcccctgctggtgatggtgatctgctacagcggcatcctgaagaccctgctgcgctgcagaaatgagaagaagaggcacagagctgtgcggctcatcttcaccatcatgattgtgtacttcctgttctgggccccctacaacatcgtgctgctgctgaacaccttccaggagttcttcggcctgaacaactgcagcagcagcaaccggctggaccaggccatgcaggtgacagagaccctgggcatgacccactgctgcatcaaccccatcatctatgcctttgtgggggagaagttcaggaactacctgctggtgttcttccagaagcacatcgccaagcgcttctgcaagtgctgcagcatcttccagcaggaggcccctgagcgggccagctctgtgtacaccaggagcactggagagcaggagatctctgtgggcctgtag

SEQ ID NO: 12803 - DNA, 1059 bp, Artificial Sequence
  derived and/or modified sequence
atggactaccaggtgagcagccccatctacgacatcaactactacacatcagagccctgtcaaaagatcaatgtcaagcaaatcgccgcccggctgctgccacccttatatagtctggtatttatctttggctttgtgggtaacatgctcgtcattcttattctcattaattgcaaaagactgaagtccatgacagacatttatctgctgaacttggcaatcagcgatctgttttttctgctgacagtccctttttgggcgcattatgctgcagctcaatgggatttcggtaacactatgtgccagctgctcaccggactgtactttatcgggttcttttccggaatattttttatcatcctgttaactattgacagatatttggcagttgtgcacgccgtttttgccctgaaagcgcggacggtgacatttggcgtagtgaccagcgtgataacatgggtggtcgccgtctttgccagcctccctggcatcatatttactcggtctcagaaagaaggcctccactatacttgcagcagccattttccatactcacagtaccagttttggaagaactttcagaccctgaaaatcgtcatccttggacttgtcctccccctgcttgtcatggttatttgttactctggcatcctgaaaactttactccgatgcaggaatgaaaagaaacggcaccgcgccgtgagactgatcttcaccatcatgatcgtgtacttcctgttttgggccccctacaacatagtgctgctgttgaatacgttccaggagttctttggcctgaacaactgcagttcatccaaccggctggatcaggctatgcaggtgacagagacactaggtatgacacattgctgcatcaacccaattatctatgccttcgttggagagaaatttaggaactatctcctggtgttctttcagaagcacatcgccaagaggttttgtaagtgttgctcaatcttccagcaagaagcgcccgagcgagcatcttctgtgtatactaggtctaccggcgagcaagaaattagtgtcggcctttag

SEQ ID NO: 12804 - DNA, 1059 bp, Artificial Sequence
  derived and/or modified sequence
atggactaccaggtgagcagccccatctacgacatcaactactacactagcgaaccctgtcagaaaattaacgtgaaacagatcgctgcacgacttctgcctccattatattccttagtttttatatttggcttcgtggggaacatgttggtgatactgattctcattaactgcaagcggctcaagtctatgactgatatttatttgctaaacctcgcgatttccgaccttttcttcctgctcactgtccccttctgggcccactatgcagcggcgcagtgggattttgggaatactatgtgtcagctcctgacaggattgtacttcatcgggttcttctcaggcatctttttcattatcctactgacaatcgaccggtatctggctgtggttcatgccgtgttcgccctcaaggccagaaccgttaccttcggtgtagtgacctcagtgattacgtgggtggtagcagtttttgcctcccttcccgggattatttttaccagatcacagaaagagggtctccattacacgtgttcgagtcatttcccctatagccagtaccaattctggaaaaacttccagacattgaagatcgtgattttggggctggttctgcccctacttgtgatggtcatttgttatagcggaatccttaagacacttctgaggtgtaggaacgaaaagaaacggcatcgtgccgtacgattgatcttcaccatcatgatcgtatacttcttattctgggcaccttataacatagtgctccttctgaatacctttcaagagttcttcggattaaataactgttcttcgagtaaccgcctcgatcaagctatgcaggtgaccgagacgctcggaatgacacactgttgtataaacccaatcatctacgcctttgttggggaaaaatttcggaattatctgctagtgttttttcagaagcatattgccaaaaggttttgcaagtgctgttcaatctttcagcaagaagcccccgaaagagcatcctctgtgtatacccggtctaccggcgagcaggaaataagtgtagggctctag

SEQ ID NO: 12805 - DNA, 999 bp, Artificial Sequence
  derived and/or modified sequence
ctgcccaagaaccagtgcgaggccaaccggagccccccccccgcctccgcccttcttacaggggtgcacttgtggttctgcaacatgctagtcatactaattctgatcaactgcaagaggctgaagagtatgacggatatttacttgctgaatttggctatctcagatctctttttcctcctcactgtgcctttttgggcccactatgctgcggcccaatgggattttggaaataccatgtgtcagcttttaactggcctgtatttcatcggctttttctcaggcatcttttttatcatcctgctcaccatagaccggtatctggccgtagttcacgccgtttttgccctgaaagctagaaccgttaccttcggcgtcgtgactagcgtcatcacctgggtagtggccgtgttcgctagtcttccaggtattatcttcacacgatcccaaaaggagggcctgcactacacgtgttcatcccactttccatatagccaatatcagttctggaaaaatttccagactttaaaaatcgtgatactcggcctggttctgcctttactggtgatggttatctgctacagcggtatcctcaaaactcttctgagatgcaggaacgagaagaagagacaccgggctgtacgcctgattttcacaattatgattgtttactttctgttttgggccccatacaatattgtcctgttgcttaatactttccaggagttctttgggctgaacaattgcagttcaagcaaccggcttgaccaggccatgcaggttactgagactctcgggatgacgcactgttgtattaatcccatcatttatgccttcgtgggcgaaaagttccgtaattatctactggttttctttcagaagcacattgctaaaagattttgtaaatgttgcagcattttccagcaggaggcccctgagcgtgcgtcttcagtttacacccgcagcacgggagagcaagagatctccgtcggactgtag

SEQ ID NO: 12806 - DNA, 1059 bp, Artificial Sequence
  derived and/or modified sequence
atggactaccaggtgagcagccccatctacgacatcaactactacaccagcgaaccgtgtcaaaaaattaacgtcaaacagatcgctgcaaggttgcttccccccttgtactcactggtgtttatctttgggtttgtgggtaacatgctggtgattcttatacttattaattgtaaacggctgaaaagtatgacagatatttatttgctgaatttggcaatatcagacctttttttccttttaaccgtgccgttctgggcacactacgccgctgcccaatgggattttggtaacaccatgtgccagctcctcacaggactgtactttatcggcttctttagtggcattttctttattatattactgactattgataggtaccttgccgtggttcacgctgtgtttgccctgaaggcgcgcactgtcacctttggagtggttacatcagtgatcacgtgggttgtggctgtattcgcctccctgcctggcattatattcactaggagccaaaaggaaggcctgcactatacctgcagctcccactttccatattcccagtaccagttctggaagaattttcagaccctgaagatcgtgattcttggcctagttctgccgctcttagtgatggtgatttgttactcaggtatcttaaagacactccttcgatgtagaaacgaaaaaaaaaggcaccgagctgttcgacttatattcacaatcatgattgtctacttcctattctgggcgccctacaatatcgtactgctgctaaacacttttcaggaatttttcggcctgaacaactgtagcagttctaatcgacttgaccaggccatgcaggtgacagagactctggggatgacacactgttgcataaacccaataatttacgcctttgtgggagaaaagttcagaaattatctcctagtgttctttcagaagcacattgccaagagattttgcaagtgttgctccatctttcagcaggaggccccagagcgggcctcatcggtgtacacccgttcaacaggcgagcaggagatttccgtcggcctgtag

SEQ ID NO: 12807 - DNA, 1059 bp, Artificial Sequence
  derived and/or modified sequence
atggactatcaggtgtcatctcccatatacgatattaattactacacctctgagccatgccaaaaaataaacgtaaagcagatagccgcacggctcctgccacctctgtactctctggtgttcatttttgggtttgtgggcaatatgctggttatcctgatacttatcaactgcaagagactgaaaagtatgactgacatttatctccttaaccttgccatttccgatctcttctttcttctcactgttccattctgggctcattatgctgcagctcaatgggatttcgggaacactatgtgccaactgctgaccgggctgtactttattggctttttctcgggaatcttttttattatcttgctcacgatagacagatatctggcagtagtccatgccgtctttgcattaaaggccagaacagtgacgtttggggtggtgacttccgtgattacctgggtggtcgccgtctttgcctcattgcccggaataatctttacaaggagtcagaaagagggtctccactacacttgcagttcacactttccctacagtcagtatcagttctggaaaaattttcaaacattgaaaatcgttatactcggattagtactgcctctgcttgtgatggtgatctgctacagtggcatcctcaagactctcctccgttgccgaaacgagaagaagagacaccgggcagttcgccttatctttacaatcatgatcgtgtattttctgttttgggctccatataacatcgtgctcctcctgaatacattccaggaattcttcggactaaacaattgtagctccagtaatagactggatcaagctatgcaggtgacggagacactgggaatgactcactgctgcataaaccccataatttatgcctttgtaggagagaaattcaggaactatctcctggtcttttttcagaagcatattgccaaacgtttttgcaagtgttgtagtatctttcagcaagaggcccctgaacgggcttccagcgtatacactaggtccacgggggagcaggagatatccgtcggattatag

SEQ ID NO: 12808 - DNA, 1059 bp, Artificial Sequence
  derived and/or modified sequence
atggattatcaggtgtcatccccaatttatgatatcaattattacaccagcgagccctgccagaaaatcaatgtaaaacagatcgcagcacggctgcttcctcccttgtattcgcttgtttttattttcgggtttgtgggaaatatgctggtcatcctgatcctgattaattgcaagcgattaaagtcaatgaccgacatctacctcctgaacctcgcgatcagtgacctgtttttccttttaaccgtgcccttttgggcgcattacgccgcagcacaatgggacttcgggaacacaatgtgtcagcttctgactggactgtatttcattggctttttttccggcatctttttcatcatccttctgacaattgataggtatctggctgttgtgcacgccgtgttcgcactcaaagcaagaacggtgacatttggggtggtgacgtccgtgataacctgggtcgtcgctgttttcgcgtctttgcctgggatcatctttacacgtagccaaaaagagggactgcattatacctgcagcagccactttccatatagccagtatcagttctggaaaaattttcaaaccttaaagatcgtgattctcggtttagtgctgcctctccttgtgatggtgatctgttactcggggattcttaaaacactcctccgatgtagaaatgagaaaaaacggcacagggccgtgagactcatttttacaatcatgattgtatattttctgttctgggctccatacaatatcgttcttcttctgaatacctttcaagagtttttcgggttaaataattgtagttcatcaaacaggctggaccaggccatgcaagtcactgagaccttaggcatgacccattgttgcattaaccctataatctatgctttcgtaggagagaaatttagaaactatctgcttgtgttttttcagaaacacattgctaagcgcttttgcaaatgttgttccatctttcagcaggaggcccctgagagagcttcatccgtctacacacgctccacgggagagcaggaaatctccgtgggactgtag

SEQ ID NO: 12809 - DNA, 999 bp, Artificial Sequence
  derived and/or modified sequence
cttcccaaaaatcagtgcgaagcaaatcggtccccaccaccagcctcggccctgctgaccggcgtacatctgtggttctgcaacatgctggtgattctgatattaataaattgtaagcgtttgaagtcaatgaccgatatttatctcctgaatcttgccatctccgacttgttttttctgctaactgtccctttttgggcccactacgccgcagctcagtgggattttggcaacaccatgtgtcaattgctgaccgggctgtacttcatcggcttttttagcggcatcttcttcataatcttactgacaatagatcggtacttggcggtggtacatgcagtgtttgcactgaaggccagaaccgtgacctttggcgttgttacaagtgtaataacatgggtggttgcggtgttcgcctctctgcccggtatcatatttacgcgatcacagaaggaggggcttcactatacctgcagttctcactttccgtacagccagtatcagttttggaaaaactttcagacactgaaaatcgtgattctgggtctggtcttgccgctgctcgttatggtcatttgctactcagggatactgaagaccctgctcagatgtaggaacgaaaagaaaaggcaccgcgcagtgcgcctgatttttactattatgatcgtatatttcctgttctgggcgccttacaatatagtgttgcttcttaatacttttcaggaattcttcggcctgaataattgctcctcttccaaccgcttggaccaggccatgcaagtgaccgaaacattgggaatgacccattgttgtatcaaccctattatctatgccttcgtgggagaaaagttccgcaactacctcctagttttttttcagaaacatatcgctaaaagattctgcaagtgctgtagtatatttcagcaggaagccccagaacgggcaagctcagtgtacacaagaagtactggggagcaggaaatctctgtgggactctag

SEQ ID NO: 12810 - DNA, 1059 bp, Artificial Sequence
  derived and/or modified sequence
atggattatcaggtgtcatctcccatctatgacatcaactattacacctctgagccgtgtcaaaagatcaatgtgaagcagattgctgcgcgacttctcccaccgctgtactctctagtgtttatttttggattcgtcggtaacatgctggtgatcctcatactgatcaactgcaaaaggcttaagagcatgaccgacatttacttgctaaacctggccatcagtgacctcttctttttgcttaccgtacccttctgggctcattacgctgcagctcagtgggactttggcaatacgatgtgtcaactgctgaccggtctctacttcattggattttttagtggcatcttctttattattttgctgaccatcgaccgttatctcgccgtcgtacatgctgtttttgcactcaaagctaggaccgtgaccttcggggttgtgacatccgttatcacatgggtagtcgccgttttcgccagccttccagggatcatctttacacggagtcaaaaggagggtctccactacacatgctcgagccactttccctattcccagtaccagttctggaagaactttcagacccttaagattgtaatactcggactggttctcccgctgcttgtgatggtcatttgctacagtggtatcctgaaaactttattacggtgcagaaatgaaaagaaaaggcaccgagccgtccgactgatttttactataatgattgtgtacttcctattttgggcgccttataatatagtcctccttcttaacacctttcaggagttttttggacttaacaattgcagctcctccaatagactcgatcaggccatgcaagtcaccgagacactgggcatgacccattgttgtataaaccctatcatatatgcgttcgttggcgaaaagttcaggaattacctgctcgtattttttcaaaaacatatcgcaaagcgtttttgcaagtgctgcagcatctttcagcaggaggcccctgaacgagctagttctgtctataccagatccactggggagcaagaaatttcagtggggctgtag

SEQ ID NO: 12811 - DNA, 3450 bp, Artificial Sequence
  derived and/or modified sequence
acttaatgatttaactccaccctccttcaaaagaaacagcatttcctacttttatactgtctatatgattgatttgcacagctcatctggccagaagagctgagacatccgttcccctacaagaaactctccccgggtggaacaagatggattatcaagtgtcaagtccaatctatgacatcaattattatacatcggagccctgccaaaaaatcaatgtgaagcaaatcgcagcccgcctcctgcctccgctctactcactggtgttcatctttggttttgtgggcaacatgctggtcatcctcatcctgataaactgcaaaaggctgaagagcatgactgacatctacctgctcaacctggccatctctgacctgtttttccttcttactgtccccttctgggctcactatgctgccgcccagtgggactttggaaatacaatgtgtcaactcttgacagggctctattttataggcttcttctctggaatcttcttcatcatcctcctgacaatcgataggtacctggctgtcgtccatgctgtgtttgctttaaaagccaggacggtcacctttggggtggtgacaagtgtgatcacttgggtggtggctgtgtttgcgtctctcccaggaatcatctttaccagatctcaaaaagaaggtcttcattacacctgcagctctcattttccatacagtcagtatcaattctggaagaatttccagacattaaagatagtcatcttggggctggtcctgccgctgcttgtcatggtcatctgctactcgggaatcctaaaaactctgcttcggtgtcgaaatgagaagaagaggcacagggctgtgaggcttatcttcaccatcatgattgtttattttctcttctgggctccctacaacattgtccttctcctgaacaccttccaggaattctttggcctgaataattgcagtagctctaacaggttggaccaagctatgcaggtgacagagactcttgggatgacgcactgctgcatcaaccccatcatctatgcctttgtcggggagaagttcagaaactacctcttagtcttcttccaaaagcacattgccaaacgcttctgcaaatgctgttctattttccagcaagaggctcccgagcgagcaagctcagtttacacccgatccactggggagcaggaaatatctgtgggcttgtgacacggactcaagtgggctggtgacccagtcagagttgtgcacatggcttagttttcatacacagcctgggctgggggtggggtgggagaggtcttttttaaaaggaagttactgttatagagggtctaagattcatccatttatttggcatctgtttaaagtagattagatcttttaagcccatcaattatagaaagccaaatcaaaatatgttgatgaaaaatagcaacctttttatctccccttcacatgcatcaagttattgacaaactctcccttcactccgaaagttccttatgtatatttaaaagaaagcctcagagaattgctgattcttgagtttagtgatctgaacagaaataccaaaattatttcagaaatgtacaactttttacctagtacaaggcaacatataggttgtaaatgtgtttaaaacaggtctttgtcttgctatggggagaaaagacatgaatatgattagtaaagaaatgacacttttcatgtgtgatttcccctccaaggtatggttaataagtttcactgacttagaaccaggcgagagacttgtggcctgggagagctggggaagcttcttaaatgagaaggaatttgagttggatcatctattgctggcaaagacagaagcctcactgcaagcactgcatgggcaagcttggctgtagaaggagacagagctggttgggaagacatggggaggaaggacaaggctagatcatgaagaaccttgacggcattgctccgtctaagtcatgagctgagcagggagatcctggttggtgttgcagaaggtttactctgtggccaaaggagggtcaggaaggatgagcatttagggcaaggagaccaccaacagccctcaggtcagggtgaggatggcctctgctaagctcaaggcgtgaggatgggaaggagggaggtattcgtaaggatgggaaggagggaggtattcgtgcagcatatgaggatgcagagtcagcagaactggggtggatttgggttggaagtgagggtcagagaggagtcagagagaatccctagtcttcaagcagattggagaaacccttgaaaagacatcaagcacagaaggaggaggaggaggtttaggtcaagaagaagatggattggtgtaaaaggatgggtctggtttgcagagcttgaacacagtctcacccagactccaggctgtctttcactgaatgcttctgacttcatagatttccttcccatcccagctgaaatactgaggggtctccaggaggagactagatttatgaatacacgaggtatgaggtctaggaacatacttcagctcacacatgagatctaggtgaggattgattacctagtagtcatttcatgggttgttgggaggattctatgaggcaaccacaggcagcatttagcacatactacacattcaataagcatcaaactcttagttactcattcagggatagcactgagcaaagcattgagcaaaggggtcccatagaggtgagggaagcctgaaaaactaagatgctgcctgcccagtgcacacaagtgtaggtatcattttctgcatttaaccgtcaataggcaaaggggggaagggacatattcatttggaaataagctgccttgagccttaaaacccacaaaagtacaatttaccagcctccgtatttcagactgaatgggggtggggggggcgccttaggtacttattccagatgccttctccagacaaaccagaagcaacagaaaaaatcgtctctccctccctttgaaatgaatataccccttagtgtttgggtatattcatttcaaagggagagagagaggtttttttctgttctgtctcatatgattgtgcacatacttgagactgttttgaatttgggggatggctaaaaccatcatagtacaggtaaggtgagggaatagtaagtggtgagaactactcagggaatgaaggtgtcagaataataagaggtgctactgactttctcagcctctgaatatgaacggtgagcattgtggctgtcagcaggaagcaacgaagggaaatgtctttccttttgctcttaagttgtggagagtgcaacagtagcataggaccctaccctctgggccaagtcaaagacattctgacatcttagtatttgcatattcttatgtatgtgaaagttacaaattgcttgaaagaaaatatgcatctaataaaaaacaccttctaaaataa

SEQ ID NO: 12812 - DNA, 3637 bp, Artificial Sequence
  derived and/or modified sequence
cttcagatagattatatctggagtgaagaatcctgccacctatgtatctggcatagtattctgtgtagtgggatgagcagagaacaaaaacaaaataatccagtgagaaaagcccgtaaataaaccttcagaccagagatctattctctagcttattttaagctcaacttaaaaagaagaactgttctctgattcttttcgccttcaatacacttaatgatttaactccaccctccttcaaaagaaacagcatttcctacttttatactgtctatatgattgatttgcacagctcatctggccagaagagctgagacatccgttcccctacaagaaactctccccgggtggaacaagatggattatcaagtgtcaagtccaatctatgacatcaattattatacatcggagccctgccaaaaaatcaatgtgaagcaaatcgcagcccgcctcctgcctccgctctactcactggtgttcatctttggttttgtgggcaacatgctggtcatcctcatcctgataaactgcaaaaggctgaagagcatgactgacatctacctgctcaacctggccatctctgacctgtttttccttcttactgtccccttctgggctcactatgctgccgcccagtgggactttggaaatacaatgtgtcaactcttgacagggctctattttataggcttcttctctggaatcttcttcatcatcctcctgacaatcgataggtacctggctgtcgtccatgctgtgtttgctttaaaagccaggacggtcacctttggggtggtgacaagtgtgatcacttgggtggtggctgtgtttgcgtctctcccaggaatcatctttaccagatctcaaaaagaaggtcttcattacacctgcagctctcattttccatacagtcagtatcaattctggaagaatttccagacattaaagatagtcatcttggggctggtcctgccgctgcttgtcatggtcatctgctactcgggaatcctaaaaactctgcttcggtgtcgaaatgagaagaagaggcacagggctgtgaggcttatcttcaccatcatgattgtttattttctcttctgggctccctacaacattgtccttctcctgaacaccttccaggaattctttggcctgaataattgcagtagctctaacaggttggaccaagctatgcaggtgacagagactcttgggatgacgcactgctgcatcaaccccatcatctatgcctttgtcggggagaagttcagaaactacctcttagtcttcttccaaaagcacattgccaaacgcttctgcaaatgctgttctattttccagcaagaggctcccgagcgagcaagctcagtttacacccgatccactggggagcaggaaatatctgtgggcttgtgacacggactcaagtgggctggtgacccagtcagagttgtgcacatggcttagttttcatacacagcctgggctgggggtggggtgggagaggtcttttttaaaaggaagttactgttatagagggtctaagattcatccatttatttggcatctgtttaaagtagattagatcttttaagcccatcaattatagaaagccaaatcaaaatatgttgatgaaaaatagcaacctttttatctccccttcacatgcatcaagttattgacaaactctcccttcactccgaaagttccttatgtatatttaaaagaaagcctcagagaattgctgattcttgagtttagtgatctgaacagaaataccaaaattatttcagaaatgtacaactttttacctagtacaaggcaacatataggttgtaaatgtgtttaaaacaggtctttgtcttgctatggggagaaaagacatgaatatgattagtaaagaaatgacacttttcatgtgtgatttcccctccaaggtatggttaataagtttcactgacttagaaccaggcgagagacttgtggcctgggagagctggggaagcttcttaaatgagaaggaatttgagttggatcatctattgctggcaaagacagaagcctcactgcaagcactgcatgggcaagcttggctgtagaaggagacagagctggttgggaagacatggggaggaaggacaaggctagatcatgaagaaccttgacggcattgctccgtctaagtcatgagctgagcagggagatcctggttggtgttgcagaaggtttactctgtggccaaaggagggtcaggaaggatgagcatttagggcaaggagaccaccaacagccctcaggtcagggtgaggatggcctctgctaagctcaaggcgtgaggatgggaaggagggaggtattcgtaaggatgggaaggagggaggtattcgtgcagcatatgaggatgcagagtcagcagaactggggtggatttgggttggaagtgagggtcagagaggagtcagagagaatccctagtcttcaagcagattggagaaacccttgaaaagacatcaagcacagaaggaggaggaggaggtttaggtcaagaagaagatggattggtgtaaaaggatgggtctggtttgcagagcttgaacacagtctcacccagactccaggctgtctttcactgaatgcttctgacttcatagatttccttcccatcccagctgaaatactgaggggtctccaggaggagactagatttatgaatacacgaggtatgaggtctaggaacatacttcagctcacacatgagatctaggtgaggattgattacctagtagtcatttcatgggttgttgggaggattctatgaggcaaccacaggcagcatttagcacatactacacattcaataagcatcaaactcttagttactcattcagggatagcactgagcaaagcattgagcaaaggggtcccatagaggtgagggaagcctgaaaaactaagatgctgcctgcccagtgcacacaagtgtaggtatcattttctgcatttaaccgtcaataggcaaaggggggaagggacatattcatttggaaataagctgccttgagccttaaaacccacaaaagtacaatttaccagcctccgtatttcagactgaatgggggtggggggggcgccttaggtacttattccagatgccttctccagacaaaccagaagcaacagaaaaaatcgtctctccctccctttgaaatgaatataccccttagtgtttgggtatattcatttcaaagggagagagagaggtttttttctgttctgtctcatatgattgtgcacatacttgagactgttttgaatttgggggatggctaaaaccatcatagtacaggtaaggtgagggaatagtaagtggtgagaactactcagggaatgaaggtgtcagaataataagaggtgctactgactttctcagcctctgaatatgaacggtgagcattgtggctgtcagcaggaagcaacgaagggaaatgtctttccttttgctcttaagttgtggagagtgcaacagtagcataggaccctaccctctgggccaagtcaaagacattctgacatcttagtatttgcatattcttatgtatgtgaaagttacaaattgcttgaaagaaaatatgcatct

SEQ ID NO: 12813 - DNA, 3633 bp, Artificial Sequence
  derived and/or modified sequence
cttcagatagattatatctggagtgaagaatcctgccacctatgtatctggcatagtattctgtgtagtgggatgagcagagaacaaaaacaaaataatccagtgagaaaagcccgtaaataaaccttcagaccagagatctattctctagcttattttaagctcaacttaaaaagaagaactgttctctgattcttttcgccttcaatacacttaatgatttaactccaccctccttcaaaagaaacagcatttcctacttttatactgtctatatgattgatttgcacagctcatctggccagaagagctgagacatccgttcccctacaagaaactctccccgggtggaacaagatggattatcaagtgtcaagtccaatctatgacatcaattattatacatcggagccctgccaaaaaatcaatgtgaagcaaatcgcagcccgcctcctgcctccgctctactcactggtgttcatctttggttttgtaacatgctggtcatcctcatcctgataaactgcaaaaggctgaagagcatgactgacatctacctgctcaacctggccatctctgacctgtttttccttcttactgtccccttctgggctcactatgctgccgcccagtgggactttggaaatacaatgtgtcaactcttgacagggctctattttataggcttcttctctggaatcttcttcatcatcctcctgacaatcgataggtacctggctgtcgtccatgctgtgtttgctttaaaagccaggacggtcacctttggggtggtgacaagtgtgatcacttgggtggtggctgtgtttgcgtctctcccaggaatcatctttaccagatctcaaaaagaaggtcttcattacacctgcagctctcattttccatacagtcagtatcaattctggaagaatttccagacattaaagatagtcatcttggggctggtcctgccgctgcttgtcatggtcatctgctactcgggaatcctaaaaactctgcttcggtgtcgaaatgagaagaagaggcacagggctgtgaggcttatcttcaccatcatgattgtttattttctcttctgggctccctacaacattgtccttctcctgaacaccttccaggaattctttggcctgaataattgcagtagctctaacaggttggaccaagctatgcaggtgacagagactcttgggatgacgcactgctgcatcaaccccatcatctatgcctttgtcggggagaagttcagaaactacctcttagtcttcttccaaaagcacattgccaaacgcttctgcaaatgctgttctattttccagcaagaggctcccgagcgagcaagctcagtttacacccgatccactggggagcaggaaatatctgtgggcttgtgacacggactcaagtgggctggtgacccagtcagagttgtgcacatggcttagttttcatacacagcctgggctgggggtggggtgggagaggtcttttttaaaaggaagttactgttatagagggtctaagattcatccatttatttggcatctgtttaaagtagattagatcttttaagcccatcaattatagaaagccaaatcaaaatatgttgatgaaaaatagcaacctttttatctccccttcacatgcatcaagttattgacaaactctcccttcactccgaaagttccttatgtatatttaaaagaaagcctcagagaattgctgattcttgagtttagtgatctgaacagaaataccaaaattatttcagaaatgtacaactttttacctagtacaaggcaacatataggttgtaaatgtgtttaaaacaggtctttgtcttgctatggggagaaaagacatgaatatgattagtaaagaaatgacacttttcatgtgtgatttcccctccaaggtatggttaataagtttcactgacttagaaccaggcgagagacttgtggcctgggagagctggggaagcttcttaaatgagaaggaatttgagttggatcatctattgctggcaaagacagaagcctcactgcaagcactgcatgggcaagcttggctgtagaaggagacagagctggttgggaagacatggggaggaaggacaaggctagatcatgaagaaccttgacggcattgctccgtctaagtcatgagctgagcagggagatcctggttggtgttgcagaaggtttactctgtggccaaaggagggtcaggaaggatgagcatttagggcaaggagaccaccaacagccctcaggtcagggtgaggatggcctctgctaagctcaaggcgtgaggatgggaaggagggaggtattcgtaaggatgggaaggagggaggtattcgtgcagcatatgaggatgcagagtcagcagaactggggtggatttgggttggaagtgagggtcagagaggagtcagagagaatccctagtcttcaagcagattggagaaacccttgaaaagacatcaagcacagaaggaggaggaggaggtttaggtcaagaagaagatggattggtgtaaaaggatgggtctggtttgcagagcttgaacacagtctcacccagactccaggctgtctttcactgaatgcttctgacttcatagatttccttcccatcccagctgaaatactgaggggtctccaggaggagactagatttatgaatacacgaggtatgaggtctaggaacatacttcagctcacacatgagatctaggtgaggattgattacctagtagtcatttcatgggttgttgggaggattctatgaggcaaccacaggcagcatttagcacatactacacattcaataagcatcaaactcttagttactcattcagggatagcactgagcaaagcattgagcaaaggggtcccatagaggtgagggaagcctgaaaaactaagatgctgcctgcccagtgcacacaagtgtaggtatcattttctgcatttaaccgtcaataggcaaaggggggaagggacatattcatttggaaataagctgccttgagccttaaaacccacaaaagtacaatttaccagcctccgtatttcagactgaatgggggtggggggggcgccttaggtacttattccagatgccttctccagacaaaccagaagcaacagaaaaaatcgtctctccctccctttgaaatgaatataccccttagtgtttgggtatattcatttcaaagggagagagagaggtttttttctgttctgtctcatatgattgtgcacatacttgagactgttttgaatttgggggatggctaaaaccatcatagtacaggtaaggtgagggaatagtaagtggtgagaactactcagggaatgaaggtgtcagaataataagaggtgctactgactttctcagcctctgaatatgaacggtgagcattgtggctgtcagcaggaagcaacgaagggaaatgtctttccttttgctcttaagttgtggagagtgcaacagtagcataggaccctaccctctgggccaagtcaaagacattctgacatcttagtatttgcatattcttatgtatgtgaaagttacaaattgcttgaaagaaaatatgcatct

SEQ ID NO: 12814 - DNA, 1292 bp, Artificial Sequence
  derived and/or modified sequence
ccccaacagagccaagctctccatctagtggacagggaagctagcagcaaaccttcccttcactacaaaacttcattgcttggccaaaaagagagttaattcaatgtagacatctatgtaggcaattaaaaacctattgatgtataaaacagtttgcattcatggagggcaactaaatacattctaggactttataaaagatcactttttatttatgcacagggtggaacaagatggattatcaagtgtcaagtccaatctatgacatcaattattatacatcggagccctgccaaaaaatcaatgtgaagcaaatcgcagcccgcctcctgcctccgctctactcactggtgttcatctttggttttgtgggcaacatgctggtcatcctcatcctgataaactgcaaaaggctgaagagcatgactgacatctacctgctcaacctggccatctctgacctgtttttccttcttactgtccccttctgggctcactatgctgccgcccagtgggactttggaaatacaatgtgtcaactcttgacagggctctattttataggcttcttctctggaatcttcttcatcatcctcctgacaatcgataggtacctggctgtcgtccatgctgtgtttgctttaaaagccaggacggtcacctttggggtggtgacaagtgtgatcacttgggtggtggctgtgtttgcgtctctcccaggaatcatctttaccagatctcaaaaagaaggtcttcattacacctgcagctctcattttccatacagtcagtatcaattctggaagaatttccagacattaaagatagtcatcttggggctggtcctgccgctgcttgtcatggtcatctgctactcgggaatcctaaaaactctgcttcggtgtcgaaatgagaagaagaggcacagggctgtgaggcttatcttcaccatcatgattgtttattttctcttctgggctccctacaacattgtccttctcctgaacaccttccaggaattctttggcctgaataattgcagtagctctaacaggttggaccaagctatgcaggtgacagagactcttgggatgacgcactgctgcatcaaccccatcatctatgcctttgtcggggagaagttcagaaactacctcttagtcttcttccaaaagcacattgccaaacgcttctgcaaatgctgttctattttccagcaagaggctcccgagcgagcaagctcagtttacacccgatccactggggagcaggaaatatctgtgggcttgtga

SEQ ID NO: 12815 - DNA, 1059 bp, Artificial Sequence
  derived and/or modified sequence
atggactaccaggtgagcagccccatctacgacatcaactactacaccagcgagccctgccagaagatcaacgtgaagcagatcgccgccagactgctgccccccctgtacagcctggtgttcatcttcggcttcgtgggcaacatgctggtgatcctgatcctgatcaactgcaagagactgaagagcatgaccgacatctacctgctgaacctggccatcagcgacctgttcttcctgctgaccgtgcccttctgggcccactacgccgccgcccagtgggacttcggcaacaccatgtgccagctgctgaccggcctgtacttcatcggcttcttcagcggcatcttcttcatcatcctgctgaccatcgacagatacctggccgtggtgcacgccgtgttcgccctgaaggccagaaccgtgaccttcggcgtggtgaccagcgtgatcacctgggtggtggccgtgttcgccagcctgcccggcatcatcttcaccagaagccagaaggagggcctgcactacacctgcagcagccacttcccctacagccagtaccagttctggaagaacttccagaccctgaagatcgtgatcctgggcctggtgctgcccctgctggtgatggtgatctgctacagcggcatcctgaagaccctgctgagatgcagaaacgagaagaagagacacagagccgtgagactgatcttcaccatcatgatcgtgtacttcctgttctgggccccctacaacatcgtgctgctgctgaacaccttccaggagttcttcggcctgaacaactgcagcagcagcaacagactggaccaggccatgcaggtgaccgagaccctgggcatgacccactgctgcatcaaccccatcatctacgccttcgtgggcgagaagttcagaaactacctgctggtgttcttccagaagcacatcgccaagagattctgcaagtgctgcagcatcttccagcaggaggcccccgagagagccagcagcgtgtacaccagaagcaccggcgagcaggagatcagcgtgggcctgtag

SEQ ID NO: 12816 - DNA, 999 bp, Artificial Sequence
  derived and/or modified sequence
ctgcccaagaaccagtgcgaggccaacagaagccccccccccgccagcgccctgctgaccggcgtgcacctgtggttctgcaacatgctggtgatcctgatcctgatcaactgcaagagactgaagagcatgaccgacatctacctgctgaacctggccatcagcgacctgttcttcctgctgaccgtgcccttctgggcccactacgccgccgcccagtgggacttcggcaacaccatgtgccagctgctgaccggcctgtacttcatcggcttcttcagcggcatcttcttcatcatcctgctgaccatcgacagatacctggccgtggtgcacgccgtgttcgccctgaaggccagaaccgtgaccttcggcgtggtgaccagcgtgatcacctgggtggtggccgtgttcgccagcctgcccggcatcatcttcaccagaagccagaaggagggcctgcactacacctgcagcagccacttcccctacagccagtaccagttctggaagaacttccagaccctgaagatcgtgatcctgggcctggtgctgcccctgctggtgatggtgatctgctacagcggcatcctgaagaccctgctgagatgcagaaacgagaagaagagacacagagccgtgagactgatcttcaccatcatgatcgtgtacttcctgttctgggccccctacaacatcgtgctgctgctgaacaccttccaggagttcttcggcctgaacaactgcagcagcagcaacagactggaccaggccatgcaggtgaccgagaccctgggcatgacccactgctgcatcaaccccatcatctacgccttcgtgggcgagaagttcagaaactacctgctggtgttcttccagaagcacatcgccaagagattctgcaagtgctgcagcatcttccagcaggaggcccccgagagagccagcagcgtgtacaccagaagcaccggcgagcaggagatcagcgtgggcctgtag

SEQ ID NO: 12817 - protein, 203 aa, Artificial Sequence
  derived and/or modified sequence
MCAARLAAAAAAAQSVYAFSARPLAGGEPVSLGSLRGKVLLIENVASLCGTTVRDYTQMNELQRRLGPRGLVVLGFPCNQFGHQENAKNEEILNSLKYVRPGGGFEPNFMLFEKCEVNGAGAHPLFAFLREALPAPSDDATALMTDPKLITWSPVCRNDVAWNFEKFLVGPDGVPLRRYSRRFQTIDIEPDIEALLSQGPSCA

SEQ ID NO: 12818 - DNA, 612 bp, Artificial Sequence
  derived and/or modified sequence
atgtgcgcagccagactggccgcagccgccgccgccgctcagtctgtatatgctttcagcgcccggcccctggcaggaggagagcccgtctctctgggctcattgcgcgggaaggtccttctgatagaaaatgttgcatcactttgaggcactaccgttcgggactacacacaaatgaacgagctgcagcggaggctcgggccgcggggcctggtagtgttgggttttccctgcaaccaattcggccatcaggaaaacgctaagaatgaagaaattttaaatagccttaagtatgttcgtcccggaggcggcttcgagcccaacttcatgctctttgagaaatgcgaggtcaacggagccggtgcgcacccgcttttcgctttccttagagaagctctcccagcgccttcagacgacgcgaccgcactgatgacagatcccaagctgattacatggtcacccgtctgccgcaatgatgtcgcctggaactttgaaaagttcttggtcggccctgacggtgtaccgcttaggagatactccaggagattccagactattgacattgaaccagatattgaggctctgctgtctcagggcccctcttgcgcctag

SEQ ID NO: 12819 - DNA, 1106 bp, Artificial Sequence
  derived and/or modified sequence
gcgccatgtgtgctgctcggctagcggcggcggcggcggcggcccagtcggtgtatgccttctcggcgcgcccgctggccggcggggagcctgtgagcctgggctccctgcggggcaaggtactacttatcgagaatgtggcgtccctctgaggcaccacggtccgggactacacccagatgaacgagctgcagcggcgcctcggaccccggggcctggtggtgctcggcttcccgtgcaaccagtttgggcatcaggtgcgccgggcggagcggggcggggcgggggcggacgtgcagtagtggctgggggcgccggcggtgtgctggtgggtgccgtcggctccatgcgcggagagtctggctactctctcgtttcctttctgttgctcgtagctgctgaaattcctctccgcccttgggattgcgcatggagggcaaaatcccggtgactcatagaaaatctcccttgtttgtggttagaacgtttctctcctcctcttgaccccgggttctagctgcccttctctcctgtaggagaacgccaagaacgaagagattctgaattccctcaagtacgtccggcctggtggtgggttcgagcccaacttcatgctcttcgagaagtgcgaggtgaacggtgcgggggcgcaccctctcttcgccttcctgcgggaggccctgccagctcccagcgacgacgccaccgcgcttatgaccgaccccaagctcatcacctggtctccggtgtgtcgcaacgatgttgcctggaactttgagaagttcctggtgggccctgacggtgtgcccctacgcaggtacagccgccgcttccagaccattgacatcgagcctgacatcgaagccctgctgtctcaagggcccagctgtgcctagggcgcccctcctaccccggctgcttggcagttgcagtgctgctgtctcgggggggttttcatctatgagggtgtttcctctaaacctacgagggaggaacacctgatcttacagaaaataccacctcgagatgggtgctggtcctgttgatcccagtctctgccagaccaaggcgagtttccccactaataaagtgccgggtgtcagcag

SEQ ID NO: 12820 - DNA, 1146 bp, Artificial Sequence
  derived and/or modified sequence
gagccctcgagggccccagcccttggaagggtaacctggaccgctgccgcctggttgcctgggccagaccagacatgcctgctgctccttccggcttaggaggagcacgcgtcccgctcgggcgcactctccagccttttcctggctgaggaggggccgagccctccgggtagggcgggggccggatgaggcgggaccctcaggcccggaaaactgcctgtgccacgtgacccgccgccggccagttaaaaggaggcgcctgctggcctccccttacagtgcttgttcggggcgctccgctggcttcttggacaattgcgccatgtgtgctgctcggctagcggcggcggcggcggcggcccagtcggtgtatgccttctcggcgcgcccgctggccggcggggagcctgtgagcctgggctccctgcggggcaaggtactacttatcgagaatgtggcgtccctctgaggcaccacggtccgggactacacccagatgaacgagctgcagcggcgcctcggaccccggggcctggtggtgctcggcttcccgtgcaaccagtttgggcatcaggagaacgccaagaacgaagagattctgaattccctcaagtacgtccggcctggtggtgggttcgagcccaacttcatgctcttcgagaagtgcgaggtgaacggtgcgggggcgcaccctctcttcgccttcctgcgggaggccctgccagctcccagcgacgacgccaccgcgcttatgaccgaccccaagctcatcacctggtctccggtgtgtcgcaacgatgttgcctggaactttgagaagttcctggtgggccctgacggtgtgcccctacgcaggtacagccgccgcttccagaccattgacatcgagcctgacatcgaagccctgctgtctcaagggcccagctgtgcctagggcgcccctcctaccccggctgcttggcagttgcagtgctgctgtctcgggggggttttcatctatgagggtgtttcctctaaacctacgagggaggaacacctgatcttacagaaaataccacctcgagatgggtgctggtcctgttgatcccagtctctgccagaccaaggcgagtttccccactaataaagtgccgggtgtcagcagaa

SEQ ID NO: 12821 - DNA, 606 bp, Artificial Sequence
  derived and/or modified sequence
atgtgtgccgcccggctggccgctgctgctgctgctgcccagagcgtgtatgccttcagcgcccggcccctggccggcggggagcctgtgtccctgggcagcctgcggggcaaggtgctgctgattgaaaatgtggccagcctgaccaccgtgcgggactacacccagatgaatgagctgcagaggcggctgggcccccggggcctggtggtgctgggcttcccctgcaaccagtttggccaccaggagaatgccaagaatgaggagatcctgaacagcctgaagtatgtgcggcctgggggcggctttgagcccaacttcatgctgtttgagaagtgtgaggtgaatggagctggggcccaccccctgtttgccttcctgcgggaggccctgcctgcccccagtgatgatgccacagccctgatgacagaccccaagctgatcacctggagccctgtgtgcagaaatgatgtggcctggaactttgagaagttcctggtgggcccagatggagtgcccctgcggcgctacagccgccgcttccagaccatcgacatcgagccagacatcgaggccctgctgagccagggccccagctgtgcctag

SEQ ID NO: 12822 - DNA, 612 bp, Artificial Sequence
  derived and/or modified sequence
atgtgcgccgcccggctggccgccgccgccgccgccgcccagagcgtgtatgcattctctgctcggccactggctggtggggagccagtatctctcggctcacttcgcggtaaggttcttctcattgagaatgtggcttctctgtgaggtaccaccgttcgagactacacacagatgaacgagctccaaaggcgcctaggccccagaggcctggttgtcctggggtttccctgcaatcaattcggtcatcaggaaaatgcgaagaacgaggagattcttaattccctcaagtatgtcagaccaggcggagggtttgaaccaaacttcatgctttttgagaaatgtgaagtgaacggcgctggtgcacatccattattcgctttcttgcgggaggccctcccagccccaagcgacgacgccacagccctcatgaccgatccgaagcttattacttggagtcccgtgtgtcggaacgacgtggcgtggaatttcgagaagttcctcgtgggccccgacggagtgccgctccgccgttattccagacgcttccaaactattgacatcgagcccgatatagaggccctgcttagccagggaccatcttgtgcatag

SEQ ID NO: 12823 - DNA, 612 bp, Artificial Sequence
  derived and/or modified sequence
atgtgtgccgctagacttgccgcagctgccgcagccgcacagagcgtctacgccttttccgccagaccactcgccggtggggagccggtatccctggggagcctgcgcggaaaggtcctactgatagagaacgtcgcatcactctgaggcactaccgtacgcgattatactcagatgaatgagctgcagaggagattgggacccagagggctcgtggtgcttggctttccatgtaaccaattcgggcatcaggaaaatgcgaaaaatgaggagatccttaactccttgaagtatgtcagaccagggggaggatttgaaccaaacttcatgctgttcgaaaagtgcgaagtgaacggagcaggggcacaccccttgtttgccttcctgagagaggccttaccagctccttctgatgatgcaacagcgctgatgactgaccccaagctgatcacatggtctcctgtgtgtaggaatgatgtggcatggaacttcgaaaaatttctggtagggccagatggcgtaccccttaggcggtacagcagacgctttcagacaatcgatatcgaaccagacatcgaggctctgctatctcagggcccaagttgcgcatag

SEQ ID NO: 12824 - DNA, 612 bp, Artificial Sequence
  derived and/or modified sequence
atgtgcgccgccagactggccgccgccgccgccgccgcccagagcgtgtacgccttcagcgccagacccctggccggcggcgagcccgtgagcctgggcagcctgagaggcaaggtgctgctgatcgagaacgtggccagcctgtgaggcaccaccgtgagagactacacccagatgaacgagctgcagagaagactgggccccagaggcctggtggtgctgggcttcccctgcaaccagttcggccaccaggagaacgccaagaacgaggagatcctgaacagcctgaagtacgtgagacccggcggcggcttcgagcccaacttcatgctgttcgagaagtgcgaggtgaacggcgccggcgcccaccccctgttcgccttcctgagagaggccctgcccgcccccagcgacgacgccaccgccctgatgaccgaccccaagctgatcacctggagccccgtgtgcagaaacgacgtggcctggaacttcgagaagttcctggtgggccccgacggcgtgcccctgagaagatacagcagaagattccagaccatcgacatcgagcccgacatcgaggccctgctgagccagggccccagctgcgcctag

SEQ ID NO: 12825 - protein, 300 aa, Artificial Sequence
  derived and/or modified sequence
MRIAVICFCLLGITCAIPVKQADSGSSEEKQLYNKYPDAVATWLNPDPSQKQNLLAPQTLPSKSNESHDHMDDMDDEDDDDHVDSQDSIDSNDSDDVDDTDDSHQSDESHHSDESDELVTDFPTDLPATEVFTPVVPTVDTYDGRGDSVVYGLRSKSKKFRRPDIQYPDATDEDITSHMESEELNGAYKAIPVAQDLNAPSDWDSRGKDSYETSQLDDQSAETHSHKQSRLYKRKANDESNEHSDVIDSQELSKVSREFHSHEFHSHEDMLVVDPKSKEEDKHLKFRISHELDSASSEVN

SEQ ID NO: 12826 - DNA, 903 bp, Artificial Sequence
  derived and/or modified sequence
atgagaatcgccgtgatctgcttctgcctgctgggcatcacctgcgccatccccgtgaagcaggccgacagcggcagcagcgaggagaagcagctgtacaacaagtaccccgacgccgtggccacctggctgaaccccgaccccagccagaagcagaacctgctggccccccagaccctgcccagcaagagcaacgagagccacgaccacatggacgacatggacgacgaggacgacgacgaccacgtggacagccaggacagcatcgacagcaacgacagcgacgacgtggacgacaccgacgacagccaccagagcgacgagagccaccacagcgacgagagcgacgagctggtgaccgacttccccaccgacctgcccgccaccgaggtgttcacccccgtggtgcccaccgtggacacctacgacggcagaggcgacagcgtggtgtacggcctgagaagcaagagcaagaagttcagaagacccgacatccagtaccccgacgccaccgacgaggacatcaccagccacatggagagcgaggagctgaacggcgcctacaaggccatccccgtggcccaggacctgaacgcccccagcgactgggacagcagaggcaaggacagctacgagaccagccagctggacgaccagagcgccgagacccacagccacaagcagagcagactgtacaagagaaaggccaacgacgagagcaacgagcacagcgacgtgatcgacagccaggagctgagcaaggtgagcagagagttccacagccacgagttccacagccacgaggacatgctggtggtggaccccaagagcaaggaggaggacaagcacctgaagttcagaatcagccacgagctggacagcgccagcagcgaggtgaactag

SEQ ID NO: 12827 - DNA, 903 bp, Artificial Sequence
  derived and/or modified sequence
atgcggatcgccgtcatctgtttctgcctcctgggcataacctgcgcaattcccgtgaaacaagcagactccggtagtagcgaggagaagcaactatacaataagtatcctgatgcagtagcgacatggctcaaccctgatccctcccagaagcagaatctactcgcacctcagaccttaccctccaaaagtaatgaatcccacgaccatatggatgacatggacgatgaggatgacgatgaccacgtagacagccaagacagcatcgattcaaacgactctgacgacgtagatgatacagatgattcccatcaatccgatgagagccaccactcagatgaaagtgatgagctggtgaccgacttccctaccgatctccccgcaacggaagtcttcactccggtggttcccactgttgacacttatgacggtcgcggagattcagttgtgtacggcctgagatccaagagtaagaagtttcgaaggcccgatattcagtacccagatgcgacagatgaagacatcacttcccatatggagagtgaggagctgaatggcgcttacaaggccatccctgtggcacaggacctgaatgcaccgtctgactgggattcccggggaaaagacagctacgagacctcgcagctcgacgaccagagcgctgagacccattctcacaagcaatctcgcctctacaagagaaaagcaaatgacgaaagcaacgaacattccgatgtgattgattcacaagaactaagtaaagtttccagagagttccattcgcatgagtttcatagtcatgaagatatgctggtcgtcgatccaaagtcaaaggaagaggataagcacctcaagttcagaatctcacacgagctcgattctgcatccagtgaagtcaattag

SEQ ID NO: 12828 - DNA, 903 bp, Artificial Sequence
  derived and/or modified sequence
atgagaattgctgtgatctgcttctgcctgctgggcatcacctgtgccatccctgtgaagcaggccgacagcggcagcagcgaggagaagcagctgtacaacaagtacccagatgctgtggccacctggctgaacccagaccccagccagaagcagaacctgctggccccccagaccctgcccagcaagagcaatgaaagccatgaccacatggatgacatggatgatgaagatgatgatgaccacgtggacagccaggacagcattgacagcaatgacagtgatgatgtggatgacacagatgacagccaccagagtgatgagagccaccacagtgatgaaagtgatgagctggtgacagacttccccacagacctgcctgccacagaggtgttcacccctgtggtgcccaccgtggacacctatgatggccgcggggacagcgtggtgtatggcctgcggagcaagagcaagaagttcagaagaccagacatccagtacccagatgccacagatgaggacatcaccagccacatggagagcgaggagctgaatggagcctacaaggccatccctgtggcccaggacctgaatgcccccagcgactgggacagccggggcaaggacagctatgagaccagccagctggatgaccagagcgctgagacccacagccacaagcagagccggctgtacaagaggaaggccaatgatgagagcaatgagcacagtgatgtgattgacagccaggagctgagcaaggtgtcccgggagttccacagccatgagttccacagccatgaggacatgctggtggtggaccccaagagcaaggaggaggacaagcacctgaagttccgcatcagccatgagctggacagcgccagcagcgaggtgaactag

SEQ ID NO: 12829 - DNA, 903 bp, Artificial Sequence
  derived and/or modified sequence
atgcggatcgccgtgatctgcttctgcctgctgggcatcacctgcgcgatccccgtgaaacaggcggactcaggttccagtgaggaaaagcagctgtacaataaatatccagatgcagtcgctacatggctgaatccagaccctagccaaaagcaaaatctgcttgcaccccaaactctgccctctaagtccaatgagagccatgaccacatggatgatatggacgacgaagatgatgacgatcatgtcgattcccaggacagcattgactctaatgattccgacgacgtggatgataccgatgactcacaccagtcggatgaatctcatcactctgatgaaagtgatgaattagtcacagatttccccacagaccttcctgcaacagaggtcttcaccccagtagtgcccactgttgatacgtacgatgggaggggtgattcggtggtgtatggcctgaggagcaaatccaaaaagttccgccggcctgacattcagtaccccgacgctactgatgaggatattacttcgcacatggaatctgaggaactgaatggagcgtacaaggctataccagtggcccaggatctcaatgcccctagcgactgggatagcagaggcaaagatagttacgagacgtctcagcttgatgatcagtcagcagagactcactcccacaagcagtcccgcctgtataagcggaaggcaaatgacgagtccaacgagcacagcgacgttattgactcacaggagctgtctaaggtctccagggaatttcactcccacgaattccactcacacgaggacatgttagtggtcgacccaaagtcgaaggaggaagacaagcatctgaagtttcgaatcagtcatgagttggattcagcaagctctgaggtgaactag

SEQ ID NO: 12830 - DNA, 903 bp, Artificial Sequence
  derived and/or modified sequence
atgagaatcgctgtgatttgcttctgcctgctgggcatcacatgtgctattccagtaaagcaggctgacagtggcagcagcgaagagaagcagctctacaacaagtacccagacgccgtcgctacttggctcaacccagacccttcccagaaacagaatctgctcgccccacaaacattaccttccaaatccaatgagtcccatgatcacatggacgacatggacgacgaggacgacgatgatcacgtggactcccaggacagtatcgacagtaacgatagtgatgacgtggacgatacagacgattcccaccagtccgacgagtcccatcactccgacgaaagcgatgagcttgtgacagacttcccaacggatctgcccgcaacggaagtgttcacccccgttgtacccactgtggatacatatgacgggagaggagatagcgtcgtgtacggtctgcgtagtaagtccaagaaattcagacgacccgatatccagtaccctgacgcaacggacgaggacatcacctcccatatggagtcagaggagctgaatggcgcttataaggccattccagtcgcccaggatctcaacgcccctagcgattgggacagccgcggtaaagactcatatgaaacatcacagttggatgaccagtcagccgaaactcacagccacaagcaaagtagactgtacaaacgcaaggctaatgacgagagcaacgagcactccgacgtgatcgattcacaggagctttcaaaggtgtctagggagtttcactcacacgaatttcacagccacgaggacatgctggtggtcgatccaaaatcaaaggaggaggacaaacatctcaagttcagaatctctcacgagctcgattctgcgtcttctgaggtgaactag

SEQ ID NO: 12831 - DNA, 1565 bp, Artificial Sequence
  derived and/or modified sequence
ggatgtctgcagcagcatttaaattctgggagggcttggttgtcagcagcagcaggaggaggcagagcacagcatcgtcgggaccagactcgtctcaggccagttgcagccttctcagccaaacgccgaccaaggaaaactcactaccatgagaattgcagtgatttgcttttgcctcctaggcatcacctgtgccataccagttaaacaggctgattctggaagttctgaggaaaagcagctttacaacaaatacccagatgctgtggccacatggctaaaccctgacccatctcagaagcagaatctcctagccccacagacccttccaagtaagtccaacgaaagccatgaccacatggatgatatggatgatgaagatgatgatgaccatgtggacagccaggactccattgactcgaacgactctgatgatgtagatgacactgatgattctcaccagtctgatgagtctcaccattctgatgaatctgatgaactggtcactgattttcccacggacctgccagcaaccgaagttttcactccagttgtccccacagtagacacatatgatggccgaggtgatagtgtggtttatggactgaggtcaaaatctaagaagtttcgcagacctgacatccagtaccctgatgctacagacgaggacatcacctcacacatggaaagcgaggagttgaatggtgcatacaaggccatccccgttgcccaggacctgaacgcgccttctgattgggacagccgtgggaaggacagttatgaaacgagtcagctggatgaccagagtgctgaaacccacagccacaagcagtccagattatataagcggaaagccaatgatgagagcaatgagcattccgatgtgattgatagtcaggaactttccaaagtcagccgtgaattccacagccatgaatttcacagccatgaagatatgctggttgtagaccccaaaagtaaggaagaagataaacacctgaaatttcgtatttctcatgaattagatagtgcatcttctgaggtcaattaaaaggagaaaaaatacaatttctcactttgcatttagtcaaaagaaaaaatgctttatagcaaaatgaaagagaacatgaaatgcttctttctcagtttattggttgaatgtgtatctatttgagtctggaaataactaatgtgtttgataattagtttagtttgtggcttcatggaaactccctgtaaactaaaagcttcagggttatgtctatgttcattctatagaagaaatgcaaactatcactgtattttaatatttgttattctctcatgaatagaaatttatgtagaagcaaacaaaatacttttacccacttaaaaagagaatataacattttatgtcactataatcttttgttttttaagttagtgtatattttgttgtgattatctttttgtggtgtgaataaatcttttatcttgaatgtaataagaatttggtggtgtcaattgcttatttgttttcccacggttgtccagcaattaataaaacataaccttttttactgcct

SEQ ID NO: 12832 - DNA, 1425 bp, Artificial Sequence
  derived and/or modified sequence
atgaaacgggtgctggtcctattgctggcagtcgcttttggacatgcgttagaaagaggcagagactatgagaaaaataaagtctgcaaggaattttcccacctgggtaaggaggattttacctcactctctttagttttgtactctagaaagtttcccagtggcacttttgagcaagtgtcccagctcgtgaaagaagtggttagcctgacagaggcatgttgcgcagagggggctgacccagactgctacgacacccgcactagcgcgttgtccgcaaaatcttgtgaatccaactctcccttcccagtccatcccggaacggcggaatgttgtaccaaagaagggctggagagaaaactctgcatggctgcactcaaacaccagccccaggagtttcccacgtacgtggaaccaaccaatgatgagatctgtgaagccttccggaaggaccccaaggagtatgcaaatcaatttatgtgggagtacagcaccaattacggccaagcaccattgtcacttctcgtgagctacaccaagtcttacctgagcatggtggggagctgctgcacctccgcctcccccaccgtctgcttcctcaaagaacgccttcagctgaagcatctctccttgctcacaacactcagcaaccgggtttgttcccagtacgccgcttatggcgaaaagaaaagcaggctcagcaatctgatcaagttggctcagaaggtgcccaccgcggacctagaggacgtgctacctctggctgaagacattacaaacatattgagtaagtgttgtgagagcgctagcgaggactgcatggccaaagagttacccgagcacacagtgaagttgtgcgataaccttagcacaaaaaactctaagttcgaagactgctgtcaagagaagaccgcaatggacgtattcgtctgcacatacttcatgcctgcagcccagttaccagaactgccagatgttgaattacctacgaataaggatgtgtgcgatcccgggaacaccaaggtcatggataagtatactttcgaactctccagaagaacccatctcccagaggtttttttgtcgaaggtgctggagcccactttgaagtctttgggcgaatgttgcgatgtagaggactccacaacttgtttcaatgcgaagggaccattgctgaagaaggaactgtcttcattcattgataaagggcaggagctgtgcgctgattactcagagaatacatttaccgagtacaaaaagaagctggccgagcggttaaaggccaaattgccggatgccactccaaccgagctagccaaactcgtgaataaacatagcgatttcgcaagtaattgttgctcgattaattctccccctctgtattgtgacagcgagatcgacgcagagctgaaaaacattctctag

SEQ ID NO: 12833 - DNA, 1425 bp, Artificial Sequence
  derived and/or modified sequence
atgaagagggtgctggtgctgctgctggccgtggcctttggacatgccctggagcggggccgggactatgagaagaacaaggtgtgcaaggagttcagccacctgggcaaggaggacttcaccagcctgagcctggtgctgtacagcaggaagttccccagcggcacctttgagcaggtgtcccagctggtgaaggaggtggtgtccctgacagaggcctgctgtgccgagggcgctgaccctgactgctatgacaccaggaccagcgccctgagcgccaagagctgtgagagcaacagccccttccctgtgcaccctggaacagctgagtgctgcaccaaggagggcctggagaggaagctgtgcatggccgccctgaagcaccagccccaggagttccccacctacgtggagcccaccaatgatgagatctgtgaggccttcaggaaggaccccaaggagtatgccaaccagttcatgtgggagtacagcaccaactacggccaggcccccctgagcctgctggtgtcctacaccaagagctacctgtccatggtgggcagctgctgcaccagcgccagccccaccgtgtgcttcctgaaggagcggctgcagctgaagcacctgagcctgctgaccaccctgagcaacagagtgtgcagccagtatgctgcctacggggagaagaagagccggctgagcaacctgatcaagctggcccagaaggtgcccacagctgacctggaggatgtgctgcccctggccgaggacatcaccaacatcctgagcaagtgctgtgagagcgccagcgaggactgcatggccaaggagctgcctgagcacacagtgaagctgtgtgacaacctgagcaccaagaacagcaagtttgaggactgctgccaggagaagacagccatggatgtgtttgtgtgcacctacttcatgcctgctgcccagctgcctgagctgcctgatgtggagctgcccaccaacaaggatgtgtgtgaccccggcaacaccaaggtgatggacaagtacacctttgagctgagcaggaggacccacctgcctgaggtgttcctgagcaaggtgctggagcccaccctgaagagcctgggggagtgctgtgatgtggaggacagcaccacctgcttcaatgccaagggccccctgctgaagaaggagctgagcagcttcatcgacaagggccaggagctgtgtgccgactacagcgagaacaccttcacagagtacaagaagaagctggccgagcggctgaaggccaagctgcctgatgccacccccacagagctggccaagctggtgaacaagcacagcgactttgccagcaactgctgcagcatcaacagcccccccctgtactgtgacagcgagattgatgctgagctgaagaacatcctgtag

SEQ ID NO: 12834 - DNA, 1425 bp, Artificial Sequence
  derived and/or modified sequence
atgaagcgggtgctggtgctgctgctggccgtggccttcggccacgctcttgagcgaggcagggactatgaaaagaataaggtttgtaaagaattctcccatctgggaaaggaggatttcacttctctgtccttagtcctttatagtaggaaatttccaagcgggaccttcgagcaggtgagccagctcgtgaaagaggtggtgagcctcactgaagcttgttgtgccgagggggccgatcccgattgctatgacactcggaccagtgcccttagtgctaagtcgtgcgagagcaattctccctttcctgtgcatcccggtacggccgagtgttgcacgaaagaaggccttgagcgtaaactttgcatggcggccctgaagcaccaacctcaagagtttcctacatacgtggagcctacaaatgatgagatttgtgaggcctttcgcaaagatccgaaggaatacgccaatcagttcatgtgggagtacagcactaactatggtcaggcccccctctccttgctggtatcatacacaaaaagttacctcagcatggtcggtagttgttgtaccagtgcttcacctaccgtttgcttcctgaaagaacggcttcagctaaagcacctctccctgcttactacattgtctaaccgtgtttgtagccaatacgcagcatacggcgagaagaagtcgcggctctctaacttgattaagcttgcacaaaaagttcctaccgcagacttggaagacgtgctgccccttgcagaagacattacaaatatcctgagtaaatgctgcgaatctgcctcagaagattgcatggccaaggagctgcccgaacacacagtgaagttgtgcgataatctatcaacgaagaatagcaagtttgaggattgttgtcaagaaaagaccgccatggatgtgtttgtgtgcacctacttcatgccggccgctcaactgccagagctcccagatgtggaattacccacgaacaaggacgtgtgtgacccaggcaacacgaaagttatggataaatatacattcgagttgtcaaggaggacccatcttccagaggttttccttagtaaagtcctggaacctactcttaagtcactgggggagtgctgcgacgtggaagattccaccacatgttttaatgccaagggaccactgcttaaaaaggagttgtcgagtttcattgacaaggggcaggagctatgcgccgactattccgagaatactttcacagaatacaaaaagaagttggccgaacggctgaaggccaaattaccggacgccacccctacagagttggccaagctggttaataaacactccgacttcgcttctaactgctgctccattaactcaccgcctttatactgtgacagtgaaattgacgcagagctgaaaaatatcctctag

SEQ ID NO: 12835 - DNA, 1425 bp, Artificial Sequence
  derived and/or modified sequence
atgaaacgagtactggtgctacttctggccgtggcttttggccatgcgctagagaggggaagggactatgagaagaataaagtatgtaaagaattttcccatttaggcaaagaagacttcacctccctgagcctcgtcttatactctagaaaatttccatcaggcacttttgaacaggtgtcccaactggtgaaggaggttgtcagcttgaccgaggcctgttgcgctgagggagccgatcccgattgctatgacacccgcacaagtgccctgtccgcaaaatcttgcgagtccaattcaccattccccgtacacccaggcacagcagaatgctgtactaaagaggggctcgaaaggaagctttgcatggcagctctgaaacaccagccccaggaattcccaacttacgtcgagcctacaaatgacgagatatgcgaagccttccgaaaagaccccaaagaatatgctaaccagttcatgtgggagtactcaacaaattacggacaggccccactcagcttactggtgtcatatacaaaatcttacctgtctatggtgggaagctgctgcacctctgcttccccaaccgtttgcttcctaaaggagagactgcagcttaagcacttatctcttcttaccactctaagcaatagggtgtgctcacagtacgctgcctatggggaaaaaaaatcccggctgtctaacctaataaagctggcccagaaagtgcccaccgccgatctcgaggacgtcctgcctttggctgaagatattacgaacattctgtcaaaatgctgcgagtcagcctctgaggattgtatggccaaagagttgccagaacatactgtaaaattgtgtgataatctgtctactaaaaactcgaagttcgaggattgctgtcaggagaagaccgcaatggatgtgtttgtctgtacatacttcatgccagcagcccagttacccgagcttcctgatgttgagctcccaactaataaggacgtctgcgatcctggcaacaccaaagtcatggacaagtacacattcgagctgtcccgcaggacgcacctaccggaggtctttctctccaaggtccttgaaccaaccctgaagtccctgggagaatgctgcgatgtagaggatagcaccacctgtttcaacgcaaaaggcccactcttaaaaaaggagctgtctagcttcatagacaaagggcaggagttgtgtgcagactactccgagaacacatttaccgaatataagaaaaagctagccgagcggttaaaagcgaagctcccagatgccacacccactgaactggcaaaacttgtgaataagcacagcgacttcgcctcgaattgctgctctataaacagcccgcctttatactgcgactccgagattgatgctgagcttaaaaacatcctgtag

SEQ ID NO: 12836 - DNA, 1425 bp, Artificial Sequence
  derived and/or modified sequence
atgaagagagtgctggtgctgctgctggccgtggccttcggccacgccctggagagaggcagagactacgagaagaacaaggtgtgcaaggagttcagccacctgggcaaggaggacttcaccagcctgagcctggtgctgtacagcagaaagttccccagcggcaccttcgagcaggtgagccagctggtgaaggaggtggtgagcctgaccgaggcctgctgcgccgagggcgccgaccccgactgctacgacaccagaaccagcgccctgagcgccaagagctgcgagagcaacagccccttccccgtgcaccccggcaccgccgagtgctgcaccaaggagggcctggagagaaagctgtgcatggccgccctgaagcaccagccccaggagttccccacctacgtggagcccaccaacgacgagatctgcgaggccttcagaaaggaccccaaggagtacgccaaccagttcatgtgggagtacagcaccaactacggccaggcccccctgagcctgctggtgagctacaccaagagctacctgagcatggtgggcagctgctgcaccagcgccagccccaccgtgtgcttcctgaaggagagactgcagctgaagcacctgagcctgctgaccaccctgagcaacagagtgtgcagccagtacgccgcctacggcgagaagaagagcagactgagcaacctgatcaagctggcccagaaggtgcccaccgccgacctggaggacgtgctgcccctggccgaggacatcaccaacatcctgagcaagtgctgcgagagcgccagcgaggactgcatggccaaggagctgcccgagcacaccgtgaagctgtgcgacaacctgagcaccaagaacagcaagttcgaggactgctgccaggagaagaccgccatggacgtgttcgtgtgcacctacttcatgcccgccgcccagctgcccgagctgcccgacgtggagctgcccaccaacaaggacgtgtgcgaccccggcaacaccaaggtgatggacaagtacaccttcgagctgagcagaagaacccacctgcccgaggtgttcctgagcaaggtgctggagcccaccctgaagagcctgggcgagtgctgcgacgtggaggacagcaccacctgcttcaacgccaagggccccctgctgaagaaggagctgagcagcttcatcgacaagggccaggagctgtgcgccgactacagcgagaacaccttcaccgagtacaagaagaagctggccgagagactgaaggccaagctgcccgacgccacccccaccgagctggccaagctggtgaacaagcacagcgacttcgccagcaactgctgcagcatcaacagcccccccctgtactgcgacagcgagatcgacgccgagctgaagaacatcctgtag

SEQ ID NO: 12837 - protein, 99 aa, Artificial Sequence
  derived and/or modified sequence
MTSKLAVALLAAFLISAALCEGAVLPRSAKELRCQCIKTYSKPFHPKFIKELRVIESGPHCANTEIIVKLSDGRELCLDPKENWVQRVVEKFLKRAENS

SEQ ID NO: 12838 - DNA, 300 bp, Artificial Sequence
  derived and/or modified sequence
atgaccagcaagctggccgtggccctgctggccgccttcctgatcagcgccgccctgtgcgagggcgccgtgctgcccagaagcgccaaggagctgagatgccagtgcatcaagacctacagcaagcccttccaccccaagttcatcaaggagctgagagtgatcgagagcggcccccactgcgccaacaccgagatcatcgtgaagctgagcgacggcagagagctgtgcctggaccccaaggagaactgggtgcagagagtggtggagaagttcctgaagagagccgagaacagctag

SEQ ID NO: 12839 - DNA, 300 bp, Artificial Sequence
  derived and/or modified sequence
atgaccagcaagctggcagtggctctgctcgccgccttcctgatttcggctgccttgtgcgaaggggccgtattgccacgttccgcaaaagaactccgctgccagtgcatcaaaacttactcaaagccttttcacccgaagttcataaaagaattaagggtcatcgagtccgggccccactgtgcaaacactgagattatagtaaagctgtccgacggaagagaactgtgtctagatccaaaggaaaactgggtgcagagggtggtggagaaattcctcaagagggccgaaaattcatag

SEQ ID NO: 12840 - DNA, 300 bp, Artificial Sequence
  derived and/or modified sequence
atgaccagcaagctggccgtggccctgctggccgccttcctgatctctgctgccctgtgtgagggcgctgtgctgcccaggtctgccaaggagctgcgctgccagtgcatcaagacctacagcaagcccttccaccccaagttcatcaaggagctgcgggtgattgaaagtggcccccactgtgccaacacagagatcatcgtgaagctgagtgatggccgggagctgtgcctggaccccaaggagaactgggtgcagagggtggtggagaagttcctgaagagagctgagaacagctag

SEQ ID NO: 12841 - DNA, 1705 bp, Artificial Sequence
  derived and/or modified sequence
gagggtgcataagttctctagtagggtgatgatataaaaagccaccggagcactccataaggcacaaactttcagagacagcagagcacacaagcttctaggacaagagccaggaagaaaccaccggaaggaaccatctcactgtgtgtaaacatgacttccaagctggccgtggctctcttggcagccttcctgatttctgcagctctgtgtgaaggtgcagttttgccaaggagtgctaaagaacttagatgtcagtgcataaagacatactccaaacctttccaccccaaatttatcaaagaactgagagtgattgagagtggaccacactgcgccaacacagaaattattgtaaagctttctgatggaagagagctctgtctggaccccaaggaaaactgggtgcagagggttgtggagaagtttttgaagagggctgagaattcataaaaaaattcattctctgtggtatccaagaatcagtgaagatgccagtgaaacttcaagcaaatctacttcaacacttcatgtattgtgtgggtctgttgtagggttgccagatgcaatacaagattcctggttaaatttgaatttcagtaaacaatgaatagtttttcattgtaccatgaaatatccagaacatacttatatgtaaagtattatttatttgaatctacaaaaaacaacaaataatttttaaatataaggattttcctagatattgcacgggagaatatacaaatagcaaaattgaggccaagggccaagagaatatccgaactttaatttcaggaattgaatgggtttgctagaatgtgatatttgaagcatcacataaaaatgatgggacaataaattttgccataaagtcaaatttagctggaaatcctggatttttttctgttaaatctggcaaccctagtctgctagccaggatccacaagtccttgttccactgtgccttggtttctcctttatttctaagtggaaaaagtattagccaccatcttacctcacagtgatgttgtgaggacatgtggaagcactttaagttttttcatcataacataaattattttcaagtgtaacttattaacctatttattatttatgtatttatttaagcatcaaatatttgtgcaagaatttggaaaaatagaagatgaatcattgattgaatagttataaagatgttatagtaaatttattttattttagatattaaatgatgttttattagataaatttcaatcagggtttttagattaaacaaacaaacaattgggtacccagttaaattttcatttcagataaacaacaaataattttttagtataagtacattattgtttatctgaaattttaattgaactaacaatcctagtttgatactcccagtcttgtcattgccagctgtgttggtagtgctgtgttgaattacggaataatgagttagaactattaaaacagccaaaactccacagtcaatattagtaatttcttgctggttgaaacttgtttattatgtacaaatagattcttataatattatttaaatgactgcatttttaaatacaaggctttatatttttaactttaagatgtttttatgtgctctccaaattttttttactgtttctgattgtatggaaatataaaagtaaatatgaaacatttaaaatataatttgttgtcaaagtaa

SEQ ID NO: 12842 - DNA, 300 bp, Artificial Sequence
  derived and/or modified sequence
atgaccagcaagctggccgtggccctgctggccgccttcctgatctctgctgccttgtgtgaaggcgctgtccttccccgctctgctaaggaactgcgttgccaatgcattaagacatacagcaagccctttcacccaaaattcatcaaagagctgagagtaattgagtctggcccccactgcgccaacaccgagattatcgtaaagctgtccgatggaagagagctctgccttgatccaaaggagaattgggttcagagggtcgttgagaagtttctcaaacgagccgagaattcatag

SEQ ID NO: 12843 - DNA, 300 bp, Artificial Sequence
  derived and/or modified sequence
atgacatccaagttggctgtggcactgttagctgccttcctcatttccgctgctctgtgtgagggtgctgtgttacctagaagtgccaaggaattacgatgtcagtgcattaaaacatacagcaagcctttccaccccaaattcatcaaagaactgcgagtgatagaatcaggtcctcactgcgcaaacaccgagattattgtgaagctgtccgatggcagggaactctgcctagatccaaaagaaaactgggttcagagggttgttgaaaaatttttgaagagagcggaaaactcttag

SEQ ID NO: 12844 - protein, 162 aa, Artificial Sequence
  derived and/or modified sequence
MRISKPHLRSISIQCYLCLLLNSHFLTEAGIHVFILGCFSAGLPKTEANWVNVISDLKKIEDLIQSMHIDATLYTESDVHPSCKVTAMKCFLLELQVISLESGDASIHDTVENLIILANNSLSSNGNVTESGCKECEELEEKNIKEFLQSFVHIVQMFINTS

SEQ ID NO: 12845 - protein, 14 aa, Artificial Sequence
  derived and/or modified sequence
TEANWVNVISDLKK

SEQ ID NO: 12846 - DNA, 489 bp, Artificial Sequence
  derived and/or modified sequence
atgagaatcagcaagccccacctgagaagcatcagcatccagtgctacctgtgcctgctgctgaacagccacttcctgaccgaggccggcatccacgtgttcatcctgggctgcttcagcgccggcctgcccaagaccgaggccaactgggtgaacgtgatcagcgacctgaagaagatcgaggacctgatccagagcatgcacatcgacgccaccctgtacaccgagagcgacgtgcaccccagctgcaaggtgaccgccatgaagtgcttcctgctggagctgcaggtgatcagcctggagagcggcgacgccagcatccacgacaccgtggagaacctgatcatcctggccaacaacagcctgagcagcaacggcaacgtgaccgagagcggctgcaaggagtgcgaggagctggaggagaagaacatcaaggagttcctgcagagcttcgtgcacatcgtgcagatgttcatcaacaccagctag

SEQ ID NO: 12847 - DNA, 489 bp, Artificial Sequence
  derived and/or modified sequence
atgcgcatctctaagccacatttgaggtcaattagcatccagtgttatctgtgcctgttgctaaacagccacttcctgaccgaggccgggatccacgtgttcattctcgggtgtttttccgctgggctgccaaagacagaggccaattgggtgaacgtgatctccgatctaaagaagatcgaagatctcatccagtccatgcatatcgatgcaaccctgtacaccgaatccgatgtacaccctagctgcaaagtgaccgcaatgaaatgctttttattggagctgcaggttatctcactggagtcaggggatgcatccatccacgacacagtggagaacctgatcattctggccaacaattcactctcatcgaatgggaacgtgacggaatcgggttgcaaggagtgtgaagagctcgaagaaaaaaacatcaaagagttcttgcagtctttcgtacacattgtgcagatgttcatcaacaccagctag

SEQ ID NO: 12848 - DNA, 489 bp, Artificial Sequence
  derived and/or modified sequence
atgcggatatctaaacctcatctgcgaagcattagcatacagtgctatctgtgcctgctgctgaatagccatttcctgactgaagccggaatccacgtgtttattttgggatgttttagcgcaggattgcccaagaccgaggccaattgggtgaacgtcatctccgatctcaagaagatcgaggacctgatccagtctatgcatattgacgctactctctataccgaatccgatgtgcacccttcttgcaaagttacagctatgaagtgttttttattggagctgcaggtgatctctctcgaatcaggtgacgccagcatacacgacacagtcgagaacctaatcatcctggccaacaactctttgagttccaacggaaatgtgacagagagcggttgcaaagaatgtgaagaacttgaggagaagaatatcaaagagtttcttcaaagcttcgttcatatcgtgcaaatgttcataaatacatcctag

SEQ ID NO: 12849 - DNA, 489 bp, Artificial Sequence
  derived and/or modified sequence
atgcggatttccaaaccccacctgagaagcatctcgatccaatgctatttatgcctcctcctgaacagccactttctgacggaggcaggcatccacgtcttcattctgggttgtttcagcgccggactgccgaaaactgaggccaactgggtcaacgttatatctgatctcaagaagatagaggatttgatccagagcatgcatattgacgccacactctacacagagagcgatgtccatcccagctgcaaggtcacagctatgaaatgttttctactggaactgcaggttattagtctcgaatcaggggatgcaagcattcacgacaccgttgagaacttaattatacttgctaacaactctctctcaagcaatggcaacgtcactgagagcggctgcaaggaatgcgaagaattagaagagaagaacatcaaagaattcctgcaatcgtttgtccacattgtacagatgttcattaacacaagctag

SEQ ID NO: 12850 - DNA, 489 bp, Artificial Sequence
  derived and/or modified sequence
atgaggatcagcaagccccacctgcggagcatcagcatccagtgctacctgtgcctgctgctgaacagccacttcctgacagaagctggcatccacgtgttcatcctgggctgcttctctgctggcctgcccaagacagaggccaactgggtgaatgtcatcagtgacctgaagaagattgaagatctcatccagagcatgcacattgatgccaccctgtacacagaaagtgatgtgcaccccagctgcaaggtgacagccatgaagtgcttcctgctggagctgcaggtgatcagcctggagagcggagatgccagcatccatgacacagtggagaacctgatcatcctggccaacaacagcctgagcagcaatggaaatgtgacagaaagtggctgcaaggaatgtgaggagctggaggagaagaacatcaaggagttcctgcagagctttgtgcacatcgtgcagatgttcatcaacaccagctag

SEQ ID NO: 12851 - DNA, 2472 bp, Artificial Sequence
  derived and/or modified sequence
actccgggtggcaggcgcccgggggaatcccagctgactcgctcactgccttcgaagtccggcgccccccgggagggaactgggtggccgcaccctcccggctgcggtggctgtcgccccccaccctgcagccaggactcgatggaggtacagagctcggcttctttgccttgggaggggagtggtggtggttgaaagggcgatggaattttccccgaaagcctacgcccagggcccctcccagctccagcgttaccctccggtctatcctactggccgagctgccccgccttctcatggggaaaacttagccgcaacttcaatttttggtttttcctttaatgacacttctgaggctctcctagccatcctcccgcttccggaggagcgcagatcgcaggtccctttgcccctggcgtgcgactccctactgcgctgcgctcttacggcgttccaggctgctggctagcgcaaggcgggccgggcaccccgcgctccgctgggagggtgagggacgcgcgtctggcggccccagccaagctgcgggtttctgagaagacgctgtcccgcagccctgagggctgagttctgcacccagtcaagctcaggaaggccaagaaaagaatccattccaatatatggccatgtggctctttggagcaatgttccatcatgttccatgctgctgacgtcacatggagcacagaaatcaatgttagcagatagccagcccatacaagatcgtattgtattgtaggaggcattgtggatggatggctgctggaaaccccttgccatagccagctcttcttcaatacttaaggatttaccgtggctttgagtaatgagaatttcgaaaccacatttgagaagtatttccatccagtgctacttgtgtttacttctaaacagtcattttctaactgaagctggcattcatgtcttcattttgggctgtttcagtgcagggcttcctaaaacagaagccaactgggtgaatgtaataagtgatttgaaaaaaattgaagatcttattcaatctatgcatattgatgctactttatatacggaaagtgatgttcaccccagttgcaaagtaacagcaatgaagtgctttctcttggagttacaagttatttcacttgagtccggagatgcaagtattcatgatacagtagaaaatctgatcatcctagcaaacaacagtttgtcttctaatgggaatgtaacagaatctggatgcaaagaatgtgaggaactggaggaaaaaaatattaaagaatttttgcagagttttgtacatattgtccaaatgttcatcaacacttcttgattgcaattgattctttttaaagtgtttctgttattaacaaacatcactctgctgcttagacataacaaaacactcggcatttcaaatgtgctgtcaaaacaagtttttctgtcaagaagatgatcagaccttggatcagatgaactcttagaaatgaaggcagaaaaatgtcattgagtaatatagtgactatgaacttctctcagacttactttactcatttttttaatttattattgaaattgtacatatttgtggaataatgtaaaatgttgaataaaaatatgtacaagtgttgttttttaagttgcactgatattttacctcttattgcaaaatagcatttgtttaagggtgatagtcaaattatgtattggtggggctgggtaccaatgctgcaggtcaacagctatgctggtaggctcctgccagtgtggaaccactgactactggctctcattgacttccttactaagcatagcaaacagaggaagaatttgttatcagtaagaaaaagaagaactatatgtgaatcctcttctttatactgtaatttagttattgatgtataaagcaactgttatgaaataaagaaattgcaataactggcatataatgtccatcagtaaatcttggtggtggtggcaataataaacttctactgataggtagaatggtgtgcaagcttgtccaatcacggattgcaggccacatgcggcccaggacaactttgaatgtggcccaacacaaattcataaactttcatacatctcgtttttagctcatcagctatcattagcggtagtgtatttaaagtgtggcccaagacaattcttcttattccaatgtggcccagggaaatcaaaagattggatgcccctggtatagaaaactaatagtgacagtgttcatatttcatgctttcccaaatacaggtattttattttcacattctttttgccatgtttatataataataaagaaaaaccctgttgatttgttggagccattgttatctgacagaaaataattgtttatattttttgcactacactgtctaaaattagcaagctctcttctaatggaactgtaagaaagatgaaatatttttgttttattataaatttatttcaccttaa

SEQ ID NO: 12852 - DNA, 1447 bp, Artificial Sequence
  derived and/or modified sequence
gggactccgggtggcaggcgcccgggggaatcccagctgactcgctcactgccttcgaagtccggcgccccccgggagggaactgggtggccgcaccctcccggctgcggtggctgtcgccccccaccctgcagccaggactcgatggagaatccattccaatatatggccatgtggctctttggagcaatgttccatcatgttccatgctgctgacgtcacatggagcacagaaatcaatgttagcagatagccagcccatacaagatcgtattgtattgtaggaggcattgtggatggatggctgctggaaaccccttgccatagccagctcttcttcaatacttaaggatttaccgtggctttgagtaatgagaatttcgaaaccacatttgagaagtatttccatccagtgctacttgtgtttacttctaaacagtcattttctaactgaagctggcattcatgtcttcattttgggctgtttcagtgcagggcttcctaaaacagaagccaactgggtgaatgtaataagtgatttgaaaaaaattgaagatcttattcaatctatgcatattgatgctactttatatacggaaagtgatgttcaccccagttgcaaagtaacagcaatgaagtgctttctcttggagttacaagttatttcacttgagtccggagatgcaagtattcatgatacagtagaaaatctgatcatcctagcaaacaacagtttgtcttctaatgggaatgtaacagaatctggatgcaaagaatgtgaggaactggaggaaaaaaatattaaagaatttttgcagagttttgtacatattgtccaaatgttcatcaacacttcttgattgcaattgattctttttaaagtgtttctgttattaacaaacatcactctgctgcttagacataacaaaacactcggcatttcaaatgtgctgtcaaaacaagtttttctgtcaagaagatgatcagaccttggatcagatgaactcttagaaatgaaggcagaaaaatgtcattgagtaatatagtgactatgaacttctctcagacttactttactcatttttttaatttattattgaaattgtacatatttgtggaataatgtaaaatgttgaataaaaatatgtacaagtgttgttttttaagttgcactgatattttacctcttattgcaaaatagcatttgtttaagggtgatagtcaaattatgtattggtggggctgggtaccaatgctgcaggtcaacagctatgctggtaggctcctgccagtgtggaaccactgactactggctctcattgacttccttactaagcatagcaaacagaggaagaatttgttatcagtaagaaaaagaagaactatatgtgaatcctcttctttatactgtaatttagttattgatgtataaagcaactgttatgaa

SEQ ID NO: 12853 - DNA, 6026 bp, Artificial Sequence
  derived and/or modified sequence
catttgatgtgtccatcattcccttttgctggatatacttcccttgactgacttctagaatatgatactcttcattttccccttattcagtagtcattccttttgatttttctttcctggtccttcttttataatccttgacctaattaatactgaagtatcccatgctcaggttttggtccttttctctacctacatcactccctcatgagcactctgatgagttgcatatctatttccagttcagacacattcctgaactcgagatttatgtatccaatggcatatttgatatttccttgtgcatatctaatgagcctttcaaactcagcatgtccagaactgaaactcctgacctgtcccctctcctcaaggcatcagctgtgtccaaggcttgcttttttcagttgatgtcagctccatcttctcaggtgttcagaggaaaagactcagagtcattctcattctctttttcctcctgtaccctgcaatctgtctggaaattatattagtcctatcataaaaaatgattccagactctaaccacatgtatctatctccactgctaccccaagcagattcaggtcctcctctcctccacctttctgacctcatctcagactactcttgcccttgctcattccactggcttcttttctgtcccttagactcatagccacacagttgcctctgccctagctattccctctgcttcaaatagtcttcactgagataccaccggggctcacaccctttctatctttaccctgactacccaaaatttcaacctcacccttcttaccttgtttcctttttcctagataatttttcactctctaataaaatacataattataataacttatttgtgcattttctatatggttcatctttctttctgaaatcaagattgtgttctgccatcattgatgtattccaaggtcataaaaaatgcctagcccataataaatattcagtgaatatttactaaatgaatcaaggaaagtgatgttgtcttatagtctctatattctattcagtctcggcttgtcttttctagtggtttgaatgaatggatgatgcatttaacccagaaaaccaatacttgtaaatcttttattcttgtatgtttaattaattttaaatgtgtgattagacaagttaataagcagaacaaaacatcaagtatgttagatcatctttcctcactgggaagaactataatattggtatagaatgtaagatgtttacagttattttcacaagcaatgatttgcttgggaaatagcaatggtgtgagccccgacagtatctgggtgaagaatatttgaagcagaaggaaaatctagagcagaggcaactgtgtgactacgagtctaagggacagttttcactccagaatgaaaactatagagatgcctgcctgcgttaacttgctcacctcactatgtattttccctgggcagtaccatcctgctaggatttcagtgctgccatgagtcagcagtcaccttgcagtgagatccaatcacaagattccaaacaattcctaccctgtgagctccttgaggacagggctgggatttagtctcttttatttcacaggcccagagttctaggatggcagaatggtttcgggtgccaggccccacctggttgctctccatgggcatactgcccagggctgccttgggacttggctccctacattttggtgcagcagtcttcagccaccccaactatggcttaagtggccccagctgcagcttgacccactgcttcacaagatacaggtggtaagccttggtgaaattcatgtagtgttaagcctgcagtctcacagaatacaagagctgagggggcatggcttcctccactttgatttcaaaagatgatgctgacttatttggggcacaggcagagactttgcacaggggtagaaccaccacagagagcccccaacagggcggtgcctcatggagccaaggaaatggggttgccaccaaaatcctagaattatggttaacagtgtagagctgcagtctggaaaagcttcaggcatgagactccaacccatgacagctgaagaataggctgagcctaggaaagctatgggagctgagctgcctgaggccttaggggtccaacccccacccagtgtgcccaggatgcagaatatggagtgaaaggaaattattctccaactttaagatttaatattgttctccctgttgggttttggacttgtttcagatgagttatccctcttttcttgcctatttccccattttagaatgggaatgtctcttctataccttcgcacattgtattttggaagcagatagcttattttgatttcacaggctcgtggttgcagaacatttgccttcaggatgaagtcacacccatatttgatttagataagtattacctagataactcgattaactagatttagataagtattaactaacagtattaagagttaatactggagtgacttttgagcctactaggatggaatgaatatattttgcattgtatgaaggatgtgaatttggcagagaggggagggtaggtgcagaatgctatggtttgaatgcctccaccaaaactcatgttgacatttaattgtgaatgtgacagttttaagaagtgggatctttaacaggtaattaggtatctctttaggcactttcattagacagggccctcatgaatggattaatgcagttatggagggagtgagtttgttattgcatgagtgggctccttattaaagggtgattttggctcagtttcctctctgtctcatgtgcttgctttcacttctacccttctgccacaggatgacccttagcagatgtcagtgccatgcacttgtacttcccagcctccagaactgtgagccaaatgagcttgtgtcccttgtaaattaagtttgtggtgttctcttatagcagcagaaaatggattcaggcagcaagcagagctataaaatacttctttttttttttttttgagatggagtttcacttttgttgcccaggctgtagtgcaaaggcatgatctcggctcaccacaacctctttctcccgggttcaagcaattgtctggcctcagcctcccgagtagctgggattacaggcatgcactatcacacccggctgattttgtatttttttgtaaagacggggtttcaccatgttggtcaggctgatctcaaactcccgacatcaggtgatcctcctgcctcggcctcccaaactgctgggattacaggcacgagccaccatgccctgccaatacttcttttcatctacactggcttccattatcatgattttgttagatacttttgaggacattttctattgcattcctccatgtttggcaaccacactctatggtggagtcttctggctaagcacttagtcttcttttacttataccagcaggatgtagttgagcagggtagtgaaaatccattgtgacattgtaaagcctcactgctataagaggccaggaatgaaattttcattgtttacaaaagtagcttcgtaaggcctaattaagaattatatcacccatggcattgctcaatcccaagtcaatattttttttttttgaaaaatgtggattcaaggataccacaactaaaagggatgtagggaatttaagaggctttggatgaaatgatgaagattacggtaaagttttataaaaaatttgaagcactgagataatatagacaaagggaataattataaaatgagagtgataaggaaggtttgctttaaataaaccaatcaatgagtgatttagatcatatgtaacaggaatattagatttgatatgttcttgtggacaaaaaggtatttctattggatacacctttgtatcttgcttaatacctaaataagtgttagctttttctttctatgagttatagacaatacattttaaagcagccattttttatatttcagaaacatctgaaaagtataataatttaattctttgtgtttatggaacttaattcagtgaatatttatgtcatgggttgtggcagattttggttttttgtggaagaggtcaccatgtatatactattttgaagggcagaaaatagttgtttctatttttgtatattttggttataaactgcttttaatggcatggagttgaatttagggatgtttaatcttcatattcttcacttgatttgagtgagaaaaaataaaattttcttggttataaaattctcaaatgattaacaatggtttctttaaaagactgaagatacatattcagtggctgtagaaatggctactgctattgtaaactggattaacaatcagtacttctacaaatctaagtatttgtttgtttttactttttactagtatgactctggaatttttcaattcagggaaataatagaatagaaaagctttgctaaggcattgtaatcagacagaactggcctcaaatcctggctgtcatgtacttgctatgggcctagagtagcttacctaaatgctactaaccttcctccataccattattgtaaagattaaaggtgatgcatctgttaagtaactaatagagtgcttattaaaaggtaggtgttcaataagtattaattccctccctttctttttcttactagtgcacttgtgtttttaatggatcatactttaccctagattgtattgtaggaggcattgtggatggatggctgctggaaaccccttgccatagccagctcttcttcaatacttaaggatttaccgtggctttgagtaatgagaatttcgaaaccacatttgagaagtatttccatccagtgctacttgtgtttacttctaaacagtcattttctaactgaagctggcattcatgtcttcattttgggatgcagctaatatacccagttggcccaaagcacctaacctatagttatataatctgactctcagttcagttttactctactaatgccttcatggtattgggaaccatagatttgtgcagctgtttcagtgcagggcttcctaaaacagaagccaactgggtgaatgtaataagtgatttgaaaaaaattgaagatcttattcaatctatgcatattgatgctactttatatacggaaagtgatgttcaccccagttgcaaagtaacagcaatgaagtgctttctcttggagttacaagttatttcacttgagtccggagatgcaagtattcatgatacagtagaaaatctgatcatcctagcaaacaacagtttgtcttctaatgggaatgtaacagaatctggatgcaaagaatgtgaggaactggaggaaaaaaatattaaagaatttttgcagagttttgtacatattgtccaaatgttcatcaacacttcttgattgcaattgattctttttaaagtgtttctgttattaacaaacatcactctgctgcttagacataacaaaacactcggcatttcaaatgtgctgtcaaaacaagtttttctgtcaagaagatgatcagaccttggatcagatgaactcttagaaatgaaggcagaaaaatgtcattgagtaatatagtgactatgaacttctctcagacttactttactcatttttttaatttattattgaaattgtacatatttgtggaataatgtaaaatgttgaataaaaatatgtacaagtgttgttttttaagttgcactgatattttacctcttattgcaaaatagcatttgtttaagggtgatagtcaaattatgtattggtggggctgggtaccaatgctgcaggtcaacagctatgctggtaggctcctgccagtgtggaaccactgactactggctctcattgacttccttactaagcatagcaaacagaggaagaatttgttatcagtaagaaaaagaagaactatatgtgaatcctcttctttatactgtaatttagttattgatgtataaagcaactgttatgaaataaagaaattgcaataactggc

SEQ ID NO: 12854 - DNA, 1355 bp, Artificial Sequence
  derived and/or modified sequence
cacttctgaggctctcctagccatcctcccgcttccggaggagcgcagatcgcaggtccctttgcccctggcgtgcgactccctactgcgctgcgctcttacggcgttccaggctgctggctagcgcaaggcgggccgggcaccccgcgctccgctgggagggtgagggacgcgcgtctggcggccccagccaagctgcgggtttctgagaagacgctgtcccgcagccctgagggctgagttctgcacccagtcaagctcaggaaggccaagaaaagtttcaactagtggccccactgtgtccggaattgatgggttcttggtctcactgacttcaagaatgaagccgcggaccctcgcggtgagtgttacagctcttaaggtggcgcatctggagtttgttccttctgatgttcggatgtgttcggagtttcttccttctggtgggttcgtggtctcgctggctcaggagtgaagctacagaccttcgcgattgtattgtaggaggcattgtggatggatggctgctggaaaccccttgccatagccagctcttcttcaatacttaaggatttaccgtggctttgagtaatgagaatttcgaaaccacatttgagaagtatttccatccagtgctacttgtgtttacttctaaacagtcattttctaactgaagctggcattcatgtcttcattttgggctgtttcagtgcagggcttcctaaaacagaagccaactgggtgaatgtaataagtgatttgaaaaaaattgaagatcttattcaatctatgcatattgatgctactttatatacggaaagtgatgttcaccccagttgcaaagtaacagcaatgaagtgctttctcttggagttacaagttatttcacttgagtccggagatgcaagtattcatgatacagtagaaaatctgatcatcctagcaaacaacagtttgtcttctaatgggaatgtaacagaatctggatgcaaagaatgtgaggaactggaggaaaaaaatattaaagaatttttgcagagttttgtacatattgtccaaatgttcatcaacacttcttgattgcaattgattctttttaaagtgtttctgttattaacaaacatcactctgctgcttagacataacaaaacactcggcatttcaaatgtgctgtcaaaacaagtttttctgtcaagaagatgatcagaccttggatcagatgaactcttagaaatgaaggcagaaaaatgtcattgagtaatatagtgactatgaacttctctcagacttactttactcatttttttaatttattattgaaattgtacatatttgtggaataatgtaaaatgttg

SEQ ID NO: 12855 - DNA, 489 bp, Artificial Sequence
  derived and/or modified sequence
atgcggatcagcaagccccacctgcggagcatcagcatccagtgctatctttgtttgttgctgaactcgcacttcctcaccgaagcaggcattcacgtctttatattaggctgcttcagtgccgggctgcccaagactgaggccaattgggtcaacgtcattagcgacttgaaaaaaattgaggacctgatccagtcaatgcacatagatgcaactctttatactgaaagtgatgttcatccttcatgcaaagtcactgccatgaaatgctttctgctagagttgcaggttatctccctggaatcaggtgatgcttcaatacatgacacagttgagaacctgatcatacttgcaaacaattcactctcctcaaacgggaacgtcaccgagtcaggctgtaaggagtgcgaagaactcgaggagaagaacattaaggagtttctccaatcgtttgtccacattgtgcaaatgtttatcaacacttcttag

SEQ ID NO: 12856 - DNA, 489 bp, Artificial Sequence
  derived and/or modified sequence
atgcggatcagcaagccccacctgcggagcatcagcatccagtgctatctgtgtttgcttcttaactctcatttcttgaccgaggctggaattcacgtgttcatcctaggctgctttagcgcaggcttgcccaagaccgaggctaactgggtgaacgtgatatcagatctcaagaaaatcgaagatttgatccaaagcatgcacattgacgcaacattgtacacagagagcgatgtacacccaagttgtaaagtcacagctatgaaatgcttcctcctggagctgcaggttataagcctggaatctggcgatgcaagcattcacgatactgtggaaaacctgataattttggctaacaactccctctcttcaaatggtaacgttaccgaaagtggctgcaaagaatgtgaagagctagaggagaagaacatcaaagagttcttgcagtctttcgtgcatatcgtgcagatgtttatcaatacgagctag

SEQ ID NO: 12857 - DNA, 489 bp, Artificial Sequence
  derived and/or modified sequence
atgcggatcagcaagccccacctgcggagcatcagcatccagtgctacctgtgcctgctgctgaattcccattttctgaccgaagccggcatccacgtctttattctgggctgcttcagtgctgggctgccgaagactgaggctaattgggtcaatgtcattagtgatctaaagaaaatagaagatctaattcagtccatgcacattgacgctaccctgtatacagaatcagacgtccacccctcctgcaaggtgacggctatgaaatgctttctgttggaacttcaggtcatttccctcgagagtggtgatgcaagcatccatgataccgtcgagaatctaatcattctcgcaaataactccctgtctagcaacggaaacgtgacggagagcggctgcaaggagtgtgaagaactggaagagaagaatatcaaggagttccttcagtcattcgtccacattgttcagatgttcatcaacacctcctag

SEQ ID NO: 12858 - DNA, 489 bp, Artificial Sequence
  derived and/or modified sequence
atgcgtatctcaaagcctcaccttagatctataagcattcagtgctacctatgtctcctgctgaatagccatttcctgactgaggctggcatccacgtttttatactgggctgtttctctgccggactgcccaagaccgaggcgaactgggtgaacgtcatctctgacctcaaaaagatcgaagacctcattcagagtatgcatatcgatgcaaccttgtacacagagagtgacgtacacccaagttgtaaagtgaccgccatgaaatgcttcctcctcgagttacaggtcatatctctagagtcaggggacgccagtatccacgatactgtggagaatctcattatccttgccaataactccttgagttcgaacggtaatgtgactgagagtgggtgcaaggaatgtgaggagctggaggagaagaatattaaggagtttctgcaatcgttcgtccatatcgtgcagatgttcatcaataccagctag

SEQ ID NO: 12859 - DNA, 489 bp, Artificial Sequence
  derived and/or modified sequence
atgagaatctcgaagccccacttgcggagcatctcaatccaatgttatctgtgcctgcttctcaatagtcattttttgaccgaggccggaattcatgtctttatactggggtgcttcagtgcaggactgcccaaaacagaagccaattgggtcaatgttattagtgatctgaaaaaaatcgaagacctgatccaatctatgcacatcgatgcaactctgtatacggagtcagatgttcacccatcgtgcaaagttacagctatgaaatgctttctcttggagctgcaggtaatcagcctggaatctggggacgccagcatccacgacaccgtggagaacctgattattctggccaacaacagcctctcctcaaacggaaatgtcaccgagagcggttgcaaggagtgcgaagagcttgaggaaaagaacatcaaagaatttctccagagctttgtccacatcgtccagatgttcattaacacatcctag

SEQ ID NO: 12860 - DNA, 489 bp, Artificial Sequence
  derived and/or modified sequence
atgcgcatctctaagccacacctgcgcagtatatcgattcagtgttacttatgcctccttctcaacagccactttctcaccgaagcaggtatccacgtgttcattcttggctgctttagtgccggattgcctaagactgaggcaaactgggtgaatgttatctcagatctcaaaaagattgaagatctgattcagtccatgcacatcgacgctactctgtacaccgaatcggatgtgcaccccagctgcaaggtgacagccatgaagtgcttcctcctggagctgcaggtgattagtctcgagagtggcgatgcctcaattcacgatacagtggagaacctgatcatcctggccaacaacagcctttccagtaacggaaacgttacagaaagtggctgcaaggaatgtgaggagttagaagagaagaacatcaaggaattcctgcagtcatttgttcacattgtgcagatgtttattaacacttcttag

SEQ ID NO: 12861 - DNA, 486 bp, Artificial Sequence
  derived and/or modified sequence
atgcgcatctccaaaccacaccttcggtccatcagcatccagtgctacctgtgcctcctcctgaactcccacttcctgactgaagcgggaatccatgttttcattctgggctgcttctcagcgggactccctaaaactgaagccaattgggtcaatgtgatctcggacctcaagaagattgaagatctgatccaatctatgcatatcgacgccaccctgtacacggagtcggacgtccacccgtcgtgtaaggtcaccgcaatgaaatgttttctcctcgaactgcaggtgatcagcttggagtccggtgacgccagcatccacgatactgtggagaaccttatcatcctggctaataactcactgtcgtcgaacgggaacgtgaccgagagcggatgcaaggaatgcgaggagctggaagaaaagaatatcaaggaatttttgcagtccttcgtgcatatcgtgcaaatgttcattaacacctca

SEQ ID NO: 12862 - DNA, 486 bp, Artificial Sequence
  derived and/or modified sequence
atgaggatctccaaaccgcacctccggagcatttccatacaatgttacctttgtctcctgttgaactcacactttctgaccgaggctggtatccacgtgttcatactgggctgcttctctgctggacttcctaaaaccgaggcaaactgggttaatgtcatctctgacctgaaaaaaatcgaagatctcattcaatcaatgcatatcgacgccactttgtacacagagtccgatgttcacccttcttgcaaggtgacagctatgaaatgttttctgctggaactgcaggtgatttctctggaatccggggacgcctccattcacgataccgtggaaaatcttattattctcgccaacaactctctgtcctccaacggtaatgtgaccgagagcggctgcaaggaatgtgaggagctggaggagaaaaatatcaaagagttcctgcaaagcttcgtgcacattgttcaaatgttcattaacacgagc

SEQ ID NO: 12863 - DNA, 486 bp, Artificial Sequence
  derived and/or modified sequence
atgagaatctccaagccgcatcttcgatcgatctcgatacaatgttatctttgtctgcttcttaactcccacttcctcactgaggcagggattcacgtgtttatccttggatgcttctcggccgggcttcctaagactgaggctaattgggtgaacgtcatctcagatctcaaaaagattgaggatctgatccagagcatgcacatagacgcaactctgtacactgagtcggatgtccatccctcgtgtaaggtgaccgccatgaaatgttttttgctggagcttcaggtgatcagcctggaatcaggcgatgcctcgattcatgatacggtcgaaaacctgattatccttgctaacaattcactgtcctcaaacggcaatgtgacggaatccggttgtaaagaatgcgaagaactggaggagaaaaacataaaggagtttttgcagtcgtttgttcatattgttcaaatgttcattaacacctcc

SEQ ID NO: 12864 - DNA, 486 bp, Artificial Sequence
  derived and/or modified sequence
atgagaatatccaaaccccaccttcgctccatatccattcagtgctatctctgcctattgcttaactcacactttctaactgaagccgggatccacgtatttatattgggatgcttttcagccggactgcccaaaactgaggccaattgggttaacgtgattagtgatctgaaaaaaatcgaggatttaatacagtctatgcacatcgatgcgactttatatacagagtcagatgtgcatcctagttgcaaggtaacagcaatgaaatgtttcctcctcgaacttcaggtaatatctcttgaatcaggggatgcatctatacatgatactgtggaaaatctcattattctagctaacaactcattatcctctaatgggaatgtcacagagtcgggatgtaaagaatgcgaagaactggaagaaaaaaacatcaaagaattcttacagtcttttgtgcacattgtacaaatgtttatcaatacatca

SEQ ID NO: 12865 - DNA, 486 bp, Artificial Sequence
  derived and/or modified sequence
atgaggatatccaaaccccacctgagatctatctccattcagtgttatctgtgcctcttgctgaactcccacttcttaaccgaagccggcatacacgtttttatcctggggtgcttcagtgctggcctacctaagaccgaagctaactgggttaatgtaatctctgatctgaagaagatagaggatctgatccagagtatgcacatcgatgcaaccctgtatactgagtctgatgtccacccgtcatgtaaggtaacagccatgaagtgctttttactggagcttcaggtaatttcactggagtccggggatgcgtccatacacgataccgtggaaaatttgattattctggctaataacagtctttcctcaaacggaaacgtcaccgaatcaggctgcaaggagtgcgaggagcttgaagagaagaatatcaaagaatttctgcagagctttgtccacatcgtgcaaatgttcatcaacaccagc

SEQ ID NO: 12866 - DNA, 486 bp, Artificial Sequence
  derived and/or modified sequence
atgagaatcagcaaaccgcacctccggagcattagcattcaatgttacttgtgtttgctgctcaatagccacttcttgactgaagctggaatccacgtgttcatcctgggctgctttagcgcggggctcccgaaaactgaggccaattgggtaaatgtcatctccgacctgaaaaagatcgaggacctcatccagagcatgcacatcgatgccaccctgtacaccgagagcgacgtgcacccgtcatgtaaagtcaccgcaatgaagtgctttcttctggagctgcaagtgatttcgctcgagtccggagatgcctcgattcatgacactgtcgagaatctcatcattctggccaacaactcactgagctcgaacggtaacgtcactgaatcgggctgcaaggaatgcgaggagctcgaagagaagaacattaaggaattcctgcagtcgtttgtgcatatcgtgcagatgttcatcaatacgtca

SEQ ID NO: 12867 - DNA, 486 bp, Artificial Sequence
  derived and/or modified sequence
atgcgtatttccaaaccacacctacggtccatttccattcaatgctatctgtgtctgctattaaatagtcatttcttaacagaggctggaatccacgtgtttatcttgggctgcttcagcgcggggctgcccaagacagaggccaattgggtaaatgtcatttcagacttgaagaagatcgaggatctgatacaaagcatgcacattgacgctaccttgtatacagagtccgacgtccacccttcctgcaaagttaccgccatgaagtgttttctgttggaattacaggtgattagcctggagagcggagatgcaagtatccacgacaccgtcgagaacctcataattctggcaaataatagcctaagttccaatggtaatgtgacagaatctgggtgcaaggagtgtgaagaattggaagaaaaaaacattaaagagtttctgcagtcctttgttcacatagtgcagatgttcatcaatacgtcg

SEQ ID NO: 12868 - DNA, 486 bp, Artificial Sequence
  derived and/or modified sequence
atgcgcatctcgaagccgcacttgcggtcgatctccatccagtgctacctgtgtctgctgctcaactcgcacttcctgactgaagctggcatacacgtattcatcctcggttgtttctccgcgggactcccaaagactgaagcgaattgggttaacgtgatcagcgacctcaaaaagattgaggacctcatccaaagcatgcacatagacgccacgttgtataccgaatcggatgtgcatccgagctgcaaagtcactgccatgaagtgctttctgctggaactgcaggtcatctcactcgagagcggcgatgcgtcaattcacgacacggtcgagaatctgatcattctggccaataactccctgtcctcaaacgggaatgtgaccgagtcgggctgcaaggagtgcgaagaacttgaagaaaagaacatcaaagagttccttcaatcctttgtgcatatcgtgcagatgttcatcaacacgtcg

SEQ ID NO: 12869 - DNA, 486 bp, Artificial Sequence
  derived and/or modified sequence
atgagaatatcaaagcctcatcttagaagtatttctatacagtgctatctgtgcctactactgaactctcacttcctgacggaggccgggattcacgtcttcattctcggctgcttctctgcaggactgcccaagactgaagcaaattgggttaacgttatcagcgaccttaagaagattgaggatctgatacagagcatgcatatcgatgctacactgtacacggagagcgatgtgcatcccagctgtaaggttaccgccatgaagtgtttcctgttggagctccaagtgatttcactcgagtcgggggacgcatctatccatgatacagtggagaaccttatcatcttggccaacaatagcctctccagtaacggcaatgtcacagaaagcggatgtaaagagtgtgaggagctggaagagaagaacatcaaggagttcctccaatcttttgtgcatatcgtccagatgttcataaacacaagt

SEQ ID NO: 12870 - DNA, 486 bp, Artificial Sequence
  derived and/or modified sequence
atgagaatctcgaagccgcatctgcgctcgatcagcatacagtgctatctgtgcctgctcctgaattcacattttctcaccgaggccgggatccatgtcttcatccttggttgcttctccgctggcctccccaagaccgaagccaactgggtaaacgtgatttctgatctgaagaaaattgaggacctaattcagtcgatgcatatagacgcaacgctctatacggaatccgacgtgcatcctagctgtaaggtaacggccatgaagtgtttcctgttggaactgcaggtcatctctctggagagcggcgacgcctccatccacgatactgtggagaatttgataattcttgctaacaattcacttagttctaatgggaatgtgactgagtctggttgcaaggagtgcgaggaactagaggagaagaacataaaagagtttctgcaatctttcgtgcacatagtgcaaatgttcattaatactagc

SEQ ID NO: 12871 - DNA, 486 bp, Artificial Sequence
  derived and/or modified sequence
atgcgtatcagcaagcctcatctgcgcagcatcagcattcaatgctatctgtgcctgttgttgaatagccatttcctgacggaggccggcattcacgtgtttattttagggtgctttagtgctgggctgcctaaaacagaagccaattgggtcaatgtgatatcagacctgaagaagatagaagacctcatacaatctatgcatattgatgccacgctgtacacagagtcggacgtgcatccatcttgcaaagtcacagccatgaaatgtttcctcctcgaactgcaggtgatctccctagagtcgggcgatgctagcatacatgataccgtagagaatctaattatcctagctaacaactcgctttcaagtaacggtaatgtgactgaatctggatgcaaggagtgcgaggagttagaagagaaaaacatcaaggagttcttgcagagtttcgtccacatagtccaaatgttcatcaacaccagc

SEQ ID NO: 12872 - DNA, 486 bp, Artificial Sequence
  derived and/or modified sequence
atgaggattagcaaacctcaccttcgttccatctcgattcagtgttacttgtgccttttgctgaattcccattttcttactgaggccggcattcacgtgttcatccttggatgtttctcggccggtttgcctaagaccgaagcaaactgggtgaacgtcatctcggacctgaagaagatcgaagatctcatacagtcaatgcatatagatgccaccttgtacactgaatcggatgtgcacccatcctgtaaagtgactgcaatgaaatgttttctgctggagctgcaagtgatttcccttgaatccggtgatgcgagcattcacgacaccgtggaaaatctcattatcctggcgaacaactcactgtcgagcaacggtaatgtgaccgagtcgggttgtaaggaatgcgaggagcttgaagaaaagaacattaaggagttcctccagtcttttgttcatatcgtgcagatgttcatcaatacctcg

SEQ ID NO: 12873 - DNA, 486 bp, Artificial Sequence
  derived and/or modified sequence
atgcggattagtaagccacatctgaggtccatttctatccaatgctacctatgcctgctactgaactcacattttttaactgaggccggcatccacgtcttcattctcgggtgcttttcggccggactgcctaagaccgaggccaattgggtaaatgttattagtgatttgaagaaaatcgaggacctcatacagagcatgcacatcgacgcgaccctttatacggagtctgacgtgcatccttcttgcaaggtgaccgcaatgaagtgtttcctcctcgaactccaggtgatctccctcgaaagcggtgacgcatctatccacgatacagtcgagaatctgatcattctggcgaataacagtcttagttcgaatggaaatgtgaccgagtctggttgtaaggagtgtgaagaacttgaagagaagaacatcaaagagttcctccaaagtttcgtgcacattgtacaaatgttcattaacaccagc

SEQ ID NO: 12874 - DNA, 486 bp, Artificial Sequence
  derived and/or modified sequence
atgaggataagcaagccgcatttgagaagtatatcaattcagtgctacctctgcctgctcctcaatagccactttcttactgaggctggaattcacgtctttattctaggctgtttctccgcaggattaccaaagactgaagctaactgggtgaacgtcatcagtgacctgaagaaaatcgaagacctgatacagtcaatgcacattgacgccaccctgtacacagagagtgatgtccatcctagctgcaaggttactgctatgaagtgttttctcctggagctgcaggtgatctcccttgaatccggagatgccagtatccatgacaccgtcgagaatctgattatactggccaacaactctctttccagcaacggcaacgttactgagtcaggttgtaaggagtgcgaggagttggaggagaaaaacatcaaggagtttctgcagtcatttgttcacattgtacagatgtttattaatactagc

SEQ ID NO: 12875 - DNA, 486 bp, Artificial Sequence
  derived and/or modified sequence
atgcgaatttccaaaccacacctgcggtctataagtattcagtgttacttgtgtctgctccttaacagccacttcttgacagaggctggtattcatgtctttattctgggatgcttctcagcaggcctgcccaagacagaagctaactgggtcaatgttatctccgacttgaaaaaaattgaggacctgatacagagcatgcacattgatgccaccctctatactgaatccgatgtacatccatcatgtaaagtaactgcaatgaagtgctttctgctcgagttgcaggtgatcagcttggagtctggggacgcctctatccatgacacagtagagaatctgatcatcctggctaacaatagtctcagttctaacggaaacgtgaccgagtctggatgtaaagagtgtgaggaactggaggagaaaaacatcaaagagttcctgcagtcctttgttcacattgtccagatgtttatcaacacgtct

SEQ ID NO: 12876 - DNA, 486 bp, Artificial Sequence
  derived and/or modified sequence
atgcggatcagtaagcctcatttaaggtctatctccatccaatgttatctttgcctgttgttgaactcccattttttgactgaggccgggatccacgtcttcatccttgggtgcttttccgcaggcttacctaagaccgaggctaattgggtgaacgtgatctcagatctcaaaaaaatcgaagatctgatccagtcgatgcatatcgacgcgactctctacaccgagtccgacgttcacccatcctgtaaggtgaccgcaatgaaatgctttttgttagaacttcaggtgattagccttgaatcaggggatgcatcaattcacgacacggtggaaaatctcatcatccttgctaacaacagcctgagctcaaacggcaacgtgaccgagtccggttgcaaagagtgtgaggagttggaagagaagaatattaaagaatttttgcagtccttcgtgcacatcgtccagatgttcatcaacaccagc

SEQ ID NO: 12877 - DNA, 486 bp, Artificial Sequence
  derived and/or modified sequence
atgcggattagcaaaccacatcttcggagcatcagcatccagtgctacctttgcctgctcctgaattcgcacttcttgaccgaggccggaatccacgtgttcatcttgggatgcttcagcgcaggtttgcctaagacggaagcgaactgggttaacgtcatcagcgatctgaagaagatcgaggacctgatccaatcaatgcacatagatgcgaccctgtacactgaatcagatgtgcacccgtcctgtaaggtcaccgccatgaaatgcttcctccttgagctgcaggtgatctcactggaatcgggagatgcgtcaatccatgacacggtggaaaatctgattatcctcgcaaacaatagcctgagctccaacgggaacgttacggagtcgggctgcaaggaatgcgaggagctcgaggaaaagaacattaaggagttcctgcaatcctttgtgcatatcgtccagatgttcataaacacttcg

SEQ ID NO: 12878 - DNA, 486 bp, Artificial Sequence
  derived and/or modified sequence
atgcggatctccaagccgcacttgaggtcgatatccatccagtgctacttgtgcctcctgctaaactcgcatttcttgactgaggccggcatacatgtgttcatccttggctgtttcagtgccggcctgcccaagaccgaagcaaactgggttaacgtgatcagcgacttaaagaagatcgaggatctcattcaaagtatgcatatcgatgccaccttatataccgaaagcgacgttcatccctcatgcaaagttacagcgatgaagtgcttcctgctggagctgcaggttatctccctggaatcgggggacgcctcgatccacgacactgtcgagaatctgatcatcctcgcgaacaactccctcagctcaaacggaaacgtgacagaatcaggatgcaaagagtgtgaagagctggaagagaagaacattaaggagtttctacagtcttttgttcacatcgttcagatgttcatcaatacctcc

SEQ ID NO: 12879 - DNA, 486 bp, Artificial Sequence
  derived and/or modified sequence
atgcggataagcaagcctcatttgcgctctatttcaattcaatgctacctctgtttactccttaatagccattttttaactgaggccggcattcacgtgtttatactggggtgcttttccgctggactgcctaaaactgaggctaactgggtcaatgttattagtgaccttaagaagattgaggatctgatacaaagtatgcacatcgatgccaccctgtatactgaatcagacgttcatccgtcttgtaaagtgactgctatgaaatgcttccttttggaattgcaggtcatctctctggagtccggggatgcatctatacatgataccgttgaaaatctgattattttggcgaataattccttgtctagtaatggtaacgtcacggaaagtggttgtaaggaatgcgaagagctcgaagaaaagaatattaaggagttccttcaatccttcgttcatattgttcaaatgtttattaatacttct

SEQ ID NO: 12880 - DNA, 486 bp, Artificial Sequence
  derived and/or modified sequence
atgcggatctccaagccacatttgcgaagtatatcaatccagtgctacctgtgcctgctgctcaatagccatttcttgactgaagcaggaatacacgtattcatacttggatgcttttctgcagggcttcccaagaccgaagccaactgggtaaacgtcatctctgatctgaagaaaatagaggacttgatccagtctatgcacatcgatgcgacattgtacaccgagtccgatgtgcaccctagctgtaaagtgaccgctatgaagtgctttctgctggaactccaggttatttcacttgaatcgggtgacgccagcatacacgacacagtcgagaatctcattatattggctaataacagcctgtcatcaaacgggaatgtcacagagtcaggctgtaaggagtgcgaggagcttgaagaaaaaaacattaaggagttcttacagtcgtttgtacacatagttcagatgttcattaatacttcc

SEQ ID NO: 12881 - DNA, 486 bp, Artificial Sequence
  derived and/or modified sequence
atgaggatttcaaagccacacctgcggtccatcagcatacaatgttacctttgcctcttactgaacagtcactttttaacagaggcagggattcatgtttttatcctgggatgtttctccgctggcctgcccaaaactgaggctaactgggtgaacgtgatttcggacctcaagaagattgaagacctgatccaatccatgcatatcgacgccaccttgtataccgaatccgacgtccaccctagctgtaaggtcactgccatgaaatgtttcctcctagagttacaggtgatcagccttgagagcggcgatgctagcattcatgacaccgtggaaaatctgatcattctcgccaataactctctcagcagtaatgggaacgtgacagaaagcggttgcaaagaatgcgaggaactggaagaaaagaatatcaaggaatttcttcagtcattcgtgcatatcgtccagatgtttattaatacaagc

SEQ ID NO: 12882 - DNA, 486 bp, Artificial Sequence
  derived and/or modified sequence
atgaggatatctaagccacacctacgcagtatatctattcagtgctacctatgcctgctcttgaacagccactttttgaccgaagccggtatccacgtgttcatactcgggtgtttctcggccggcttacctaagacagaagccaactgggtgaacgtgatctcagatttaaaaaaaattgaggatctcatccagtctatgcacatagatgccacactctacacagagtctgatgtccacccatcctgtaaagtcactgccatgaagtgttttctgctggagctgcaagtgatctcgctagagtctggagatgcatcaatccatgacacagtcgagaatctgattatcttagcaaataattccctgagttcaaatggcaacgtgacagaatcaggttgcaaggagtgtgaggagctcgaggaaaaaaacatcaaggaattcctgcagagcttcgtacatattgtacagatgtttattaatacctct

SEQ ID NO: 12883 - DNA, 486 bp, Artificial Sequence
  derived and/or modified sequence
atgaggatttccaaaccacatcttagatcgatctcaatccagtgctacctgtgccttctgctgaacagtcatttccttaccgaggcgggaatacacgtgttcatcctcggatgtttctcggcagggctgcccaaaaccgaagccaattgggtgaacgtgatcagcgatctgaagaagatcgaggacctgatccagtcgatgcacatcgatgcgactttgtacacggaatcagacgtgcacccgagctgcaaggtcactgcgatgaagtgtttcctccttgaactgcaagtaatatccctcgagtctggtgacgcctcgatccatgacactgttgaaaacctgatcattctcgctaacaactcattgtcctcaaacggcaatgtgaccgaatcaggctgcaaggagtgcgaagaacttgaagagaagaacatcaaggagtttttgcagagcttcgtgcacatcgtgcaaatgtttatcaataccagc

SEQ ID NO: 12884 - DNA, 486 bp, Artificial Sequence
  derived and/or modified sequence
atgcgcatttccaaaccacatctccggtcaataagcatacagtgttacctctgccttctgcttaattcgcactttcttaccgaagcaggcattcatgtgtttatcttggggtgtttttcagctggcctgccaaaaaccgaggccaactgggtgaacgtgatctcagacctgaagaaaattgaagatctcatccaatcgatgcatatagacgcaaccctttacactgaaagcgatgtgcacccatcctgcaaagttaccgctatgaagtgttttcttcttgaacttcaggtcatttcgcttgagtcgggagacgcatccattcacgataccgtcgaaaacctgatcattttggccaacaactctctctcatcaaatggtaacgtcaccgagtcgggctgtaaggagtgcgaagaactggaagaaaagaacataaaggagttcctccagtcctttgtgcatattgtccaaatgtttatcaatacgtcc

SEQ ID NO: 12885 - DNA, 486 bp, Artificial Sequence
  derived and/or modified sequence
atgcgtatcagcaagccacatctgaggagtatcagtatccagtgctatctctgcctgctcttgaactcccacttcctgacggaagccggcattcacgtgttcattctgggctgctttagtgctggccttcccaagaccgaggcgaactgggtgaacgtcatttctgacttgaagaaaattgaggatctgatccaaagcatgcacatagacgccaccctgtatacggagtccgacgtacatccatcctgcaaagtcaccgctatgaagtgcttcctcctcgagctacaagtgatttctctcgagagtggtgatgccagcatccatgacaccgtcgaaaatctcatcatcctggcgaataactcgctgtcgtccaacggcaacgtcaccgagagcggttgtaaggaatgcgaagagctcgaggaaaagaacattaaggaattccttcagtccttcgtccacatagtacaaatgttcataaacaccagc

SEQ ID NO: 12886 - DNA, 486 bp, Artificial Sequence
  derived and/or modified sequence
atgagaatttccaagcctcacctgcggtcgatttccattcaatgctacctctgccttctgttgaactcccatttcttgacggaggcaggtatacacgtctttatcctcggatgcttttccgcaggactccctaagaccgaggccaattgggtgaatgtgatctcagacttgaaaaagattgaggacctgattcagtcgatgcatatcgatgcaactctgtacaccgagtcggatgtgcatccatcctgtaaagtcacggcaatgaaatgttttcttttggaactgcaagtgatttcacttgaatccggggacgcaagcatccatgataccgtggagaacctgattatactcgcgaacaactcgctgtcgagcaacggaaacgtcactgagtccggctgtaaggagtgcgaggaattggaagagaagaatatcaaagaattcctgcaatcttttgtgcatatagttcaaatgttcatcaacacctcc

SEQ ID NO: 12887 - DNA, 486 bp, Artificial Sequence
  derived and/or modified sequence
atgagaatatccaaacctcacctgagatcaatctcgatccagtgttacctttgtctcctgcttaattcgcactttctgactgaagcaggtattcatgtgttcattcttgggtgtttttcagcaggactcccaaaaacggaagccaactgggtgaatgtcatctcggacctgaagaagatcgaggatctgatccaatctatgcatattgatgccactctttacaccgaaagcgacgtgcacccatcgtgcaaggtcactgcaatgaagtgtttcttgctcgaattgcaggtgatctccctcgagtcgggtgatgcatcaattcatgatacggtcgagaatttgattattcttgcaaacaattcgcttagctccaacggtaacgtcaccgaatcgggctgcaaggaatgtgaagaactggaagagaagaacatcaaggaatttcttcaaagttttgtgcatatcgtgcaaatgttcatcaacactagc

SEQ ID NO: 12888 - DNA, 486 bp, Artificial Sequence
  derived and/or modified sequence
atgcggatcagcaagcctcacctgcgctcgatctccatacaatgttacctttgtctcctgctgaactcccatttccttaccgaagctgggattcatgtctttattctgggatgtttctcagcagggctgcctaaaacggaggccaactgggtcaacgttatcagcgatctgaagaagatcgaagatcttatccaatccatgcatattgacgccaccctttacactgagtcagatgtgcatccgtcgtgcaaggttaccgcgatgaagtgttttctgctggaacttcaggtgatatccctggagtcgggcgatgcctcgattcatgacaccgttgagaatttgattatactcgccaataactcgctttcgagcaatggaaatgtgaccgaatccggatgtaaggaatgcgaagagctcgaggaaaagaacattaaggagtttctgcagagctttgtgcacattgtccagatgtttatcaacactagc

SEQ ID NO: 12889 - DNA, 486 bp, Artificial Sequence
  derived and/or modified sequence
atgagaatctccaaaccacacctgaggtccatctccatccagtgctatctgtgcctgcttctgaacagtcattttttgaccgaagccggcattcatgtctttattttgggttgtttcagtgccggcctcccgaaaacagaggctaactgggtgaacgtgatatcagatcttaaaaagattgaggacttgattcagtcaatgcacattgacgccactctgtatacagagagcgatgttcaccccagttgtaaggtaaccgctatgaaatgtttcctgctcgaactgcaagttatctcactagaaagtggggatgccagcatacatgatacagtcgagaatctaattatcctcgcgaataatagcctatccagcaatggcaacgtgacggagagcggatgcaaggaatgcgaggagctggaggaaaagaatattaaggagttcctccaatccttcgtgcatatcgtgcagatgttcatcaatacctcc

SEQ ID NO: 12890 - DNA, 486 bp, Artificial Sequence
  derived and/or modified sequence
atgcggatttccaagccacatctcagatcgatatcaatccaatgttacctctgtctgctgttgaactcacatttcttgacggaggcaggaatccacgtctttattcttggatgtttttccgccggactgccaaagactgaggcaaattgggtgaacgtgattagcgatctgaaaaagattgaagatctcattcaatcgatgcatattgatgcaaccctttacactgaaagcgacgtccacccttcgtgcaaggtaaccgctatgaagtgtttccttctggaacttcaggtgatttcgcttgagtcgggggatgcaagcatccatgacacggtcgagaatctgatcatcctggcgaacaactccctgtctagcaatggtaacgtgactgaaagtggatgcaaagaatgcgaggaactggaggaaaagaacattaaggagttcctgcagagctttgtgcacatagtacaaatgtttatcaacacttcc

SEQ ID NO: 12891 - DNA, 486 bp, Artificial Sequence
  derived and/or modified sequence
atgaggatttctaagccccatctgcggtcaatttcaattcaatgctatctctgcctcctcctcaactctcacttcctcaccgaagcaggcattcatgtattcatactcgggtgtttctccgccgggctgcctaagacagaagctaactgggtcaatgtaatctccgatctcaaaaaaatagaggatctcatccagtccatgcacattgacgccacactgtacacggagtccgatgttcacccgagttgcaaggttacggctatgaagtgttttctcctggagctacaggtaatctccctggagagtggagacgcttctatacatgatacagtcgaaaacctgattatccttgcaaataatagcctgagttcaaacggcaatgtaacagagagcggctgtaaggaatgtgaggaactcgaggagaaaaacattaaagaattcctgcaaagcttcgtacacattgttcagatgttcatcaatacttcc

SEQ ID NO: 12892 - DNA, 486 bp, Artificial Sequence
  derived and/or modified sequence
atgagaatttccaagccccatctgaggagcattagcattcaatgctatctgtgtctgttgctaaatagccatttccttacagaagccggcattcatgtgtttatcctcgggtgtttcagtgccggtctgcctaaaacagaggctaactgggtgaatgtgatcagcgacctgaagaaaatcgaagatctgatccagtcaatgcatatcgatgcgaccctctatacggaatctgatgtgcaccctagctgtaaagtgactgccatgaagtgttttctgttggaactccaagtgatctctttagagtccggagatgccagtatccacgataccgtagaaaatctgatcatactggccaataacagcctatctagcaacggaaacgtcaccgagagcggctgtaaggagtgtgaagagctagaggaaaaaaacattaaggagttcctgcagtctttcgtgcatatagtgcagatgtttattaatacaagt

SEQ ID NO: 12893 - DNA, 486 bp, Artificial Sequence
  derived and/or modified sequence
atgcggattagtaaaccccatctgagaagcattagcatccagtgctacctttgtctcctgcttaactcccacttccttaccgaagctggtattcacgtctttatcctgggatgttttagcgcagggcttcctaaaacggaggcgaattgggtgaatgtgatctcggaccttaagaagatagaagatctcatacaatccatgcacatagatgccaccctctacaccgagtcagacgtgcatccgtcctgcaaagtgactgcaatgaagtgttttttgctcgaacttcaggtcatttccctcgaatcaggcgatgcctccattcatgatacggttgagaatctgatcatacttgctaacaactccctttcgtcgaacggaaacgtgactgaaagtggatgcaaggaatgtgaagaactggaggaaaagaacatcaaggaatttctgcaatcgtttgtccatattgtgcaaatgtttatcaacacgtcg

SEQ ID NO: 12894 - DNA, 486 bp, Artificial Sequence
  derived and/or modified sequence
atgcgtatatcgaagcctcatctgagatctatttccatccaatgctatctgtgtctgctgcttaactcgcactttttgactgaagcaggaatccatgtgtttatactgggttgtttcagcgcaggactgcccaagactgaagcgaattgggttaacgtgatctcggatctcaagaaaatcgaggacctcattcaaagcatgcacatcgacgcaaccctttacaccgaaagtgatgtccatccaagctgtaaggtcactgctatgaagtgctttcttcttgagcttcaggtaatctcactcgagtcaggggatgcaagcatccatgacacggtggaaaatctgattattctggccaacaactccctgtcaagtaatggtaatgtgaccgaatccggatgtaaagaatgcgaagagttggaggaaaagaacataaaagagtttctccagagctttgtccacattgtgcaaatgttcattaacacctcg

SEQ ID NO: 12895 - DNA, 486 bp, Artificial Sequence
  derived and/or modified sequence
atgcggatcagcaagcctcatttacggagcatcagcattcagtgctacctctgcctcctgctgaacagccactttctaaccgaagcaggtatacacgtgtttatcctcggctgttttagtgccgggctccccaagaccgaggctaattgggtgaatgtcatctcagatctcaaaaagattgaggacctcattcagtcaatgcacatagacgcaactctatatacagagagcgacgtgcatccgtcatgcaaagtaaccgccatgaagtgcttcttactggagctgcaggtgataagcctggagtcaggagatgcgagtatacacgacactgtagagaatttgatcatcctggcgaataattcgctgtccagcaatgggaacgttacagaaagcggctgtaaggaatgtgaggaactggaagaaaagaacattaaggaattcctgcagtccttcgtgcacatagtgcagatgtttattaacacatcc

SEQ ID NO: 12896 - DNA, 486 bp, Artificial Sequence
  derived and/or modified sequence
atgaggatctccaaacctcatctgaggtcaatctccatccagtgctacctgtgcctgctgctcaacagccatttcctcacagaggcaggaatccacgtgttcattctgggttgcttttccgcaggacttcctaaaaccgaagctaattgggtgaatgtcataagcgacctgaagaagatcgaagatctgattcagagcatgcacattgacgcaactctgtatacagagtccgacgtccatccaagttgcaaggtaactgccatgaagtgctttctgttggagctccaagtgatctcacttgagagcggtgatgcctcaattcacgacacagtcgaaaatctgataatcctcgctaacaacagtctgtcctcaaacggtaatgtgacagagtcaggctgtaaggagtgcgaggagctcgaggagaagaacattaaagaattcctgcagtccttcgtgcacatcgtccaaatgtttattaacacctca

SEQ ID NO: 12897 - DNA, 486 bp, Artificial Sequence
  derived and/or modified sequence
atgcgcatttcaaagccacacctgaggtccatttcaattcaatgttatctgtgtctcctgctgaacagccatttcctgacagaggcaggtattcacgtgtttatcttaggttgcttcagcgcagggcttcctaaaaccgaggccaactgggtgaacgtcatcagtgacttgaagaaaatcgaagatctgatccaatcaatgcacatcgatgcaacattatatacggaaagcgatgtgcacccatcttgtaaggttaccgctatgaagtgcttcttgcttgagctccaggtgatctctcttgaatccggcgatgcctccatccacgacactgtcgaaaacctgatcattttggccaacaacagtctgagctcaaacgggaatgtgactgaatccggctgcaaggagtgcgaggagctagaagaaaaaaatatcaaagaattcctccaaagcttcgttcacatcgtccagatgttcatcaatacatca

SEQ ID NO: 12898 - DNA, 486 bp, Artificial Sequence
  derived and/or modified sequence
atgcgcatctctaagccacatctcaggtccatctccattcaatgctacctctgcctccttctgaactcacatttcctcaccgaagctggcattcacgtgtttatcttgggctgtttctctgcgggtctccccaagaccgaggctaactgggttaatgtcatttcagacttgaagaagatcgaagacctcatccaaagtatgcacatcgacgcaacgctttacacagagtcagacgtgcacccctcttgcaaagtgacagctatgaagtgcttcctgctggagctgcaagttatttccctggaaagtggcgatgcttcaatccatgacactgtggagaacctcatcatcttggcaaacaatagcctcagctccaatggaaacgtgactgaatctggctgtaaggaatgcgaggagttggaggagaagaatatcaaggaatttcttcagagttttgtccacatcgtgcagatgtttatcaatacttct

SEQ ID NO: 12899 - DNA, 486 bp, Artificial Sequence
  derived and/or modified sequence
atgagaatctcgaagccacacctgcggtccatctccatccagtgttacctctgcctgttgctgaactcccacttcctgactgaagcaggaatccacgtgttcatcctcggatgcttctccgccggcctgcctaagaccgaagctaattgggtgaacgtgatcagcgatctcaagaaaatcgaggacctgatccagtcaatgcatatcgacgcaacgctgtacaccgaatccgacgtgcacccgagctgtaaggtgactgccatgaagtgtttcctgctggagctccaagtgatctcgctcgaatcaggcgacgccagcatccacgacaccgtcgagaacctcatcatcctggcaaacaactcactgtcctcgaacggaaacgtgactgaaagcggctgcaaggaatgcgaggaactggaggagaaaaacattaaagagttccttcaatcattcgtccatatcgtccagatgttcatcaatacgtcc

SEQ ID NO: 12900 - DNA, 486 bp, Artificial Sequence
  derived and/or modified sequence
atgcgcatctctaaaccccacttgcgctctatttccatccaatgttatttgtgcctcctcctgaactctcatttcttgacggaagccggtatccacgtcttcattctgggctgtttcagcgccggtttgcctaagacggaagcgaactgggtaaatgtaatttccgacctcaagaagatagaagatttgatccagagcatgcacatcgacgctacgttgtatacggaaagtgacgtccacccgtcctgcaaggtgacggccatgaaatgtttcctgttggagttgcaggttatctcattagagagcggggatgcgtctatacacgataccgtggaaaatctgatcattttggcgaacaactctctgtcgtccaatggaaacgtcacagagagcggatgtaaggaatgcgaggaattggaagaaaagaatataaaggagttcctccagtcgttcgttcatattgtccaaatgtttatcaatactagc

SEQ ID NO: 12901 - DNA, 486 bp, Artificial Sequence
  derived and/or modified sequence
atgcgaatctccaaacctcacctgcggagtataagtatccaatgctatctctgcttactgctaaacagccacttcctcactgaagctggcatacacgtgttcattctgggctgtttttccgctgggttacccaaaacagaagccaattgggtcaacgttatctccgacctgaagaagatagaggacctgattcagtccatgcatattgatgccacattatacaccgaatcagacgtccaccccagctgcaaggtgaccgccatgaagtgtttcctgcttgaactgcaggtgatctctcttgaaagtggcgacgcctctatccatgacaccgtcgagaatctaatcatcctggccaacaacagtctaagctcaaatggcaatgttacagagtcagggtgcaaagaatgtgaggagttggaggaaaagaacatcaaggaattcctgcagtcatttgtacatatcgttcagatgttcatcaatacctct

SEQ ID NO: 12902 - DNA, 486 bp, Artificial Sequence
  derived and/or modified sequence
atgaggataagtaaaccgcacctgagatccatttcaatccaatgttacttgtgtctgctcctgaattcccactttctgacagaggctgggatccacgtattcattctgggctgttttagcgctgggttgccaaagaccgaggccaattgggtgaacgtgataagtgatctgaagaaaattgaggacctaatccaatcaatgcatatcgacgcaaccctgtacacagagagcgatgtgcacccgtcttgcaaggtgaccgctatgaagtgttttctgctggaattgcaagttattagcctggaatcaggggacgcatcgattcacgacaccgtggagaatctaatcatccttgcaaataactcgctcagcagtaacggtaacgtgacggagtctggctgtaaggaatgtgaagagctcgaggagaaaaatatcaaggagttcctgcagagctttgtccacatcgtccagatgttcatcaatacgagt

SEQ ID NO: 12903 - DNA, 486 bp, Artificial Sequence
  derived and/or modified sequence
atgagaatctccaagcctcacttgcgctcgatctcgatccagtgctacctctgtctgctgctgaactcacatttcctcaccgaagccggcatccatgtctttatcctgggatgcttttctgccgggttgccaaagactgaggccaactgggtcaacgttattagcgatctgaaaaagatcgaggacctcatacagtcaatgcacattgacgcgaccctttacaccgagtctgacgtgcacccgtcttgtaaagtgaccgcgatgaagtgcttccttttggaactgcaagtgatcagcctggaatcaggagatgctagcattcacgacactgtggaaaatctcatcatcctggcaaataactcgctgtcgtcgaatggaaacgtgactgaatccggttgcaaggagtgcgaggagttggaggaaaagaacatcaaagagttcttgcagtccttcgtgcatatcgtccaaatgttcataaacaccagc

SEQ ID NO: 12904 - DNA, 486 bp, Artificial Sequence
  derived and/or modified sequence
atgagaatctccaaaccacacttgcggtctatttccatccagtgttacctgtgccttctgctgaattcgcactttctgaccgaggccggcattcatgtctttatacttggttgtttttcggcaggacttcctaagacggaagctaactgggtgaatgtgatctccgatctcaagaagatcgaagatttgatacaaagcatgcatattgatgcaactctgtacactgaatccgacgtccatccttcgtgtaaggtgaccgcgatgaagtgttttcttctggaactgcaggtgatctcgcttgaatcgggagatgcctctattcacgatactgtcgagaatctgattatcttggcaaacaatagccttagcagcaacggtaacgtgaccgaaagcggttgtaaggagtgcgaggaactcgaagaaaagaacatcaaagaatttcttcaatcgttcgtgcatatagtacagatgttcatcaacacctcg

SEQ ID NO: 12905 - DNA, 486 bp, Artificial Sequence
  derived and/or modified sequence
atgcgcatcagcaagccgcacttgagatcgattagcatccagtgctacctctgcttgctcctcaactcgcacttcttgactgaagccggcattcacgtgtttatcctgggatgtttcagcgccggactgccgaaaacggaagctaactgggtgaacgtcatcagtgacctgaaaaagatagaggatctgatccaatccatgcatattgatgccaccctgtacaccgaatcggacgtccatccatcatgcaaggtgaccgcaatgaagtgctttttgctcgagctgcaagtgatcagcctggaatcaggagatgcgagcatccatgacaccgtggagaatcttatcatcctggccaacaactcattgtcgagcaatggtaacgtgactgaatcaggatgcaaggagtgtgaggagcttgaggagaaaaacatcaaggaattcctgcagagctttgtacatatcgttcaaatgttcatcaatacgtcc

SEQ ID NO: 12906 - DNA, 486 bp, Artificial Sequence
  derived and/or modified sequence
atgcggatctccaaaccacatctgagatccatcagcatccaatgctacttgtgtctcctccttaacagccacttccttaccgaagcaggaatacatgtgtttatcctgggatgcttctccgcaggactgccaaagactgaggccaattgggtgaacgtgatctcagacctgaaaaagatcgaggacttgattcaatccatgcacatcgatgccaccctgtacacggaatccgacgtgcacccgtcctgtaaagtgactgcaatgaaatgcttcttgctggagctgcaggtgatttcactggaaagcggcgatgccagcatccatgataccgtagaaaacctcatcatcctggcgaacaattccttgagttccaatggtaacgtgacggaatcgggctgcaaggagtgcgaggagctggaagaaaagaacatcaaggaatttctccagagcttcgtgcacatcgtgcagatgttcatcaacacttca

SEQ ID NO: 12907 - DNA, 486 bp, Artificial Sequence
  derived and/or modified sequence
atgcggatcagcaagccacatttgaggtcgatctcgatccaatgctatctgtgcctgcttctgaactcgcactttctgactgaagcgggaatccatgtgtttatcctgggatgtttcagcgccggactgccgaaaaccgaggctaattgggtgaacgttatctcagacttgaaaaagatcgaggatctgatccagtccatgcatatcgacgcaaccctctacaccgaatccgacgtccacccatcatgcaaagtgaccgctatgaagtgtttcctcttggagttgcaggtcatttcactggagtcaggcgacgcctccattcatgataccgtggagaatctcatcattctcgctaacaattcactgtcgagcaacggaaacgtgaccgagagcggatgcaaggagtgcgaagagctcgaagagaaaaacatcaaggaatttctgcagagcttcgtgcacatcgtccagatgttcatcaacaccagc

SEQ ID NO: 12908 - DNA, 486 bp, Artificial Sequence
  derived and/or modified sequence
atgagaatttctaagccacatctcagatcgatctcgatccaatgttacctttgtctccttctcaactcacatttccttaccgaagcagggattcatgtgtttattctgggttgttttagcgcaggcctgccaaagactgaagccaactgggtcaacgtgatctccgatctgaaaaagatagaagatctgatccagagcatgcatattgatgcaactctttacaccgagtccgatgtgcatccctcctgtaaggtgactgcgatgaagtgctttcttctggagctccaagtcatttccctcgaatccggggatgcatcgatacacgacactgtggagaacctgatcattctggcaaacaattcgttgagctcaaacggcaacgtgactgaaagcggatgtaaggagtgcgaagaacttgaagaaaagaatatcaaagaattcctgcaatcctttgtccatatcgtgcagatgttcattaacacttcc

SEQ ID NO: 12909 - DNA, 486 bp, Artificial Sequence
  derived and/or modified sequence
atgcgcatttccaagccccacttgagatccatcagcattcaatgttacctctgcttgctgctgaactcgcattttctcaccgaggcaggcatccacgtattcatcctgggttgcttcagcgcagggctgcctaagactgaggcgaattgggtgaatgtcatctcagatctcaagaagatagaggaccttattcagagcatgcacatagatgccactctctacacggaatcggacgtccatccgtcatgcaaagttaccgctatgaaatgcttcctcctcgaacttcaagtcatctcactggagtcgggggacgcctcaatccacgacaccgtggaaaacctgataatccttgcgaacaattcgctgagttccaacggaaacgtgactgaatccggatgcaaggaatgtgaggagctggaagaaaagaacatcaaggaatttctccagtcgttcgtgcatatcgtgcagatgttcatcaatacctca

SEQ ID NO: 12910 - DNA, 486 bp, Artificial Sequence
  derived and/or modified sequence
atgcgcatctccaaaccgcacctccgttccatctctattcaatgctatctctgcctgttgttaaattcacatttcctcactgaagcaggcattcatgtgttcattttaggctgtttttctgccggactgcctaagactgaggcgaattgggttaatgttattagtgacctcaagaaaatcgaagatttgattcagagtatgcacattgatgccaccctctacactgagagcgacgttcacccttcttgcaaggtcacggctatgaagtgcttcctccttgaattgcaggtcatctccctggaaagtggcgacgcgtcgattcatgataccgttgaaaacctgattatcctggctaacaattccttgtcgtctaatgggaacgttacagagtcagggtgtaaagagtgcgaggagcttgaggagaagaacataaaagagtttctccaatctttcgtgcacattgttcagatgttcatcaacaccagt

SEQ ID NO: 12911 - DNA, 486 bp, Artificial Sequence
  derived and/or modified sequence
atgagaatttctaagccccacttaagatcaatctctattcagtgttacctgtgcctgctgctgaatagccactttctgacagaggccggaattcatgtgtttatcctagggtgcttcagtgctggtctgccaaagaccgaggcaaactgggtaaatgtcatctccgatctgaagaaaatcgaagatctgatccaatccatgcatatcgacgctactctatacacagaatctgatgttcatccgtcctgtaaggtgaccgccatgaagtgcttccttctagagctgcaggtgatatccttggaatctggcgatgcatctatacacgataccgtcgaaaacctgatcattttggctaataactctttgtcttcaaatggaaatgttactgaatccggctgcaaggaatgtgaggaactcgaggagaagaacatcaaggagtttctgcagtcctttgtgcatatagtgcagatgttcatcaacacctcc

SEQ ID NO: 12912 - DNA, 486 bp, Artificial Sequence
  derived and/or modified sequence
atgcgaatttcaaaaccacatcttcggagcatttccatccaatgttacctttgtctgcttcttaacagccacttccttaccgaagcaggcattcatgtgtttatccttggatgtttttcagccggactccccaagactgaagcaaactgggtgaacgtgattagcgacctcaaaaagatagaagatctcatccagagcatgcacattgatgcaactctttacactgaatcagacgtccatccttcttgcaaggttaccgctatgaagtgctttctgctcgaacttcaagtcatatccctggaatcgggagacgcgtcgattcacgataccgtggagaatctcattatactggctaacaattcgctctcatccaacggtaacgtgactgaaagcggctgcaaagagtgtgaagagcttgaggagaagaacattaaggagttcttgcaatcgttcgtccatatcgtgcagatgtttatcaatacctcg

SEQ ID NO: 12913 - DNA, 486 bp, Artificial Sequence
  derived and/or modified sequence
atgcggatctcaaagccgcacttgaggagcatatcaatccaatgctatctctgtctgctcctgaacagccatttcctgacagaggccgggatccacgtcttcatattgggctgtttcagtgctgggcttccaaagacggaggccaactgggtgaatgtcatctctgacctgaagaaaatcgaggacctgattcagtctatgcacattgacgccaccctgtacaccgaatctgacgtccacccatcatgtaaggtcacagctatgaagtgcttcttattagaattgcaggttatctctttggagtctggcgacgcatcaattcacgatacagttgaaaatttaattattctcgctaacaactccctgagttcaaacgggaacgtgactgaatcaggctgtaaggagtgtgaagaactggaagagaagaacattaaggaatttctgcaaagtttcgtccacatcgtgcagatgttcattaacaccagc

SEQ ID NO: 12914 - DNA, 486 bp, Artificial Sequence
  derived and/or modified sequence
atgcggatctccaaaccacacctgcggtccatctcgatccagtgctacctgtgtctgcttctcaacagccacttccttaccgaagccggaatccacgtgtttatcctcggatgcttctcggctgggctgcctaagaccgaggcgaactgggtcaatgtgataagcgacctgaaaaagatcgaagatctgatccaatcgatgcacatcgacgcaaccctgtacacggagtcagatgtccacccgtcatgtaaggtgactgccatgaagtgcttcctgctcgaacttcaagtgatctccctcgagagtggcgacgcaagcatccacgatactgtggagaatcttatcattctggcaaacaactccttgagctctaatggcaacgtaaccgaatcgggatgcaaagagtgcgaagaactcgaggaaaagaacatcaaggaatttctccagtcctttgtccacatcgtccagatgttcattaacacgtcc

SEQ ID NO: 12915 - DNA, 486 bp, Artificial Sequence
  derived and/or modified sequence
atgcgtatctccaagccacacctcaggtctatatcaattcaatgttacctgtgcctgctgcttaacagtcacttcttaaccgaggcaggaatccatgtttttattctggggtgttttagcgcgggcttacccaaaacggaggccaactgggtaaatgttatttccgatcttaagaaaatcgaggatcttatccagtccatgcacattgacgctacattatatacagagtcagacgttcacccgtcctgtaaggtgacggctatgaagtgcttcctgctggagctgcaggtgatcagtctggaatcaggagacgcctccatacatgacactgttgaaaatctgattatattagccaataatagtctcagcagtaatgggaacgtaacagaatcgggctgtaaagagtgcgaggagttggaggagaaaaacattaaagagttcttacaaagcttcgtgcacatagttcagatgtttataaacacttct

SEQ ID NO: 12916 - DNA, 486 bp, Artificial Sequence
  derived and/or modified sequence
atgagaataagtaaaccacatcttagatcaatttcaatacaatgttatttatgtttacttttaaattcacatttccttacagaagctggaatacatgtatttattttaggatgtttttctgctggtttaccaaaaacagaagctaattgggtaaatgtcatttctgatttaaaaaaaattgaagatttaatacaatctatgcatattgatgctacattgtatacagaatctgatgtacatccaagttgtaaagttacagcaatgaaatgttttttgttagaattacaagtaatttctttagaatcaggagatgcatcaatacatgatactgtcgaaaatttaattattcttgcaaataattcactttcaagtaatggaaatgttacagaatcaggttgtaaagaatgtgaagaattggaggaaaaaaatataaaggaatttttacaatcatttgttcatattgttcaaatgtttattaatacttca

SEQ ID NO: 12917 - DNA, 486 bp, Artificial Sequence
  derived and/or modified sequence
atgagaatctcaaaacctcatctgcggtccatctcaatccagtgctacctgtgtctgttgctgaattctcactttttgaccgaggccggaatccacgtctttatcctgggttgcttctcggcggggttgccaaagacggaagcaaactgggtcaacgtgattagcgatctcaagaagatcgaggacctcatccagtcgatgcacattgatgctactctgtacaccgaaagcgacgtccacccgtcgtgtaaggtgactgccatgaaatgcttcttgttggaactgcaggtcatatcccttgaaagcggcgatgcttcaatccatgacactgtggagaacctcatcatcttggcaaacaactcgctgtcgtccaatggtaatgtgaccgaatcggggtgcaaggagtgcgaggaactcgaagaaaagaacattaaggaatttctgcagagcttcgtgcatattgtgcaaatgttcatcaataccagc

SEQ ID NO: 12918 - DNA, 486 bp, Artificial Sequence
  derived and/or modified sequence
atgagaattagcaagccacatttgagaagtatctctattcagtgctatctctgtctacttttgaatagtcattttctaacagaggcggggattcatgtgtttattcttggatgttttagcgccgggttaccaaagacggaggccaactgggtgaacgtcatatctgatttgaagaaaattgaggatctaattcaatcaatgcatattgatgctacattgtatacagagtctgatgtacacccatcgtgcaaagtcacagctatgaagtgctttttgcttgagcttcaagtgatctcactagagtctggggacgcctctattcatgacactgttgagaaccttataattttggcaaataatagtctgtcatctaacgggaatgtgaccgaatcaggatgcaaagaatgtgaggaacttgaagaaaagaatatcaaggagttccttcagagttttgtccatattgtgcagatgttcattaatacaagc

SEQ ID NO: 12919 - DNA, 486 bp, Artificial Sequence
  derived and/or modified sequence
atgcggatcagcaagccgcatctacgttccatttctattcaatgctacctgtgtctgcttctcaatagccactttctgaccgaggctggtattcatgttttcatcctgggctgttttagcgcgggtctgccaaagacggaggcgaattgggttaatgtcatcagcgacttgaaaaaaatagaggatctgattcagagtatgcacattgatgccaccctgtacaccgaaagcgatgtacacccatcctgcaaggtgacggcgatgaagtgctttcttctggagttgcaggtgatctcgctcgaaagcggtgacgcatctatccatgacactgtagagaacctgatcatcctggcaaacaacagcctgagcagcaacggaaacgtcaccgagagcggatgcaaggagtgtgaagaactcgaagaaaaaaacattaaggaattcctgcaatctttcgttcacattgtacagatgttcatcaacacctcc

SEQ ID NO: 12920 - DNA, 486 bp, Artificial Sequence
  derived and/or modified sequence
atgcgaattagcaaaccccacctgcgatcgatctcgattcagtgctacctttgcctcctgctgaatagccatttcctcaccgaggcaggaatccatgtgtttatacttggctgcttctccgctgggctccctaagactgaagctaactgggtgaacgtcataagcgatctcaagaaaatcgaggaccttatccagtcgatgcacatagatgcaactctgtacactgaatcagacgtgcatccttcgtgtaaggtcactgcgatgaagtgctttcttctggagctgcaagtgatttcgcttgaatcaggagatgccagcatccatgatacggtggagaatctgattattctggcaaataactccttgagctccaatggtaacgtcaccgagtcaggatgtaaggaatgcgaagaattggaagagaaaaacatcaaggaatttcttcagagctttgtgcatatcgtgcagatgttcattaacacctcc

SEQ ID NO: 12921 - DNA, 486 bp, Artificial Sequence
  derived and/or modified sequence
atgcgcatttccaagccacatctccgctcgatctcgatccaatgttacctgtgcctgttgctcaattcgcactttctgaccgaagcgggaatccatgtctttatcctcggttgcttctcagcaggactccctaagactgaggcaaactgggtgaacgtgatcagcgacctgaagaagatcgaggatctcatccagtcgatgcacatcgacgcaactctctacaccgagtccgatgtgcacccgtcctgcaaggtgaccgccatgaaatgctttctgctcgaactgcaggtgatcagcttggagtcgggagacgcctcaatccatgatactgtggagaacctgatcattctggctaacaattcgctgtcgtcaaatggcaacgtgaccgagtcgggttgtaaggagtgtgaggaactggaggaaaagaatatcaaggaattcctccagtcattcgtgcacatcgtgcagatgttcatcaacacctca

SEQ ID NO: 12922 - DNA, 486 bp, Artificial Sequence
  derived and/or modified sequence
atgcggatctcgaagcctcatctcaggtcaataagcattcagtgctacctttgtttgctgctcaactcccacttccttaccgaagcgggcattcacgtgtttatactgggttgcttttcagcagggcttccaaaaactgaagcaaattgggtgaatgtcatttcggaccttaagaaaattgaagatcttattcaaagcatgcatattgatgctaccctgtacactgagtcggacgttcatccttcatgtaaggtgacggccatgaagtgcttcctgctggaactccaagtcatcagcctggagtcgggcgacgcatcgatccatgatactgtggaaaacctcataattctggctaacaacagcttgtcctccaatggaaacgtgacggagtcaggttgcaaggaatgtgaggagctcgaagagaagaacataaaagagtttcttcagagctttgtgcacattgtccaaatgttcatcaatacctcc

SEQ ID NO: 12923 - DNA, 486 bp, Artificial Sequence
  derived and/or modified sequence
atgcgcatttccaaaccgcacctccgatccatctctatccagtgctacctgtgtctcctcttgaactcacattttctgactgaagcggggatccacgtgttcattctgggatgcttctctgccggcctcccaaagactgaagccaactgggtcaacgtgatctcagatctcaagaaaatcgaggacctcatacaatccatgcacatcgatgccactctgtacacggagtcagatgtgcatcccagttgtaaggtgaccgctatgaagtgcttcttgctcgaactgcaggtgatttcgcttgagtcgggagacgcgtcgatccacgacaccgtcgagaatctgatcatcctcgcaaacaattcgctgtcatctaacggcaacgttacggaatcgggatgtaaggaatgcgaggagctggaagaaaagaacatcaaagaattcctgcagtcgtttgtgcatattgtccaaatgttcatcaatacctcc

SEQ ID NO: 12924 - DNA, 486 bp, Artificial Sequence
  derived and/or modified sequence
atgcgcatttccaagcctcatcttaggtcaatctcaatccagtgctacctttgccttttgcttaattcacatttcctgaccgaagcgggaattcatgtgtttattctgggatgctttagcgcaggccttccaaaaactgaagcaaattgggtgaatgtcatctccgatctgaagaagattgaagatcttatacaatctatgcacatagatgcaaccctttacaccgaatccgatgtccacccttcatgtaaagtcaccgcaatgaagtgttttcttcttgagctgcaagtgatttcgctggaatccggcgacgcgagcatccatgatactgtcgagaatctcatcatcttggcaaacaactccctttcgtcaaatggcaatgtgaccgaaagcggttgtaaagaatgtgaagaactggaggaaaagaacatcaaggagtttctgcaatcgtttgtgcacattgtgcagatgttcattaacacctct

SEQ ID NO: 12925 - DNA, 486 bp, Artificial Sequence
  derived and/or modified sequence
atgcgaatctctaaaccacacctgcggagcatttcgatccagtgttacctgtgtttgctgcttaactcccactttctgactgaggccggtatccatgtcttcatcctgggctgcttcagtgctggcctgcccaaaacggaagccaactgggttaacgtcatcagcgatctgaagaaaatcgaggatctgattcagagtatgcatattgatgccactctctacacagaaagcgacgttcatccctcctgtaaggtgacagccatgaagtgttttttgctggagctccaggtgatctccctagaaagcggggacgccagcattcacgacactgtggagaacctcattattctagccaataattctctttcaagcaatggcaacgtgactgagtcgggatgcaaggagtgcgaagagttagaggaaaagaatattaaggaattccttcagtcattcgtccacattgtgcagatgttcataaatacaagt

SEQ ID NO: 12926 - DNA, 486 bp, Artificial Sequence
  derived and/or modified sequence
atgcgtatctctaagccacatcttcgaagtatcagtattcagtgctacctgtgcctcctcctaaattcacactttcttaccgaggctggaattcacgtgttcatactggggtgcttttccgctggactacctaagaccgaggcgaactgggtcaacgtgatcagcgatctaaagaaaatcgaggatctgatccagagtatgcatatcgatgctacactgtacaccgagtctgacgtgcacccatcatgtaaggtcacagccatgaagtgttttcttctggagctgcaggtcattagtctggagagcggtgacgcctcaattcacgatacagtagagaacctcatcatactggctaataattctctcagcagcaacggtaacgtaacagagtcaggatgcaaggagtgcgaggagcttgaagaaaagaatatcaaagagttccttcagagctttgttcacatcgtgcagatgttcatcaatacaagc

SEQ ID NO: 12927 - DNA, 486 bp, Artificial Sequence
  derived and/or modified sequence
atgcgtatctctaaaccgcacctgaggagtataagcatccagtgttatctgtgtttgctcctgaacagtcatttcctcaccgaagcaggcatccacgtattcatactgggctgtttctcagctgggctgcctaagactgaggccaattgggtgaacgtgattagtgacctcaagaagatcgaggacctgatacaatctatgcatatcgacgcaaccctttacaccgaatctgatgtgcacccttcatgcaaggtcaccgccatgaaatgctttcttttagagctgcaggtgattagcttagagagcggagacgccagcattcacgacaccgtagagaatctgatcatcctggctaacaactctctctcatcaaatggtaacgttaccgaaagcggatgcaaggagtgcgaggagctcgaggaaaaaaacataaaggagtttcttcagagtttcgtgcatatcgtccaaatgtttatcaacacctca

SEQ ID NO: 12928 - DNA, 486 bp, Artificial Sequence
  derived and/or modified sequence
atgaggatcagtaaaccacaccttaggtcaatatctatccaatgctacctttgcctgctgttgaacagccacttcctgactgaggcggggatccacgtgtttattctgggatgtttctcagccggacttccaaagaccgaagcaaattgggtgaacgttatttcagacctgaaaaagatcgaggacctgatccagagtatgcacatcgatgcaactctgtatactgaaagcgatgtgcatccttcctgtaaggtcaccgcaatgaagtgttttcttctggaactgcaggtgataagcctcgagagcggagacgcttccatccacgacacggtggagaacttgattattctcgccaataacagtctgagcagtaacggaaacgtcacagagtccggctgtaaagagtgtgaagagctcgaggagaaaaatatcaaagaatttctccaatcttttgtgcatatcgtgcagatgtttattaatacttct

SEQ ID NO: 12929 - DNA, 486 bp, Artificial Sequence
  derived and/or modified sequence
atgagaattagcaaaccccacctccgctcaatctcgatccagtgctacctctgcctgctgctcaattcccacttcctcacggaggccggcatccacgtgtttatcctggggtgcttcagcgctggactgccgaagactgaggctaattgggtgaacgtcatctccgatctcaagaagatcgaggatctgatccaatcgatgcacattgacgcgaccctgtacaccgaatcagatgtgcatccgagctgtaaagtgactgcgatgaaatgcttcctgttggaactgcaggtgatctcgctggaatctggagatgcttccatccatgatactgtggaaaacctgatcatcctcgccaataactcgctcagctccaacggaaacgtcaccgagagcggatgtaaggagtgtgaagagctggaggagaagaacatcaaagagtttctccagtctttcgtgcatatcgtgcagatgttcattaatacttcc

SEQ ID NO: 12930 - DNA, 486 bp, Artificial Sequence
  derived and/or modified sequence
atgaggatctcaaaaccgcacctccgctctatctcaattcagtgctacctgtgcctgctgctcaatagccatttcctgacggaagccggaatccacgtctttattctgggctgtttctccgcgggcttgcccaagaccgaagccaattgggtcaacgtgattagcgatttgaaaaagatcgaagatctgatccagtcgatgcacattgacgctacgctctacaccgagtccgatgtccacccatcgtgcaaagtcaccgccatgaagtgcttcttgcttgagcttcaagtcatttctcttgagagcggggacgcatcaatccacgacactgtcgaaaatctcattatcctggccaataacagcctgtcctccaacgggaatgttaccgaatccggatgtaaggaatgcgaagagctcgaggaaaagaacatcaaagaattccttcagtcctttgtgcacatcgtgcagatgtttatcaatacttcc

SEQ ID NO: 12931 - DNA, 486 bp, Artificial Sequence
  derived and/or modified sequence
atgagaatctcaaaaccgcacctgcggtcgatctctattcagtgctacctctgccttctgttgaatagccactttctgaccgaagcaggaatccacgtattcatcctggggtgcttctcggccggactcccgaaaaccgaagcgaattgggtgaacgtcatctcggatctgaaaaagatcgaagatctgatccaatcaatgcacatcgacgcaactctttatactgagtccgacgtgcacccttcctgcaaggtgactgccatgaagtgcttcttgctggaactgcaggtgatatcgctggagtcgggtgatgcctcaattcacgacacggttgaaaacctcattatcctcgccaacaattcgctgtcgtcaaacggtaatgtcaccgaatctggatgtaaggaatgcgaagagctggaggaaaagaacatcaaggagtttctgcagtcgtttgtgcatatcgtccaaatgttcatcaacactagc

SEQ ID NO: 12932 - DNA, 486 bp, Artificial Sequence
  derived and/or modified sequence
atgaggatttccaagccacatctgcgcagtatctcaatccagtgttacttatgtctgctcctgaacagccactttctaactgaggcgggcatccacgttttcatcttgggctgcttctccgcaggcttgccaaaaaccgaagcaaactgggtgaacgtgatctccgacttgaaaaagattgaggatttgatacagtctatgcatatcgacgctaccttgtacactgaaagcgatgttcacccgtcctgcaaagttacagccatgaagtgctttttgctcgaactgcaagttatctcacttgagtctggagacgccagtattcacgatacagtcgagaacctgatcatattggctaataactcgctgagctctaacggcaatgtcactgaaagcggctgtaaggagtgtgaggaactggaagagaaaaacataaaagaatttctgcagtcctttgtgcatatcgtgcaaatgtttataaacacaagc

SEQ ID NO: 12933 - DNA, 486 bp, Artificial Sequence
  derived and/or modified sequence
atgcgaatttcaaagcctcacctgcgatccatatcaattcagtgttacctgtgcctgctgctgaatagtcatttcctaacggaagccggaatccacgtgttcattctgggctgttttagtgcaggtctgccaaagaccgaggcaaactgggttaatgtgatcagcgacctcaagaagatagaagacctgattcagtctatgcacatcgatgccacgctgtacaccgagtcagatgtgcacccatcttgcaaagtgacggcaatgaagtgctttcttctggagctccaggttatttcactggagtcgggggatgcaagcatccatgatacagtagagaacttgattatcctagctaacaactccctgagtagtaacgggaacgtgactgagtccggatgtaaggaatgtgaggagcttgaggagaagaatattaaagagtttctccagagttttgtgcacatcgttcagatgtttattaatacgagt

SEQ ID NO: 12934 - DNA, 486 bp, Artificial Sequence
  derived and/or modified sequence
atgagaatctccaagcctcacctgaggagcatatccattcagtgctacctctgcttgctcctgaacagccacttcctcactgaggccgggatccacgtgtttatcctcgggtgtttctcggccgggctaccgaagacagaagcgaactgggtgaatgtgatctccgatctaaaaaaaattgaggatctcatccaatctatgcatattgatgccacattgtacactgagtctgacgtccatccgagctgcaaagtcaccgcaatgaagtgttttttattggagctgcaggtaatcagcttagagtccggggatgccagtatccatgataccgtggaaaatctcattatactggccaacaactctttatcttctaatggcaacgtcacggagtccggttgtaaggaatgcgaagaactcgaggaaaagaatattaaggaattcctacagtctttcgtgcacatcgtgcagatgttcatcaatacctcc

SEQ ID NO: 12935 - DNA, 486 bp, Artificial Sequence
  derived and/or modified sequence
atgcgaatcagcaaaccccatcttcggtcgatttcaatccaatgttacctgtgtttgcttctcaattcacattttctgaccgaagcaggaattcacgtgttcatacttggatgtttttccgccgggcttcccaaaactgaagcgaactgggtgaatgtaatctcggatctgaagaagattgaagatcttatccaatcgatgcacattgacgctaccctctacactgaatcagacgtccatccgagctgcaaggtgaccgctatgaaatgttttctgctcgagctgcaggttatatcgcttgagagcggcgacgcatcgattcatgacactgtggagaaccttatcatacttgccaacaatagcctttcgtccaacggtaacgtgaccgagtccggttgcaaggaatgcgaggaattggaagaaaagaacataaaggaatttctccagtcatttgtgcatatcgtccagatgttcattaacacgtcc

SEQ ID NO: 12936 - DNA, 486 bp, Artificial Sequence
  derived and/or modified sequence
atgcggatttcgaaaccccatctccggtcgatctcgatccagtgttacttgtgccttcttctcaactcccactttttgactgaagccgggatccatgtgttcatacttggatgttttagcgcaggtctgccaaagaccgaggcgaattgggtgaatgtcatttcggacctcaagaagatagaagatctgatacaatcaatgcacattgatgccactctttacaccgaatccgacgtgcatccttcgtgcaaggtcactgccatgaagtgttttttgcttgagttgcaagtcatctcactggaatccggtgatgccagcattcacgataccgtggaaaatcttatcattcttgcaaataacagcctgtcctcaaacggaaatgtaactgagtctggctgtaaggagtgcgaagaacttgaggagaagaacattaaagaatttctccaatcattcgtgcatattgtccagatgttcatcaacacttcc

SEQ ID NO: 12937 - DNA, 486 bp, Artificial Sequence
  derived and/or modified sequence
atgcgtatatcgaagccacaccttagatctatctccatccagtgttacttgtgcctgctgctcaactctcatttcttaacggaggcagggattcacgtgttcattctgggctgcttttcagctggactaccaaagacggaagcaaactgggttaacgtgatcagcgacctaaaaaaaatcgaagatctgatccagtctatgcatatcgacgctacactgtacaccgaaagcgatgtacatccatcctgcaaagtcactgcgatgaagtgtttccttctggaactgcaagtcatcagtttggagtcaggcgatgccagcatccacgatacagtggagaacttaatcatcctggccaataactcactatcttcgaatggaaatgttaccgagtctggatgcaaggaatgcgaggagttggaagaaaaaaacatcaaagagttcctccagtcgtttgtccacattgtccagatgttcatcaacacaagt

SEQ ID NO: 12938 - DNA, 486 bp, Artificial Sequence
  derived and/or modified sequence
atgcggattagtaagccgcatctgcgtagcattagcattcagtgttatttgtgtttattacttaattcgcattttttgacagaggccggtatccacgtgtttatcctgggctgcttcagcgctggactgcctaagaccgaagcgaactgggtgaacgttatctccgatttgaaaaaaattgaagacctgatccagtccatgcatatagatgcaactttgtatacagagagtgatgttcatccctcatgcaaggtgaccgccatgaaatgctttctgttagaattgcaggtcatttctttagagtctggtgatgcaagtattcatgatacagttgaaaatctgattatcttagcaaataacagtctgtctagcaacggcaacgtcacagaatctggttgtaaagagtgtgaggaattagaggaaaagaatataaaagaattccttcagagctttgtccatattgtgcaaatgtttataaacacatct

SEQ ID NO: 12939 - DNA, 486 bp, Artificial Sequence
  derived and/or modified sequence
atgaggattagtaaaccgcacctcaggtctatttcgatccaatgctacctgtgcttgcttctgaattctcactttctgaccgaagccgggatccacgtatttattttaggctgtttctcagctggtcttccgaagacagaagctaactgggtcaatgtcatttccgacttgaaaaagattgaggacctgattcagtcaatgcacatagacgcgacgctctatactgaaagtgacgtgcacccctcatgcaaagtgacggccatgaagtgctttctgctggagttgcaggtgatctctctggaatccggagacgcttccatccacgacactgtggaaaaccttatcatcctggcgaacaattctctgagtagcaacggaaatgtgactgaatccggttgtaaagagtgtgaggagctagaagagaagaacattaaggaatttctgcagtctttcgtgcacatcgtacagatgtttatcaacactagc

SEQ ID NO: 12940 - DNA, 486 bp, Artificial Sequence
  derived and/or modified sequence
atgagaatcagcaaaccgcatctgcgcagcatctcgatccagtgctacttgtgccttctgcttaactcccatttcctcacggaagccggaattcacgtattcatcctcggttgtttctccgcagggctgccgaaaactgaggccaattgggtgaacgtgatctccgatctgaagaagatcgaagatttgatccagtcgatgcacatcgatgctactctctacactgagtcggatgtgcacccgtcttgcaaggtgaccgcgatgaagtgcttcctgctggaactgcaggtcatcagcttggagtcgggcgacgcttcaattcacgacaccgtggaaaacctgatcattttggccaataactcactctccagcaacggtaacgtgactgaatctggatgcaaggagtgcgaagaactggaagaaaagaacatcaaagagttcctgcagagttttgtgcacatcgtccagatgttcatcaatacctcg

SEQ ID NO: 12941 - DNA, 486 bp, Artificial Sequence
  derived and/or modified sequence
atgcgaatcagtaaacctcacttgcgtagtatctcgatacagtgctacttgtgcctgctgctgaattcccatttcctgaccgaggcaggaatccatgtgttcatcctagggtgcttttccgcaggtttgcctaagaccgaggccaactgggtgaacgtaattagcgacctgaagaaaattgaggacctcatccagtccatgcacatagacgcaaccttgtacacagaatctgacgtgcatccttcctgtaaagtgacagcaatgaagtgtttccttttggagttgcaagtcataagtcttgagagcggcgacgctagtatccacgacaccgtcgagaatcttatcatcctcgccaacaactcattatcaagcaacggcaatgtgaccgaaagtggatgcaaggagtgcgaggagcttgaagagaaaaatatcaaagagttcttacaatcattcgttcacatcgtccagatgtttattaacacaagc

SEQ ID NO: 12942 - DNA, 486 bp, Artificial Sequence
  derived and/or modified sequence
atgaggatatcaaaaccgcaccttcgctccatatctatccagtgttacctatgccttcttctaaatagtcacttcctcactgaagctggaatacatgtatttatacttgggtgtttcagtgcagggctacctaaaacagaggcaaattgggtgaacgtgatatctgatttaaagaaaatcgaagatctcatccagtctatgcacattgacgccacactctatacagaatcggatgtgcatccctcctgcaaagttacggctatgaaatgcttcttactcgagctacaggtaatctctctagagtcgggggatgcaagtatccatgatacagttgagaacctaataatcctcgctaacaattcactctcttctaatggaaacgtgactgaatcggggtgtaaagaatgtgaagaactagaagaaaaaaacatcaaagagttcttacaatccttcgttcatatcgtgcagatgttcattaatacttct

SEQ ID NO: 12943 - DNA, 486 bp, Artificial Sequence
  derived and/or modified sequence
atgaggatttctaagccgcacctgcgtagcatatccatccagtgctatttgtgtttgctactgaactcccacttcctgactgaggccggcatccatgtctttattctcggctgtttcagcgccggcctgccaaagaccgaggctaattgggtgaacgttatctccgacctgaagaagatagaggacttgatacaatctatgcacatcgacgccaccttgtacacggagtccgatgtgcatccgagttgcaaagtcaccgctatgaagtgcttcctccttgagctgcaggtgatatcgcttgagtccggcgacgcgagtattcatgatacagtcgagaatctaatcatcctggccaataattccttgagctcaaatggaaacgtgacggagagtggctgcaaggaatgtgaggaattggaggaaaagaatataaaagagttcttgcagagtttcgtgcacattgtccagatgttcataaacaccagc

SEQ ID NO: 12944 - DNA, 486 bp, Artificial Sequence
  derived and/or modified sequence
atgcgtatatcgaaaccgcatctacgatcgatatcgatacaatgttatttatgtctactactaaattcgcattttttaacggaagcgggtatacatgtatttatactaggttgtttttcggcgggtctaccgaaaacggaagcgaattgggtaaatgtaatatcggatttaaaaaaaatagaagatttaatacaatcgatgcatatagatgcgacgctatatacggaatcggatgttcatccgtcgtgtaaagtaacggcgatgaaatgttttttattagaattacaagttatatcgctagaatcgggtgatgcgtcgatacatgatacggtagaaaatttaataatattagcgaataattcgttatcgtcgaatggtaatgtaacggaatcgggttgtaaagaatgtgaagaactagaagaaaaaaatataaaagaatttttacaatcgtttgtacatatagtacaaatgtttataaatacgtcg

SEQ ID NO: 12945 - DNA, 486 bp, Artificial Sequence
  derived and/or modified sequence
atgcgcattagcaagccacatctgcggtccatttctatccagtgctatttgtgcctgctgctcaacagtcattttctcactgaagccgggatccacgtgttcatcctgggatgcttctctgccggattgccgaagaccgaagctaactgggtcaacgtgatttcagatttgaaaaagatcgaggatctgatacagagcatgcacattgatgcaaccttgtacaccgagagcgacgttcacccaagctgcaaagtgaccgctatgaagtgcttccttcttgaactgcaagtaattagtctggaaagcggcgacgcaagtatccacgataccgtggaaaacctcatcatactcgccaacaacagccttagctcaaatggaaacgttaccgagtccggttgtaaggagtgtgaggagctggaggaaaaaaacatcaaggagtttcttcaaagcttcgtgcatattgtacagatgttcatcaacaccagt

SEQ ID NO: 12946 - DNA, 486 bp, Artificial Sequence
  derived and/or modified sequence
atgaggatctctaaaccccatttacgatccatttccatccagtgctacctgtgtctcttgctgaactcccatttcctgacagaggccggtatacatgtgttcatcttgggctgctttagcgctggtctgccaaaaacagaggctaactgggtgaatgtgattagtgacttgaaaaaaatagaagatctgatacagtccatgcatatcgacgcaaccctctataccgaatccgatgtacatccctcatgtaaagtgaccgcaatgaagtgttttctgcttgagctgcaagtcatttcactggagtcaggagacgctagtatacatgacaccgtcgagaacctgattatcctggccaacaattctttgagctctaatggcaacgtgaccgagtccggatgcaaagagtgcgaagagttggaagagaaaaacataaaggagttccttcagtcattcgtacatatcgtgcagatgtttatcaatacctct

SEQ ID NO: 12947 - DNA, 486 bp, Artificial Sequence
  derived and/or modified sequence
atgcgcatcagcaagccccacctgcgcagcatcagcatccagtgctacctgtgcctgctgctgaacagccacttcctgaccgaggccggcatccacgtgttcatcctgggctgcttcagcgccggcctgcccaagaccgaggccaactgggtgaacgtgatcagcgacctgaagaagatcgaggacctgatccagagcatgcacatcgacgccaccctgtacaccgagagcgacgtgcaccccagctgcaaggtgaccgccatgaagtgcttcctgctggagctgcaggtgatcagcctggagagcggcgacgccagcatccacgacaccgtggagaacctgatcatcctggccaacaacagcctgagcagcaacggcaacgtgaccgagagcggctgcaaggagtgcgaggagctggaggagaagaacatcaaggagttcctgcagagcttcgtgcacatcgtgcagatgttcatcaacaccagc

SEQ ID NO: 12948 - DNA, 647 bp, Artificial Sequence
  derived and/or modified sequence
gggaaataagagagaaaagaagagtaagaagaaatataagagccaccatgagaatttcgaaaccacatttgagaagtatttccatccagtgctacttgtgtttacttctaaacagtcattttctaactgaagctggcattcatgtcttcattttgggctgtttcagtgcagggcttcctaaaacagaagccaactgggtgaatgtaataagtgatttgaaaaaaattgaagatcttattcaatctatgcatattgatgctactttatatacggaaagtgatgttcaccccagttgcaaagtaacagcaatgaagtgctttctcttggagttacaagttatttcacttgagtccggagatgcaagtattcatgatacagtagaaaatctgatcatcctagcaaacaacagtttgtcttctaatgggaatgtaacagaatctggatgcaaagaatgtgaggaactggaggaaaaaaatattaaagaatttttgcagagttttgtacatattgtccaaatgttcatcaacacttcttgataataggctggagcctcggtggccatgcttcttgccccttgggcctccccccagcccctcctccccttcctgcacccgtacccccgtggtctttgaataaagtctgagtgg

SEQ ID NO: 12949 - DNA, 675 bp, Artificial Sequence
  derived and/or modified sequence
taatacgactcactatagggaaataagagagaaaagaagagtaagaagaaatataagagccaccatgagaatttcgaaaccacatttgagaagtatttccatccagtgctacttgtgtttacttctaaacagtcattttctaactgaagctggcattcatgtcttcattttgggctgtttcagtgcagggcttcctaaaacagaagccaactgggtgaatgtaataagtgatttgaaaaaaattgaagatcttattcaatctatgcatattgatgctactttatatacggaaagtgatgttcaccccagttgcaaagtaacagcaatgaagtgctttctcttggagttacaagttatttcacttgagtccggagatgcaagtattcatgatacagtagaaaatctgatcatcctagcaaacaacagtttgtcttctaatgggaatgtaacagaatctggatgcaaagaatgtgaggaactggaggaaaaaaatattaaagaatttttgcagagttttgtacatattgtccaaatgttcatcaacacttcttgataataggctggagcctcggtggccatgcttcttgccccttgggcctccccccagcccctcctccccttcctgcacccgtacccccgtggtctttgaataaagtctgagtgggcggctctaga

SEQ ID NO: 12950 - RNA, 647 nt, Artificial Sequence
  derived and/or modified sequence
gggaaauaagagagaaaagaagaguaagaagaaauauaagagccaccaugagaauuucgaaaccacauuugagaaguauuuccauccagugcuacuuguguuuacuucuaaacagucauuuucuaacugaagcuggcauucaugucuucauuuugggcuguuucagugcagggcuuccuaaaacagaagccaacugggugaauguaauaagugauuugaaaaaaauugaagaucuuauucaaucuaugcauauugaugcuacuuuauauacggaaagugauguucaccccaguugcaaaguaacagcaaugaagugcuuucucuuggaguuacaaguuauuucacuugaguccggagaugcaaguauucaugauacaguagaaaaucugaucauccuagcaaacaacaguuugucuucuaaugggaauguaacagaaucuggaugcaaagaaugugaggaacuggaggaaaaaaauauuaaagaauuuuugcagaguuuuguacauauuguccaaauguucaucaacacuucuugauaauaggcuggagccucgguggccaugcuucuugccccuugggccuccccccagccccuccuccccuuccugcacccguacccccguggucuuugaauaaagucugagugg

SEQ ID NO: 12951 - protein, 153 aa, Artificial Sequence
  derived and/or modified sequence
MYRMQLLSCIALSLALVTNSAPTSSSTKKTQLQLEHLLLDLQMILNGINNYKNPKLTRMLTFKFYMPKKATELKHLQCLEEELKPLEEVLNLAQSKNFHLRPRDLISNINVIVLELKGSETTFMCEYADETATIVEFLNRWITFCQSIISTLT

SEQ ID NO: 12952 - DNA, 1029 bp, Artificial Sequence
  derived and/or modified sequence
ctatcacctaagtgtgggctaatgtaacaaagagggatttcacctacatccattcagtcagtctttgggggtttaaagaaattccaaagagtcatcagaagaggaaaaatgaaggtaatgttttttcagacaggtaaagtctttgaaaatatgtgtaatatgtaaaacattttgacacccccataatatttttccagaattaacagtataaattgcatctcttgttcaagagttccctatcactctctttaatcactactcacagtaacctcaactcctgccacaatgtacaggatgcaactcctgtcttgcattgcactaagtcttgcacttgtcacaaacagtgcacctacttcaagttctacaaagaaaacacagctacaactggagcatttactgctggatttacagatgattttgaatggaattaataattacaagaatcccaaactcaccaggatgctcacatttaagttttacatgcccaagaaggccacagaactgaaacatcttcagtgtctagaagaagaactcaaacctctggaggaagtgctaaatttagctcaaagcaaaaactttcacttaagacccagggacttaatcagcaatatcaacgtaatagttctggaactaaagggatctgaaacaacattcatgtgtgaatatgctgatgagacagcaaccattgtagaatttctgaacagatggattaccttttgtcaaagcatcatctcaacactgacttgataattaagtgcttcccacttaaaacatatcaggccttctatttatttaaatatttaaattttatatttattgttgaatgtatggtttgctacctattgtaactattattcttaatcttaaaactataaatatggatcttttatgattctttttgtaagccctaggggctctaaaatggtttcacttatttatcccaaaatatttattattatgttgaatgttaaatatagtatctatgtagattggttagtaaaactatttaataaatttgataaatataaa

SEQ ID NO: 12953 - DNA, 459 bp, Artificial Sequence
  derived and/or modified sequence
atgtatcggatgcagctgctctcatgcatagcactcagcctcgcgttggtgaccaatagtgcgcccacgtcttcaagcactaagaagacgcaactgcagcttgagcatctccttctcgatctgcaaatgatcttaaacggcattaacaactacaagaatccaaagttaacaaggatgcttacctttaaattctatatgcccaagaaagctacagagctaaaacacctgcaatgtctcgaagaagaactgaagcctcttgaggaagttctcaacctcgcccaatccaagaactttcatctccgtcctcgtgatttgatctcaaatattaacgtgatagttttggagctcaaggggagcgaaactacgttcatgtgcgaatatgcggacgaaaccgccacaatcgtagaattcctcaacagatggatcacattttgtcagagcattatctcaaccttaact

SEQ ID NO: 12954 - DNA, 459 bp, Artificial Sequence
  derived and/or modified sequence
atgtatcgaatgcaactattatcgtgtatagcgctatcgctagcgctagttacgaattcggcgccgacgtcgtcgtcgacgaaaaaaacgcaactacaattagaacatctattactagatctacaaatgatactaaatggtataaataattataaaaatccgaaattaacgcgaatgttaacgtttaaattttatatgccgaaaaaagcgacggaactaaaacatttacaatgtttagaagaagaattaaaaccgttagaagaagtactaaatctagcgcaatcgaaaaattttcatctacgaccgcgagatctaatatcgaatataaatgttatagtattagaattaaaaggttcggaaacgacgtttatgtgtgaatatgcggatgaaacggcgacgatagtagaatttttaaatcgatggataacgttttgtcaatcgataatatcgacgttaacg

SEQ ID NO: 12955 - DNA, 459 bp, Artificial Sequence
  derived and/or modified sequence
atgtaccggatgcagcttctttcctgtattgcactttctctggcgcttgtgactaactccgcaccaacgagctcgagcactaaaaagacgcagttgcaattggaacacttgctgcttgatcttcaaatgattcttaatggaatcaacaactacaagaatcctaagttgacccggatgttgacctttaagttttacatgccgaagaaggcaaccgaactcaagcatcttcaatgtcttgaagaagagctgaaaccactggaagaagtgctgaacctggcacagtcgaagaactttcaccttaggccaagagatctgatctccaacattaacgtgattgtgctggagctgaaagggtcagaaaccacttttatgtgcgaatacgccgacgaaactgccaccattgtggaatttcttaatcggtggattactttctgtcaatcgatcatttccaccctgacc

SEQ ID NO: 12956 - DNA, 459 bp, Artificial Sequence
  derived and/or modified sequence
atgtaccggatgcagctgctcagctgtattgccctctcgcttgccctcgtgactaactcagcacctacctcctcatcgactaagaaaactcagcttcagcttgagcacctgcttctcgatctgcaaatgattctgaatggtattaacaactacaagaatccaaagctgacccgcatgctgacctttaagttctacatgccaaaaaaggcgactgaactcaagcacttgcaatgtctcgaagaagagctcaagccgctggaagaagtgcttaatcttgcacagtcgaagaacttccatctgcgtcctagagatcttatctcaaacatcaatgttatagtgcttgaacttaagggttcggaaactacgtttatgtgcgagtacgccgatgaaaccgcaactattgtggagtttctgaacagatggattaccttttgccaatcaatcatttcaactttgacc

SEQ ID NO: 12957 - DNA, 459 bp, Artificial Sequence
  derived and/or modified sequence
atgtacagaatgcagctccttagttgtattgctctttcactggcactggtgactaattctgcccctacctccagctctaccaaaaagactcagctgcagctggagcacctcctgcttgatcttcagatgatcctgaatgggattaataactacaagaacccaaagttgacaaggatgctgaccttcaagttctacatgcctaagaaagctacagagcttaagcacttgcagtgcctggaggaggagctgaagcctctggaagaagtgctcaatttggcccaatctaagaactttcacctgagaccccgcgatctaatctcgaacattaacgtgattgtgttggaactcaagggcagcgaaacaacttttatgtgtgagtatgctgacgagaccgctactatcgtcgaattcctgaaccggtggattactttttgccaaagtatcatttccaccttgacc

SEQ ID NO: 12958 - DNA, 459 bp, Artificial Sequence
  derived and/or modified sequence
atgtaccgaatgcaactgctgtcgtgcatcgccctttctctcgccctggtgaccaactcagcgcctacttcgtcctcaaccaagaagactcagctgcaactggaacatttgctcctcgacctccaaatgatcttgaatggtatcaataactataagaacccaaagctcacccggatgctcacttttaagttttacatgccgaagaaagccactgagcttaaacatctgcaatgccttgaagaagagttgaagccgttggaggaagtgttgaatctggcacagagcaagaacttccatcttaggcctcgggatctgataagcaacatcaacgtgatcgtcctggagctgaagggaagcgaaacgaccttcatgtgtgagtatgccgacgagacggctactatcgtggaattcctgaaccgctggatcaccttctgccagtcgatcatttcgactctgacg

SEQ ID NO: 12959 - DNA, 459 bp, Artificial Sequence
  derived and/or modified sequence
atgtaccggatgcaattgctttcttgcatcgctctcagcctcgcgctggtcactaactccgctcccacctcttccagtacgaaaaagacacagttgcagctggagcacctcctccttgatctccaaatgatcctgaatggtattaataactataaaaaccctaaactgacgagaatgttaacctttaagttttatatgcccaagaaggcaactgaactcaagcatcttcagtgtctggaggaagagctcaagcctctcgaagaggtcttaaatcttgcccaatctaagaactttcatctcagaccgagagacctgatttctaatatcaatgttatagtgttagagctcaagggcagtgagaccacattcatgtgcgaatatgctgacgagacggccaccatcgtcgagttcctgaacaggtggattactttttgtcaatcaattataagcaccctgacc

SEQ ID NO: 12960 - DNA, 459 bp, Artificial Sequence
  derived and/or modified sequence
atgtacagaatgcagctgctgtcgtgcatcgctctctcgctggccctggtgactaactccgcgcctacctcgtctagcaccaagaaaactcaactccagctggaacatttgctgctggatctccagatgatcctcaacggaattaacaactacaagaacccaaagctgaccaggatgctgactttcaagttctatatgccgaagaaagcgaccgaacttaaacatcttcaatgcctcgaagaggaactgaaaccactggaagaagtgctgaatttggcgcagtcgaagaacttccatttgcgcccgagagatctcatctcaaatatcaacgtgatcgtcctggagctgaaaggctccgaaaccactttcatgtgcgaatacgcagacgagactgctaccatcgtcgagtttctgaaccggtggattactttctgccagtcgatcatctcaacgctgacc

SEQ ID NO: 12961 - DNA, 459 bp, Artificial Sequence
  derived and/or modified sequence
atgtacagaatgcagttgctttcctgcattgctctcagcctcgccctagtcaccaactctgcaccgacctccagttctaccaagaagactcagctccagctggagcatcttttgctcgatcttcagatgattctaaacggtatcaataactataaaaaccccaagctaacccgtatgctcaccttcaaattttatatgcccaagaaggctaccgagctaaagcaccttcagtgcctggaggaggagcttaagcctctcgaggaagtgctaaaccttgctcagtcaaagaacttccatctcaggccaagggatctaatcagcaacatcaacgtcatcgtcctagagctgaagggcagcgagacgacctttatgtgcgagtacgccgacgagacggccacgattgttgaattcctgaaccggtggatcaccttctgccaatcgattataagcaccctgacc

SEQ ID NO: 12962 - DNA, 459 bp, Artificial Sequence
  derived and/or modified sequence
atgtaccgcatgcaactcctgagttgtattgctttgtctctggcactggttacaaactcagcaccaaccagtagcagtactaagaaaacacaactccagctggagcaccttcttctagatttgcaaatgatcctcaacggaatcaataattataagaacccaaaactgaccagaatgctgacttttaagttctatatgcccaagaaggctacagaactgaagcacctgcaatgcttggaagaggagctcaagcctctagaagaagtgctcaatctagcgcaatcaaaaaacttccacctgagaccgcgcgatctgatctccaatatcaacgttatcgttctggaacttaaggggagcgagaccacattcatgtgcgaatacgctgatgagactgctacaatcgtcgaattcctgaacagatggatcaccttttgccaatcgataatctcaactcttacc

SEQ ID NO: 12963 - DNA, 459 bp, Artificial Sequence
  derived and/or modified sequence
atgtaccggatgcagctcctgtcctgcatcgccctttctctggccctcgtgaccaattcggccccaacgagttccagcactaaaaagactcaactgcaacttgaacaccttttgctcgatctccagatgatcctgaacggaatcaacaactacaagaacccgaagctcactagaatgctgacctttaagttttacatgcctaagaaggcgactgaactgaaacatctgcaatgcctcgaggaggagctgaagccactggaagaagtgctgaatctggctcagtcgaaaaacttccacttgcgcccgcgcgacctgatctccaacatcaatgtgattgtactggagttgaagggctcagaaaccactttcatgtgcgaatacgcagacgaaacggcgaccatcgtcgagttcctgaaccggtggatcactttctgtcagtcaatcatttctaccctcacg

SEQ ID NO: 12964 - DNA, 459 bp, Artificial Sequence
  derived and/or modified sequence
atgtacaggatgcagttactttcttgcattgcccttagtctcgctctcgtgacaaactcagcgcctacctccagtagcaccaagaaaactcagctccaactggaacatctgctgctggatctgcagatgatactgaatggcataaataactacaaaaaccccaaacttacacggatgttgacatttaaattctatatgcccaagaaagctactgagcttaaacatttgcagtgtcttgaagaggagctgaagccccttgaagaggtgttgaacttagcacagtctaaaaactttcacctgcgcccccgtgacctgatatcaaatataaacgtgatcgtgctggagctgaagggctccgagacgacctttatgtgtgagtacgcagatgagacagcgaccatcgtcgaattcttaaaccgctggataaccttttgtcaatctataatctccacactcacc

SEQ ID NO: 12965 - DNA, 459 bp, Artificial Sequence
  derived and/or modified sequence
atgtatcgcatgcagctgctgagttgtatcgcgctatcactggccctggtcaccaattcagcccccaccagtagttctaccaagaagacccaacttcagttggagcacctactgctggacttacaaatgatcctgaacggaataaataattacaaaaatcccaaactaacgcgcatgctcacatttaagttttatatgcccaaaaaagctactgaattgaagcatttgcagtgtcttgaggaggaactaaagccgctggaggaggtgttgaacctggcacagtctaagaactttcacctgcggcccagggacctgatctcaaatataaacgtgattgtgctcgagctgaaggggtcggaaacgacgtttatgtgcgagtatgcggacgagaccgcaactatcgtggagttcctgaacaggtggatcactttctgccagagtatcatttctaccttaacc

SEQ ID NO: 12966 - DNA, 459 bp, Artificial Sequence
  derived and/or modified sequence
atgtacaggatgcaactgctgtcctgcattgcgttgtctcttgcactcgtcactaactccgcaccaacgagctcgtccaccaaaaagactcagcttcaacttgaacacctcctgctggatcttcagatgattctgaacggtattaacaactacaaaaacccaaaacttactagaatgctgacgtttaagttttacatgcctaaaaaggcaaccgaattgaagcatctgcaatgtttggaagaagagctgaagcctcttgaggaagtgctcaaccttgctcaaagcaagaattttcacctcaggccccgggacctgatatcgaacattaatgtcatcgtgctcgaacttaaggggtcggaaaccaccttcatgtgtgagtacgccgatgagactgcaaccatcgtcgaatttcttaatcggtggatcactttttgtcaatccattatctcgactctgacc

SEQ ID NO: 12967 - DNA, 459 bp, Artificial Sequence
  derived and/or modified sequence
atgtataggatgcagctgctgtcttgcatagccctgtcactagccctagtcaccaacagcgcaccaaccagctcaagcacaaaaaagacccagcttcagttggagcatctcctgctcgatcttcagatgattttaaacggcatcaataattataagaaccctaaactcacccgaatgctgaccttcaaattttatatgccaaagaaggccaccgaactcaagcatctgcaatgtcttgaagaggagctcaagcctttggaggaagtcctgaatcttgcacagtccaagaacttccatctgagaccccgcgacctgatctcaaatatcaatgtaatcgtcttagaactaaagggatcggagaccacattcatgtgcgagtacgccgacgaaaccgcaaccatcgtggaatttctgaacagatggatcactttctgccagagcataatttctaccctgacc

SEQ ID NO: 12968 - DNA, 459 bp, Artificial Sequence
  derived and/or modified sequence
atgtacaggatgcagctactgtcctgtatcgctctgtctctggcactcgtaaccaactctgctccgaccagttcctcaacgaagaagacgcagttgcagttggaacacctcctgctggacctgcaaatgattctcaatggtattaataactataaaaatccaaaactcactagaatgctgacattcaaattctatatgccgaagaaggcaacagagctgaaacaccttcagtgcctcgaggaggagctgaagcctctagaggaggtgctaaacctggcccagtcaaagaatttccacctgaggccccgcgatttaatcagtaatatcaatgtcattgtcctggagcttaagggatctgaaacaaccttcatgtgtgagtacgcagacgagacagctaccatcgtggaattccttaaccggtggattacgttttgccagtcaatcatatccactctaacc

SEQ ID NO: 12969 - DNA, 459 bp, Artificial Sequence
  derived and/or modified sequence
atgtaccgcatgcagctgctctcatgcattgctctgtcgctggcgcttgtcactaatagcgcaccaacctcctcctccaccaaaaagacccaacttcagctggaacatcttctgcttgacctccagatgatactcaatggtatcaataactacaaaaaccccaaacttacccgaatgttgacctttaagttttacatgcctaagaaagcgactgagcttaagcatttgcaatgccttgaagaagaactcaagccactggaagaggtgctgaacctggcgcaatcaaagaactttcatctccgcccgcgtgaccttatttccaacatcaatgtgattgtccttgaactgaaaggatcggaaaccacctttatgtgtgaatacgctgatgagactgcaacgattgtggagtttcttaatcggtggataactttttgtcagtcgattatctccactctgacc

SEQ ID NO: 12970 - DNA, 459 bp, Artificial Sequence
  derived and/or modified sequence
atgtatcggatgcagcttcttagctgcatcgcactgtcattggccttggtcaccaattcagcgccgacctcctcttcgactaagaaaacgcagcttcagctggaacaccttctgctggacttgcagatgattttgaacggaatcaataactacaagaacccgaaactcacgagaatgctcaccttcaaattctacatgcccaagaaggcgaccgagctcaagcacctgcaatgtttggaggaggaactgaaaccattggaagaagtgctcaaccttgctcaatccaagaattttcatctgcggcctcgagatttgatatcgaacataaacgtgattgtgctggaactgaagggctcggagacgactttcatgtgcgagtacgccgacgagactgccaccatcgtcgaatttcttaatcgctggatcaccttctgccagagcatcatctcaaccctgacc

SEQ ID NO: 12971 - DNA, 459 bp, Artificial Sequence
  derived and/or modified sequence
atgtatagaatgcagctgctgtcctgcattgctctttccctggctcttgttactaactcagcacccacctctagcagtactaagaaaacacagctgcagttggaacacctgctgctcgacctccagatgatcctcaacggaatcaataattataaaaatcccaaactgaccaggatgctcacattcaagttttacatgccaaagaaagcgacagaactgaagcacctgcagtgtctggaggaggaactgaagcctctggaggaggtcctcaatctggcgcagtctaagaattttcacctgaggcctcgggatctcatctctaacataaatgtcatcgtgttggagctgaaaggtagcgagactaccttcatgtgtgaatatgctgatgaaaccgccacaatcgtcgaattcctgaatcgctggattactttttgccagtctattattagcactttgacc

SEQ ID NO: 12972 - DNA, 459 bp, Artificial Sequence
  derived and/or modified sequence
atgtacagaatgcaattgctctcttgtatagcactttccctcgcactcgtcaccaattccgcccctacttcatcgtccaccaagaaaactcaacttcagctcgaacatcttcttctcgacctgcagatgatccttaacggcattaacaattacaagaatcccaaattgactagaatgttgacttttaagttctatatgcctaagaaggccaccgaacttaagcatcttcagtgtctggaagaagaactcaaaccgctggaagaagtgctcaatcttgcccagagcaaaaacttccatctgcgtcctcgggatttgatttccaacattaatgtgatcgtgcttgaacttaaggggtcagaaaccacctttatgtgcgaatacgctgatgaaactgcaaccattgtcgagtttcttaaccggtggataacgttttgccaatccatcattagcaccctgact

SEQ ID NO: 12973 - DNA, 459 bp, Artificial Sequence
  derived and/or modified sequence
atgtacagaatgcaacttctgtcgtgtattgcattgtcgctggccctggtgactaacagcgccccaacctcaagctctaccaaaaagacccaacttcaactggagcacctcttgcttgacctccagatgatactcaacggtattaacaattacaagaacccaaaacttactaggatgcttactttcaaattctacatgcctaagaaggcgaccgaactcaagcatcttcagtgccttgaggaggaattgaagcctctggaggaggtgctgaatctcgcccagtcgaagaactttcatcttagaccgagggatttgatttccaacattaacgtgatcgtgcttgaactcaagggaagcgaaactacttttatgtgcgaatacgctgatgaaaccgcaactattgtggaattccttaaccgttggattactttctgtcaaagcattatctctacccttacc

SEQ ID NO: 12974 - DNA, 459 bp, Artificial Sequence
  derived and/or modified sequence
atgtaccggatgcagctcctctcatgcatcgcgttgagcctcgcgctcgttaccaactccgccccaacctcttcatcgaccaaaaagactcagctgcaacttgagcatctgctgctggatctccagatgatcttgaacggcatcaataactacaagaatccgaaattgactaggatgctgacctttaagttttacatgcccaagaaagcgactgagctgaagcacctccagtgccttgaggaagaacttaagcctctggaagaagtgctgaatctggcccagtcaaagaatttccatctccgcccgcgcgacctgatctcgaatatcaatgtcatcgtgttggaactgaagggttccgagactaccttcatgtgcgagtatgctgacgagactgccacgattgtggaattcctgaatcggtggataacgttctgtcaatccatcattagcactctgacc

SEQ ID NO: 12975 - DNA, 459 bp, Artificial Sequence
  derived and/or modified sequence
atgtataggatgcagctgctgagctgtatcgccctgagccttgcacttgtgaccaactcagcacctacttcatcaagtactaagaagacacagttgcagcttgagcacctgctccttgatctccagatgatcttgaacggtattaataactacaaaaatcctaaactcactcggatgttgacatttaagttctatatgcccaaaaaggcaacggaactcaaacacctccagtgtttggaggaggaactgaagccacttgaggaagtgcttaacttggcgcagagcaaaaactttcatctgcggcctcgggatctcatatccaacataaacgtgatcgttctcgagctgaaaggttccgaaactacatttatgtgtgaatacgctgacgagacagctaccatcgtcgagtttttgaaccgatggataactttttgtcagagcatcatttctacactgacc

SEQ ID NO: 12976 - DNA, 459 bp, Artificial Sequence
  derived and/or modified sequence
atgtacaggatgcagctgttgtcatgtatagcactaagcctcgctctcgtgacaaactccgcccctacctcctccagcaccaagaaaacccagctgcagctggaacacctgctgttggatctacagatgattctcaatggaatcaacaattacaagaaccctaaactgactagaatgctgactttcaaattttacatgccaaagaaagcgacagagttgaagcacctccagtgccttgaggaagagttgaaaccactcgaggaggtgctgaacctggcccagtctaaaaactttcacctgcggcccagagacctgatatctaatattaatgttatagtgctggagttgaaaggctcggagactacgtttatgtgtgaatatgccgacgagacggccaccatagtcgaatttttaaatcgctggattaccttttgtcagtccatcatctccactctgacc

SEQ ID NO: 12977 - DNA, 459 bp, Artificial Sequence
  derived and/or modified sequence
atgtacagaatgcaactgttgtcctgtattgccctctcgctggcacttgtcactaacagcgcccccacttctagctcgaccaaaaagacccagctccagcttgagcacctgttgcttgatctccagatgatcctgaatgggatcaataactacaagaacccaaaactcactcgaatgctcacctttaagttttacatgcctaagaaggcaaccgaacttaaacatctgcaatgcttggaagaggaactgaagcctttggaagaagtgcttaacctggctcaatccaagaattttcatttgaggccgcgcgacttgatcagtaacataaacgtcattgtgcttgaactgaagggttcggagactaccttcatgtgtgaatacgcagatgagactgcgacgattgtggaattcctgaatcggtggattacgttttgtcaatccatcattagtactcttacc

SEQ ID NO: 12978 - DNA, 459 bp, Artificial Sequence
  derived and/or modified sequence
atgtacagaatgcaactgctgagttgtatcgctctcagcctggccctcgtgacaaactccgccccgacaagctcctctactaaaaaaacccaactgcagctcgaacacctgctactggaccttcagatgatccttaatggcatcaacaactacaagaatcccaaactgacgcgtatgctgacatttaaattttatatgcccaagaaggcaaccgagctcaagcatctacaatgtttggaggaggagctgaagcctctggaggaagtgctcaacctggctcagtctaaaaatttccacttacgccccagggacttgataagcaacatcaatgtgatcgtgctggaactgaagggatcggagaccacatttatgtgtgagtatgcggacgaaaccgctaccatagtggagttcctgaacagatggataacgttctgtcagtcaatcatttccacccttacc

SEQ ID NO: 12979 - DNA, 459 bp, Artificial Sequence
  derived and/or modified sequence
atgtacagaatgcagctcctgtcctgtattgcactgtcgttggcactcgtcaccaattcggcacctacttcaagctcaaccaaaaagactcagcttcagttggaacacctgcttctcgatcttcagatgatcctgaacggtatcaacaactataagaaccctaaacttactcgcatgctgacctttaagttctacatgccaaagaaagcaacggaactcaaacatcttcaatgtctggaggaagagctgaagccacttgaagaggtgctgaacctcgcgcagtctaaaaacttccatctccggcctcgtgatctgataagcaacataaacgtgattgtccttgaactcaagggatcggaaaccacgtttatgtgtgaatacgcagacgagactgccaccattgtggaattcctgaaccgctggattaccttttgccaatcaattatctcgactcttact

SEQ ID NO: 12980 - DNA, 459 bp, Artificial Sequence
  derived and/or modified sequence
atgtataggatgcagctgttgagctgtatcgccctgtcgctggcgctggtcacgaactccgcgcctacttcgtcatcgaccaaaaagacccagcttcaactcgagcacctcctgctggatttgcagatgattttgaacggaatcaacaattacaagaatccaaagctgactcggatgctgacctttaagttctacatgcccaagaaggcaacggagctgaagcatctccagtgcctggaagaagaactgaagcctcttgaggaggtgctgaacctcgcacaaagcaagaatttccatctgcgcccgcgagatctcatctcaaacatcaacgtgatcgtgctggaactgaagggttcggaaaccactttcatgtgtgagtacgccgacgaaaccgcaaccatcgtggaattcctgaaccggtggatcactttctgccagagcatcatctcgactcttact

SEQ ID NO: 12981 - DNA, 459 bp, Artificial Sequence
  derived and/or modified sequence
atgtaccggatgcagcttttatcctgcatcgccttgtccctggcgttggtgactaactctgccccaaccagtagtagtacaaagaagacccagctgcagctggagcacctcctgttagacctgcaaatgatattaaatggtatcaataactacaagaaccccaagctgacccgtatgctgactttcaagttctacatgcccaaaaaggccactgaactgaaacacctgcagtgtctagaggaagaactaaagcctctggaagaagtattaaatctggcccagtctaagaactttcatttgagaccacgagatctcatctctaacataaatgtgatagtgctggaacttaaagggtctgaaaccactttcatgtgcgaatatgctgacgaaacagctacaattgtcgaatttctgaatcgttggattactttctgtcaaagtatcattagcaccttaact

SEQ ID NO: 12982 - DNA, 459 bp, Artificial Sequence
  derived and/or modified sequence
atgtaccgtatgcaactattgtcatgcattgccctttcgctcgctctggttacaaattccgcgccaaccagctcctccaccaaaaagacccagctgcaattggaacaccttctgctggaccttcagatgatcctgaacggtattaataactataagaaccctaagcttacccggatgttgactttcaagttctatatgccgaagaaggccactgaattgaagcatctccagtgcctcgaagaggagctgaaaccgctggaagaggtacttaatttagctcagtcgaagaactttcatctgcgcccccgagacttgatcagtaacatcaatgttatcgtactcgagttgaagggttctgagacaactttcatgtgcgagtacgcggatgagaccgcaacaattgttgagtttctgaacagatggattaccttttgtcagtctattatctccacattgaca

SEQ ID NO: 12983 - DNA, 459 bp, Artificial Sequence
  derived and/or modified sequence
atgtaccgtatgcagttgctgtcgtgtatcgcactgtcgttggcgctggtgactaacagcgctccaacttcttccagtacgaaaaagactcagctccaactcgagcacctcctgctcgatctccagatgatcctgaacggcattaacaactacaagaatcccaagctgactcggatgctgactttcaaattctacatgccgaagaaagcgaccgagctgaaacacctccagtgcctggaggaagaactgaagccgctggaagaggtgcttaatctcgctcaatccaagaattttcacctccggcctcgggaccttatcagcaatatcaacgtgatcgtcttggaactcaagggctccgaaaccaccttcatgtgcgagtatgcagacgaaactgccactatcgttgagttcctgaatcgctggattaccttctgtcagtcaatcatctccacgctgacc

SEQ ID NO: 12984 - DNA, 459 bp, Artificial Sequence
  derived and/or modified sequence
atgtatcgcatgcagctgctctcttgcatcgccttatcactggcattggtgacaaatagcgccccgacatcaagctccaccaagaagactcaacttcagctcgagcatctcctgctggatcttcagatgatccttaacggaattaataattacaagaatcccaagctaactaggatgctgacattcaaattctatatgccaaagaaagctacagaactgaaacacctccagtgcctggaagaagagctgaaaccactggaggaggtgctcaacctcgcacagtcgaagaactttcatctgcggccccgcgacctcatctcgaatatcaatgtgattgtactcgagttgaaagggagcgagactacttttatgtgcgaatacgccgatgaaacagcaaccatagttgagttccttaacagatggattaccttctgccagagcatcatatctacccttacc

SEQ ID NO: 12985 - DNA, 459 bp, Artificial Sequence
  derived and/or modified sequence
atgtacaggatgcagctgttgtcctgcattgcactgagcctggcactggtgacgaactctgcaccgacttcatcctcaacgaaaaagacgcagctacagttagagcacctcctcctggacctgcaaatgatactaaacggtattaacaactacaagaatccgaagctgacacgaatgctgacttttaagttctatatgcccaagaaggccaccgagctaaagcatctgcaatgcctggaggaggaattaaagcccctcgaggaggtgttaaacctcgctcagagcaagaacttccacctcagaccaagggatctgatttccaatataaacgttatagttctggaactcaagggcagtgaaaccaccttcatgtgcgaatatgcagatgagactgccactattgtagaattcctgaatcgttggatcaccttttgccaatcgattatcagcaccctgacg

SEQ ID NO: 12986 - DNA, 459 bp, Artificial Sequence
  derived and/or modified sequence
atgtacaggatgcagctcctgtcctgcatcgcgctctccctggcactcgtgaccaactcggccccaacttcgtcatcgaccaagaaaacccagcttcaactggaacacctgctcttggacctccaaatgatcctgaacggaattaacaactacaagaatccgaagctcactagaatgctgacttttaagttctacatgccgaagaaggctaccgagctgaagcacctgcagtgtctcgaagaggagctgaagcccctggaagaagtcctgaatttggcgcaaagcaaaaactttcacctccggccacgcgacctcatctcaaacattaacgtgatcgtcttggagctgaagggctccgaaaccaccttcatgtgtgaatatgccgatgaaacggcgaccatcgtcgaatttctgaatcggtggattactttctgccaaagcatcatctcgaccctgacc

SEQ ID NO: 12987 - DNA, 459 bp, Artificial Sequence
  derived and/or modified sequence
atgtaccggatgcaactgctctcctgtatcgctctatccctggcactggtcaccaacagtgcccccacaagtagcagcaccaagaaaactcagctgcaactggagcacttgctgcttgatctgcagatgatactcaatggaataaataattacaagaacccaaaacttacccgcatgcttacctttaagttctacatgccgaagaaggcaacggaactgaagcacctgcaatgcctggaagaggaactgaaacctctggaagaagtcctgaatctggctcagagtaagaacttccatctacgcccgagggacctgattagtaacattaacgtgattgtgctggaattgaaaggctccgagactaccttcatgtgtgaatacgctgacgagacagcaacgatagtggaattcctaaaccggtggataacattctgtcagtcaattataagcacactaaca

SEQ ID NO: 12988 - DNA, 459 bp, Artificial Sequence
  derived and/or modified sequence
atgtaccgcatgcagctcctttcatgcatcgccctgtcactcgcactcgtgacgaattcagccccaacttcgtcgtccaccaaaaagactcagctgcaactcgagcacctgcttctggaccttcaaatgatcctcaacggaatcaacaactataagaacccgaagctgactcggatgctcacttttaagttctacatgcccaagaaggcaactgaactgaaacatctgcagtgtctggaagaagagcttaagccgctcgaggaagtgttgaacctggcccaatcgaagaactttcacctgcggccgagggatcttatctccaatatcaacgtgatcgtgctcgaattgaagggaagcgaaaccacctttatgtgcgaatacgcggacgagacggccactattgtcgaattcctcaaccgctggattactttctgtcagtcgataatctcgaccctgacc

SEQ ID NO: 12989 - DNA, 459 bp, Artificial Sequence
  derived and/or modified sequence
atgtacaggatgcaactattgtcctgtattgcactgtcgttggccttggtgacaaactccgccccaacctcctcaagtaccaaaaaaacccagctgcagctggaacacctgctactggatctgcaaatgattctaaacggaatcaacaactataagaatcccaagctgacccgtatgctgactttcaagttttacatgcccaaaaaggccacggaactaaagcaccttcagtgtctggaagaggaattaaaaccgctcgaggaagtcctaaatctggcccaatccaaaaatttccacctgcgccccagagaccttatctctaacattaacgttatcgttctggaactgaaaggatccgagacgacgtttatgtgcgagtacgctgatgaaacggctacaatcgtggagttccttaataggtggatcacattttgccaaagtataattagtactttgacg

SEQ ID NO: 12990 - DNA, 459 bp, Artificial Sequence
  derived and/or modified sequence
atgtaccgtatgcagctgctgtcctgtatcgcactctccctggccctcgtgacgaacagcgcacctacctcgtcctcgaccaaaaagactcagttgcaacttgaacatctcctgctcgacctccagatgatactgaacgggattaacaactacaagaacccaaagctgaccaggatgctcaccttcaagttttacatgcctaagaaagcaactgagctgaagcacctccaatgtctcgaagaagagctcaaaccccttgaagaagtgcttaatctcgcacaatcaaaaaactttcatcttcgccctagggatctcatctccaatatcaatgtcattgtcctggagctcaaaggctccgaaaccactttcatgtgcgaatacgcagacgaaactgctactattgtggaattcctcaatagatggataacgttctgtcaatcgatcatcagcactctgacc

SEQ ID NO: 12991 - DNA, 459 bp, Artificial Sequence
  derived and/or modified sequence
atgtatcgaatgcagttactaagttgtattgccctcagcctagcccttgtgaccaattccgctcctacttcctcatcaaccaagaaaacccagctccagctggagcatctcttgctggatcttcagatgatccttaacgggattaataattataaaaaccccaagctgaccaggatgctcacttttaaattttatatgcccaaaaaggcaaccgaactgaagcaccttcagtgtctggaggaagagctcaagcccctggaggaagtcttgaacctggcacagtcgaagaatttccacctcagacctagagaccttatcagcaatatcaatgttatcgtgctagaattgaaaggctcagagacaacatttatgtgtgaatacgccgatgaaacagctacaattgtcgaattcctgaatcgttggatcacattttgtcagagtattatttccacactgacc

SEQ ID NO: 12992 - DNA, 459 bp, Artificial Sequence
  derived and/or modified sequence
atgtatcggatgcaactactcagctgcatcgcactctcgttggcgctggtgacgaacagtgcgcccacctcctcatctaccaagaagactcaactgcaacttgagcacttgcttcttgatctgcagatgatcctgaacggcatcaacaactacaagaacccgaaactcactagaatgctcacctttaagttctatatgcctaagaaagcaaccgagcttaagcacttgcagtgcctcgaagaggagctcaagcccttggaggaggtcctcaacctggcacagtctaagaatttccatttacgcccccgggacctcatctctaacatcaacgtaatagtactcgagctgaagggctcggaaaccaccttcatgtgtgagtatgctgatgaaaccgccacgattgtcgagttccttaaccggtggattactttttgtcagtcgattatcagcaccctcacc

SEQ ID NO: 12993 - DNA, 459 bp, Artificial Sequence
  derived and/or modified sequence
atgtaccggatgcagcttctgagctgtattgccctgagtctcgcgctcgtcacgaacagcgcccccacatcatcatccaccaaaaaaactcagcttcaactggaacacctgcttttggacttgcagatgatcctgaacggaattaataattacaagaatcctaagctcacccgcatgctcactttcaaattctacatgccaaaaaaggctacagaactgaagcacctgcagtgtctggaagaagagctcaaacctctggaggaggtgcttaatctggctcagtctaaaaatttccacctgcgacctagggatttgatctctaacatcaacgtgattgtcctggaactgaagggctctgagaccacgttcatgtgtgaatacgctgacgagacagccactatcgtagagtttctgaataggtggataactttttgccagagcatcataagcacccttaca

SEQ ID NO: 12994 - DNA, 459 bp, Artificial Sequence
  derived and/or modified sequence
atgtacaggatgcaactccttagctgtatcgcactttcacttgcactggtcaccaactccgcccctaccagctcctcgaccaaaaagactcaattgcagcttgaacatctgctgctggatcttcaaatgatcctgaacggaatcaataactacaagaacccaaagctgacccgcatgcttacctttaagttctatatgcctaaaaaggcgacggaacttaagcacctgcagtgcctggaagaagagcttaagccacttgaagaagtgttgaacctcgcccagtccaaaaactttcacctcaggccgcgtgatctgatcagcaacatcaatgtcatagtgcttgaactcaagggctccgaaaccaccttcatgtgtgagtacgccgacgaaaccgcaacgattgtggagtttctgaataggtggattactttctgccaatcgatcatttcgacgcttact

SEQ ID NO: 12995 - DNA, 459 bp, Artificial Sequence
  derived and/or modified sequence
atgtaccgaatgcagctgctgtcctgcattgccttgtccctcgcgctcgtgacgaattctgcccctacatccagcagtacgaagaagacgcagctgcagttagagcatttgctgctggacctccagatgattctgaatggaataaataactacaagaatccaaaattaacacgaatgctcacattcaagttctatatgcccaaaaaggctactgaattaaaacaccttcaatgtctagaagaagagctaaaaccgctggaagaagtcttgaacttggcacagtcaaagaattttcatctgaggcctcgcgacttgatcagtaacattaacgttatcgtcttagaattaaagggttctgagacgacattcatgtgtgagtacgccgatgaaacagctacgattgtagaattcttgaaccgttggattacattctgtcagtccattatctcaactttgacg

SEQ ID NO: 12996 - DNA, 459 bp, Artificial Sequence
  derived and/or modified sequence
atgtataggatgcagctcctctcatgcattgctttgagcctggccctggtcacaaactcagcacccacttcatctagcaccaagaaaactcagctgcagttggaacacctgctgctggaccttcagatgattctcaatggaatcaataattataagaaccctaagctgacccgcatgttgacattcaaattctatatgcctaagaaggccaccgaattgaagcacctgcagtgcttggaagaggaactgaaacctttggaagaggtgctcaacttggctcagtccaagaactttcatttgagaccacgtgatcttatctcaaacattaacgtgattgttctggaactcaaaggctctgaaactaccttcatgtgcgaatacgctgacgagacagctactattgtagagtttctcaataggtggataaccttctgccagagcattatatccaccctgacc

SEQ ID NO: 12997 - DNA, 459 bp, Artificial Sequence
  derived and/or modified sequence
atgtatcggatgcagctgttgtcctgcatcgctctcagtctggccctggtcaccaacagtgcacctacatcaagctctacaaaaaagacacagttgcagttggagcacctgctacttgacctgcaaatgattctcaatggaattaacaattacaagaatccgaagctcacccgaatgctgacctttaaattttacatgccgaagaaggctactgagttaaaacacctgcagtgtcttgaggaggagttgaaaccactagaggaagttctgaacctggctcagagcaagaattttcacctgaggccgcgagacctgatctcaaacatcaatgtgatcgtgctcgagctcaaaggctcagagactacattcatgtgcgagtatgcagacgagaccgccactatcgtggagttcctaaatcgctggatcacattttgccagagcattatcagcactctaact

SEQ ID NO: 12998 - DNA, 459 bp, Artificial Sequence
  derived and/or modified sequence
atgtataggatgcagcttttgtcttgcatcgcactgagcctggcattagttacaaactccgccccaacaagctcaagcaccaagaaaactcaactccagctggagcacctgctgcttgaccttcagatgatcctcaatggaattaacaactacaaaaaccctaagctgaccagaatgcttacattcaagttctatatgccaaaaaaggctaccgagctgaagcacctccaatgtctggaagaagaactgaagcctttggaagaagtgttgaatttggcccagagcaagaatttccacttacggccccgggacctgatatcaaatatcaatgttatcgtattggaactgaaaggctccgagacgacattcatgtgcgagtacgccgatgagactgctactatagtggagttcctcaaccgctggataacattttgtcaaagtataattagtacactcacg

SEQ ID NO: 12999 - DNA, 459 bp, Artificial Sequence
  derived and/or modified sequence
atgtatcgcatgcagctgctgagctgtatagccctctccctggccctggtgactaacagcgctcctacctcgagctctactaaaaagactcaattgcagttagaacatctgctcctggacctccagatgattctgaatggcataaataactacaagaatcctaagctgacccgtatgcttacgttcaagttctatatgcctaagaaggccacggaacttaagcacttgcagtgtctagaagaggagctgaaaccgctagaggaggtgctcaatctggcccaaagcaagaattttcatctgcgtccgcgagatctcatttctaatattaatgtgattgttctggagctcaagggatccgagacaacctttatgtgtgagtacgctgatgagaccgccacgatcgtggagttcctgaaccgttggataacgttctgtcagagcatcatctctacacttacc

SEQ ID NO: 13000 - DNA, 459 bp, Artificial Sequence
  derived and/or modified sequence
atgtacaggatgcaattgcttagctgcatagccctttcgcttgcactggtgactaattcggcgcccacctcttcgtccactaagaaaactcagctgcaactggagcacttgctccttgaccttcagatgattctgaatggtattaacaactacaagaatcctaaacttactagaatgctcacttttaagttttacatgccgaaaaaggcaactgaacttaaacatctgcaatgcctggaggaagagttgaagcctctcgaagaggtgctcaacctggcacagagcaagaacttccatcttagaccccgtgatctgatatcaaacatcaacgtcattgtgctggagcttaaagggtccgagactactttcatgtgtgaatacgcagatgaaaccgcaaccattgtggaatttcttaaccggtggattactttctgccaatcgatcatctccactctgacc

SEQ ID NO: 13001 - DNA, 459 bp, Artificial Sequence
  derived and/or modified sequence
atgtacaggatgcagcttcttagttgtatcgccctttccttggcccttgttactaatagtgccccgacgagctcctcaacaaagaaaacacagttgcaactggagcacctgttgctcgatttgcaaatgatcttaaacggcatcaacaactacaagaaccccaaactcacgagaatgcttacatttaagttctacatgccaaagaaagccaccgaactgaaacaccttcaatgtcttgaagaagagctaaagcctctcgaagaagtccttaaccttgcgcagtctaagaactttcatctccgaccgagagaccttatcagtaatataaacgtaattgttttggaactaaagggaagcgaaacaacgttcatgtgtgaatacgccgacgaaaccgctaccatagtggaattcttaaatcggtggatcacattctgccaaagtatcattagcacgctcact

SEQ ID NO: 13002 - DNA, 459 bp, Artificial Sequence
  derived and/or modified sequence
atgtatcggatgcaactcttgagctgtatagcactgtcactggccttggtaacaaatagtgcccccacgtcctcttctaccaagaaaacccagctccagctggagcatcttcttctagatttgcaaatgatactgaatggcattaataattacaagaatcctaaactaacccggatgcttacctttaagttctacatgccaaagaaagccaccgagctgaagcatctccagtgtttggaggaggaactgaagccactggaagaggttctgaatttggctcagagtaaaaactttcatctcaggcctagggacttaatctcaaatatcaacgtgatcgtgctggaactcaaggggagcgagaccacgtttatgtgcgaatacgcagacgagacggcaaccatcgtcgagttcctgaatagatggatcaccttctgtcagtcgattatctccactctgacg

SEQ ID NO: 13003 - DNA, 459 bp, Artificial Sequence
  derived and/or modified sequence
atgtaccggatgcagttgctgtcctgtatcgccctgtctctcgcactcgtaactaactctgctccaaccagcagcagtacgaagaagacccagctgcaactagaacacctcctcctcgacctgcagatgattctcaacggcatcaacaattacaaaaatccaaagctcaccaggatgttgaccttcaaattctacatgcccaaaaaggccaccgaattgaagcacctccagtgtttagaggaggagttgaagcccctggaggaagtcctcaacctggcccagtccaagaatttccacctgcgtcctagagatctgatcagcaatatcaatgtgatcgtgctggaacttaagggctctgagaccacctttatgtgcgagtatgcggacgaaaccgccacaattgtggagttcctgaacaggtggatcactttttgtcaaagtataataagcactttaaca

SEQ ID NO: 13004 - DNA, 459 bp, Artificial Sequence
  derived and/or modified sequence
atgtaccgaatgcaacttcttagctgtattgccctatcattggctctcgttactaactccgcacccacttccagtagcaccaaaaaaactcagctccagctggaacacctattgttggatttgcaaatgatcctgaatgggattaacaattacaaaaaccctaagctgactcgaatgctgaccttcaagttctacatgcctaaaaaagctacagagctgaaacacctgcagtgcttggaggaggaattgaagccgctcgaggaggtccttaatctcgctcaatcaaaaaattttcacttgcgcccgcgagatctgatcagtaatattaatgtaatagtgcttgagttgaagggctctgagactacctttatgtgcgagtatgccgatgagactgcgacgatcgtggagttcctcaataggtggataacattctgtcagagcataatcagcacactgacc

SEQ ID NO: 13005 - DNA, 459 bp, Artificial Sequence
  derived and/or modified sequence
atgtaccgaatgcagctgctcagctgtattgcactctcgctcgctctggttactaacagcgcccctacctcgagctcgaccaaaaagactcagcttcagcttgaacatctgttgcttgacctgcaaatgattcttaatggtattaacaattacaaaaacccgaaacttactaggatgctgactttcaagttttacatgcccaagaaggcgaccgagcttaagcacctccaatgtcttgaagaagaactgaagccactggaggaagtgcttaacttggcgcaatccaagaactttcatctcagaccacgagatttgatctcgaacattaacgtgattgtgctggaactgaaagggtccgaaaccacgttcatgtgcgagtacgccgatgaaactgcaactattgtggaatttcttaaccgctggatcacgttctgtcaatcgataatcagcactttgacc

SEQ ID NO: 13006 - DNA, 459 bp, Artificial Sequence
  derived and/or modified sequence
atgtacaggatgcagctgttgagctgtattgctttgtctttagctttggtaacgaattccgccccaaccagcagctcgaccaagaaaacccaactgcagttggaacacctgctgcttgatctccagatgattttgaatggcatcaacaattacaaaaaccccaagcttacaaggatgctcacatttaagttttatatgcctaagaaggctacagaactgaagcatctgcagtgcttagaagaggagcttaaacctctagaggaggttctcaacctggctcagtctaaaaactttcacctgaggccaagagaccttatttcaaatatcaacgtgatagttctggagctgaaggggtcagagaccactttcatgtgcgagtacgccgacgagactgccaccattgtggaattcctgaaccggtggattacattctgtcagtcgattatcagtactctgaca

SEQ ID NO: 13007 - DNA, 459 bp, Artificial Sequence
  derived and/or modified sequence
atgtatcgaatgcagctactctcctgcattgctctgagcctggctctcgtgactaactccgcccccacgagcagttccactaagaaaacgcaactgcagctcgagcatcttttgctggatttgcaaatgattctaaacggcatcaataattacaagaatcccaaactgacccggatgctaaccttcaagttttacatgccaaaaaaagccaccgagttaaaacacttacaatgcttggaagaagaattgaagcctctggaagaggtgctgaacttggcccaaagcaaaaattttcatctgcggcctagggacctgatctcaaacatcaacgtcattgtgttggaactgaaaggaagcgagaccacatttatgtgcgagtatgccgatgagactgcaaccatcgtggaattcctgaatcggtggatcacattctgtcagtccattatctctaccttaacc

SEQ ID NO: 13008 - DNA, 459 bp, Artificial Sequence
  derived and/or modified sequence
atgtatagaatgcagctgctgtcttgcatcgccctaagcctggcactggtgaccaattctgccccaacatctagctctaccaaaaaaacccagctgcagctggagcaccttctcctcgatttgcagatgatattaaatggaatcaataattacaaaaatcccaagctgacaagaatgctgaccttcaaattttacatgcctaaaaaagcaaccgagctaaaacacctgcaatgtttggaagaggaattgaagccacttgaagaggtgttaaacctggcacaatccaaaaactttcatttacggccccgggatttaattagcaatatcaacgtcattgtgctggagctgaagggcagtgaaacaaccttcatgtgtgaatacgcagatgagactgctactatcgttgaatttctgaatcgctggataaccttctgtcagtccattattagcacattaaca

SEQ ID NO: 13009 - DNA, 459 bp, Artificial Sequence
  derived and/or modified sequence
atgtaccgcatgcaattgcttagctgcattgctttgtcgctcgcgcttgtgaccaactcagcccctaccagctccagtaccaaaaagacccaactgcaattggaacacctgctcctggacctccagatgattctgaacggaatcaacaactacaagaatccgaaattgacgagaatgctcacgttcaaattctacatgccgaagaaagcaaccgaactcaaacatcttcagtgtctcgaagaagagctcaagccgctggaggaggtcctgaacttggcgcagtcaaagaacttccacctgaggccccgtgatctgataagcaatatcaacgtcatcgtgcttgagttgaaagggtcggaaacgactttcatgtgcgagtatgccgacgaaactgccaccatcgtggaatttctcaatcgctggatcactttttgccagtcaatcatctccactctgacc

SEQ ID NO: 13010 - DNA, 459 bp, Artificial Sequence
  derived and/or modified sequence
atgtaccgtatgcagctgctgagttgcatagctctctcccttgcgttggtcaccaattcagctcctaccagctccagtacaaagaagacccagctccagctggagcatttgttgctggatctgcaaatgatcctcaacgggatcaacaactataagaatcccaaactaacacgaatgctgaccttcaagttctatatgcccaaaaaggcaaccgagctgaagcacttgcagtgcctggaggaggaactgaaaccactggaggaagtgctcaacctggcccaaagcaagaacttccacctacggccgagggatctgatatcaaacatcaacgtcatcgtgctggagctgaaaggttccgagacaacatttatgtgcgaatatgcagacgagaccgccacaattgttgagtttctgaatcgctggatcaccttctgccaatccatcataagcactctgacc

SEQ ID NO: 13011 - DNA, 459 bp, Artificial Sequence
  derived and/or modified sequence
atgtaccgaatgcagcttctgagctgcattgcactgtcactcgcgctggtcaccaacagcgcacctacctcgtcatcgactaagaaaactcaacttcaacttgaacatctgctgctcgatctccaaatgatacttaacggcattaacaactacaagaacccaaagctgactcggatgctgacctttaagttctacatgccaaagaaggcgactgagcttaagcacctgcagtgtcttgaggaggaactcaagcctttggaggaagtgctgaaccttgcacaatcgaagaactttcatctccggccaagggaccttatatcgaacatcaatgtgatcgtcctcgaattgaagggatccgaaaccaccttcatgtgtgaatacgccgatgaaaccgctaccattgtggagtttttgaacagatggattaccttttgtcagtccatcattagcacccttacc

SEQ ID NO: 13012 - DNA, 459 bp, Artificial Sequence
  derived and/or modified sequence
atgtaccgcatgcagctgctgtcgtgtattgcgctttccttggcgcttgtcactaattccgcccctacgtcctcctcgacgaaaaagactcaactccaactggagcatcttctgcttgatctccaaatgatccttaacggaatcaataactataagaacccaaaacttaccagaatgcttaccttcaagttttacatgcctaaaaaggcaactgagcttaagcatcttcagtgtcttgaagaggaactgaaaccactcgaagaagttctgaacttggcacagtcaaagaactttcatttgcgcccacgggatctcatttcgaacattaacgtgatcgtgcttgaactgaaggggtctgagactacgtttatgtgcgaatacgcggacgaaacggcaactattgtggaatttctgaatagatggataactttttgtcaaagcatcatttcgaccttgact

SEQ ID NO: 13013 - DNA, 459 bp, Artificial Sequence
  derived and/or modified sequence
atgtataggatgcagctcctgtcgtgtatcgcattgtctctggcgttagtaaccaattccgcccccactagctcctccaccaaaaagacccagctccaacttgaacaccttctgcttgacctgcaaatgatcctgaatgggataaacaattacaaaaacccaaaactaactaggatgttgacctttaagttctacatgcctaagaaggctactgaactcaaacacctgcagtgcctggaggaggaactcaagccactcgaggaagtgctcaacctagcacagtcaaaaaatttccatcttcggccacgtgacctgatctcaaacataaacgtaatcgtgctggaactcaaaggttctgagaccacttttatgtgcgaatacgctgatgaaactgctactattgtagagtttttaaaccgatggatcaccttttgccagtctattatatccaccctgacc

SEQ ID NO: 13014 - DNA, 459 bp, Artificial Sequence
  derived and/or modified sequence
atgtaccggatgcagttgctcagctgcatcgcactgtctctggcactggtgaccaacagtgcccccacgtcgagcagtactaagaagactcagctgcagttagagcaccttttactggatcttcaaatgattcttaatggaatcaataactacaaaaaccctaagctgacgcgcatgctgacttttaagttctacatgcctaaaaaggccaccgaactgaagcatttgcagtgtctggaggaggagctgaagcctttagaggaggtgctgaacctggcccagagcaaaaattttcatctacgcccccgcgatctgataagcaatattaatgtgatcgtgctggagttgaagggcagcgagaccacctttatgtgtgagtacgcggatgagacggcaaccattgttgagttcctgaatcggtggataaccttttgccaatcgatcatatctactctaacc

SEQ ID NO: 13015 - DNA, 459 bp, Artificial Sequence
  derived and/or modified sequence
atgtacagaatgcagctgctgtcttgcattgccctgagcctcgctctggtcaccaatagcgcccccacatcctcaagtacaaagaaaacacaactccagctggaacacctgctgctggatcttcagatgatacttaacgggatcaacaactataagaatcctaaacttacccggatgttgacatttaagttttacatgccaaagaaggctacagaactgaaacacctgcagtgcctggaggaagagttgaagccactggaggaggttctgaacttggcccagagcaagaatttccacctgcgacccagagacctcatttcaaacatcaatgtcattgtcctggagctgaagggcagtgagacaacgttcatgtgcgagtatgcagatgagaccgccaccatcgtggagttcctcaataggtggattaccttctgccagagtattataagcacattgacc

SEQ ID NO: 13016 - DNA, 459 bp, Artificial Sequence
  derived and/or modified sequence
atgtaccgcatgcagttgctttcttgtatcgcgctgtctctcgccctggtgacaaatagcgcccctacatcaagcagcactaaaaagacgcaattacaattggagcacttactgttggacctgcagatgatcctgaacggcataaataactacaaaaaccctaagctgacccgtatgttaaccttcaaattttacatgcctaagaaagctacagaactgaaacacttgcagtgccttgaagaagaactcaagccgttagaagaagtgttaaacttggcccaaagcaagaacttccacttgaggccacgcgacttaataagtaacattaatgtgattgtgctggagctgaagggctccgagactactttcatgtgcgagtatgctgacgaaactgctaccatagtggagttcctcaaccgctggatcaccttttgccaatccatcataagcactcttaca

SEQ ID NO: 13017 - DNA, 459 bp, Artificial Sequence
  derived and/or modified sequence
atgtaccgaatgcaactgctctcctgcatcgctctcagtctagcccttgtgacaaactccgcaccgacttcttcaagtaccaaaaagacacagcttcagctggagcaccttttacttgatctccagatgatccttaacggaataaacaactataaaaatcctaagctgacgcggatgctgacctttaagttttatatgccaaagaaagcaacagaacttaaacacctgcagtgcctagaagaggagctgaagccactggaagaggtcttaaacctggctcagtccaagaactttcatctgcgtcccagggatctcatctcaaatattaatgttatcgtgctagagttgaaagggtctgagactacatttatgtgtgagtatgctgacgagaccgcaacgatagttgaattcttgaatcgatggattactttttgccaaagcatcatctccacactgacg

SEQ ID NO: 13018 - DNA, 459 bp, Artificial Sequence
  derived and/or modified sequence
atgtaccgcatgcagttgttgtcgtgcattgcactctcgctggcgctggtgaccaactctgccccgacgtcgtcatcaaccaaaaagactcagctgcagcttgaacatctcctgctggatctgcagatgattcttaacggaatcaacaactacaagaacccgaaactgactcggatgctgactttcaaattctatatgccgaagaaggctaccgaactcaagcacctgcaatgcctcgaagaggaactcaaaccactggaggaggtcctgaacttggcgcagagtaagaactttcatctgcggccgcgcgatctcatctcgaatatcaacgtgattgtgctcgaactcaaagggtcagaaaccaccttcatgtgtgaatacgccgacgagactgcaactatcgtggagttcctgaatcgctggatcaccttctgccagtcaattatctccaccctgacg

SEQ ID NO: 13019 - DNA, 459 bp, Artificial Sequence
  derived and/or modified sequence
atgtatcggatgcagctgcttagctgcatcgctctgagcttggctctcgtgaccaactctgcccctacaagctctagcacaaagaaaactcagctccaactggaacacttgctgctcgacctgcagatgattctcaatgggattaacaactacaagaacccaaagctgactcgcatgctcaccttcaaattttacatgccaaagaaagccacggagctgaaacatctccagtgtctggaagaggaactgaaaccgttggaagaggtgcttaaccttgcccagtctaagaactttcacctccggcctcgcgatctgatcagtaacattaacgtgattgtgctggagttgaagggcagcgagactactttcatgtgtgaatatgccgatgaaaccgccaccattgtggaattcctcaatcgctggatcactttttgtcagagcattatttccaccctgaca

SEQ ID NO: 13020 - DNA, 459 bp, Artificial Sequence
  derived and/or modified sequence
atgtacagaatgcagctgttgtcttgcatagcactcagtctggctctggtcactaattccgcacccacgtcttcctccacgaagaagacacagctgcagctagagcacctgctgcttgatctgcaaatgatcttaaacgggattaacaattataaaaaccctaagttaaccaggatgcttacatttaagttttacatgccaaagaaggctaccgaattaaagcacctccaatgcctggaagaagagttgaagcctcttgaggaggtgctgaacttggctcagagcaagaactttcacctgcgacctcgtgacttgattagtaacattaatgtcattgtgcttgagcttaagggcagtgagaccacattcatgtgtgagtacgctgatgagacggccactatcgtggaattcctgaatcgatggataaccttctgtcaaagtataatctccacactcact

SEQ ID NO: 13021 - DNA, 459 bp, Artificial Sequence
  derived and/or modified sequence
atgtaccggatgcagctcctgagctgtattgccctgagcctcgccctggtgaccaattctgccccaacttcaagctctacaaaaaaaacacagctgcagttggagcacttactcctggatctgcagatgatcttgaacggaatcaataattacaaaaaccctaagttaactcgaatgctgacatttaagttctacatgccaaaaaaagcaactgaactgaagcatctccagtgtcttgaagaagagctgaagccactcgaggaagtcctgaacttggcacagagcaaaaattttcacctgagaccccgcgatcttatatcaaacattaatgtgatcgtgttagaactgaaaggaagtgagaccacattcatgtgcgagtatgccgatgagaccgctaccattgttgagttcctgaatcggtggattacgttctgccagtccattatatccaccctgact

SEQ ID NO: 13022 - DNA, 459 bp, Artificial Sequence
  derived and/or modified sequence
atgtatcgtatgcaattactgtcttgtatcgctctttctcttgctctagtgacaaattctgcacccacatccagctcaaccaagaaaacgcaactgcaactagaacatctgctcctggaccttcagatgattcttaacggcattaataattataaaaaccccaagctgacccggatgcttaccttcaagttttacatgcccaaaaaggctacagagttgaagcacctacagtgccttgaagaggaactaaagcctctggaagaggtactgaatctggcccaatctaagaatttccatctgaggcctagggatctgattagtaacatcaatgtgattgtactggagttaaaaggctccgagaccacctttatgtgcgagtacgcagacgaaaccgcaacaattgtcgagttcctgaatcgatggatcactttctgtcaatccatcatctccacattgaca

SEQ ID NO: 13023 - DNA, 459 bp, Artificial Sequence
  derived and/or modified sequence
atgtatagaatgcagctgctctcttgcattgcactcagtttggccttagtgactaactcagccccaacttcttccagtacaaagaagactcagttacagcttgaacatttgctgctggatctacagatgattttgaatggcattaacaattataagaacccgaagctaacgcgcatgctgacttttaagttctacatgcctaagaaggccaccgaactgaagcacctccagtgcctggaggaggagctcaagccgttagaggaggtcctcaacctggcccagagcaagaacttccacctgagaccaagggacctaataagcaacataaacgttatcgtgcttgaattgaaagggagcgaaacaacgtttatgtgcgagtacgctgatgaaactgctacaatcgtcgaattcctcaatcgttggataaccttctgccagagcataatatccacattgaca

SEQ ID NO: 13024 - DNA, 459 bp, Artificial Sequence
  derived and/or modified sequence
atgtacagaatgcagcttctctcctgtatcgcactgtcactagccctcgtgaccaacagcgcacctaccagctcctctactaagaaaactcagcttcagctggagcatcttctgctggacctgcaaatgattttgaatggcattaacaattacaagaaccccaagctgaccaggatgctcacattcaagttctatatgccaaaaaaagccacggagttgaagcacctgcagtgtctcgaagaagagttgaagcccctggaggaggttctgaatctggcccagtctaagaactttcacctgcggcctagggatctgatatccaatatcaacgtgattgtgctggagcttaaggggtctgaaaccactttcatgtgcgagtatgcagatgagaccgccactatcgtcgagttcctgaatcgctggatcacgttctgccaatctatcatctcaacgcttact

SEQ ID NO: 13025 - DNA, 459 bp, Artificial Sequence
  derived and/or modified sequence
atgtacaggatgcaacttctgtcgtgtattgcacttagcctcgccctcgtgacgaattcggcccccacttcatcctctactaaaaagacccaactgcaacttgaacaccttttgcttgaccttcagatgatcctgaatggaatcaacaactacaaaaatccgaaactgactagaatgctcaccttcaagttttacatgcccaagaaggctaccgaactgaagcatttgcaatgtctggaagaggaattgaagcctctggaagaagtgctgaacctggcccagagcaagaacttccatttgaggcctcgagatctcatatcaaacattaatgtcattgtgttggagcttaaagggtccgaaactacttttatgtgcgagtatgcagatgaaacggcgacgattgtcgaatttctgaaccgttggataaccttttgtcagtcgatcattagcaccttgacc

SEQ ID NO: 13026 - DNA, 459 bp, Artificial Sequence
  derived and/or modified sequence
atgtacagaatgcaattgttgtcatgcattgccctttcgctggcccttgtgactaattcggcgccaacttccagttcgaccaagaaaacccagctccaactggagcacctgttgctggacctgcagatgatcctgaacggaatcaacaattacaagaacccgaagctcaccaggatgttgacgttcaagttctatatgcccaagaaggccacggaactgaagcatctccagtgcctcgaagaggagctgaaaccccttgaagaagtgctgaatctcgctcagtcaaagaactttcatctcagaccacgggatctgatctccaacattaacgtcatcgttttggaattgaaaggttcggaaaccaccttcatgtgtgagtacgcggacgaaactgcaactatcgtggagttccttaaccggtggatcacgttctgccagtccatcatttcgaccctgact

SEQ ID NO: 13027 - DNA, 459 bp, Artificial Sequence
  derived and/or modified sequence
atgtacagaatgcagctcctgtcatgcattgcgctttcacttgctctggttactaatagcgcgcctacctcttcatcaactaaaaagacccaactgcaactggagcatctgcttctcgatttgcaaatgatattgaatggcataaacaactataagaaccctaaactgaccaggatgttgacgtttaagttttacatgccgaagaaggcaactgaactcaaacaccttcaatgcctcgaagaggagcttaagcctctcgaagaagtgcttaacctcgcacagtcgaaaaacttccatttgcggccgagagatctgataagtaacattaacgtgatcgtgctggaacttaagggttccgaaaccacttttatgtgtgagtacgcagacgagactgcaactatcgtggagttccttaaccgctggatcactttttgtcagagcattatcagcactcttacg

SEQ ID NO: 13028 - DNA, 459 bp, Artificial Sequence
  derived and/or modified sequence
atgtaccgcatgcaattgctttcctgtatagcactctctttggcattggtgacgaatagcgcccctactagctctagtactaaaaagacgcaacttcaacttgaacatctgctgcttgatctccagatgattctgaatggaatcaacaactacaagaatccaaagctgaccagaatgcttacgtttaagttctacatgcccaaaaaggccaccgaactgaaacatcttcaatgcctcgaagaggaacttaagcctctcgaagaggtgcttaacttggcacagtcaaagaattttcacctgcgaccaagggatcttatttcgaacatcaacgtgattgtcttggagcttaagggttccgaaaccaccttcatgtgtgagtatgctgacgaaaccgcaaccattgtggagtttctcaaccgctggattactttttgtcagtcaataatcagcacgctgact

SEQ ID NO: 13029 - DNA, 459 bp, Artificial Sequence
  derived and/or modified sequence
atgtaccggatgcagcttctgtcatgtattgctctttcccttgcccttgtgactaattcagcacctacgtcgtcctcaactaagaaaactcaactgcagctggagcatcttctgctcgaccttcagatgattcttaacggtattaacaattacaagaaccctaaattgactagaatgctcaccttcaagttctatatgcccaagaaagcgactgaactgaagcaccttcaatgccttgaggaagagctgaagccattggaagaagtattgaatctggcccaaagcaagaactttcatcttcggcccagggatctcatctccaacattaacgttatcgtccttgaactcaagggatcggaaaccaccttcatgtgtgaatacgcagatgaaaccgcaaccatagtggagttcttgaatagatggataacgttttgccagtctattatctcgactcttacc

SEQ ID NO: 13030 - DNA, 459 bp, Artificial Sequence
  derived and/or modified sequence
atgtatcgcatgcagctgctttcctgtatcgcgctgtcgcttgcactggtgacgaattcggccccgacttcgtcctcgactaagaaaactcaattgcagctggaacatctcctgcttgacctgcaaatgatcctgaacggaatcaacaattacaagaaccccaagctgacccgcatgcttaccttcaagttctacatgccaaagaaagccactgagttgaaacatctgcagtgcctcgaggaagagctgaaacctttggaggaagtgcttaacctcgcacagtcaaaaaacttccacctgaggccgagagatctgatctcgaatatcaacgtgatcgtccttgagcttaagggctccgaaaccacctttatgtgcgagtacgctgatgaaaccgcgactatagtggagttcctgaaccgatggatcactttctgccagtcgatcattagcaccctgacc

SEQ ID NO: 13031 - DNA, 459 bp, Artificial Sequence
  derived and/or modified sequence
atgtatagaatgcaactgctgtcatgcatcgccctttctctcgctctcgtcacaaatagcgcacctacatctagtagtaccaaaaaaacccagctgcaacttgagcacttgctgttggacctccaaatgattctgaacggaattaataactacaagaatcccaaactcactcggatgctgacatttaaattttacatgcctaagaaagctaccgagcttaaacatctgcagtgtctcgaggaggagttgaaaccacttgaagaagtgttgaatctggcacaatctaaaaacttccatctacggccaagggacctcatcagtaacattaatgtcatcgtgcttgagctgaaaggttccgagaccacttttatgtgcgagtacgcagatgaaaccgccacaatcgtggagtttcttaacagatggatcacgttctgccagagcatcatttcaaccctgacc

SEQ ID NO: 13032 - DNA, 459 bp, Artificial Sequence
  derived and/or modified sequence
atgtaccgtatgcaactccttagctgcatagctttatctctggctctggttacgaactcagcccccacctcgagcagcacgaaaaagacacagctacaattagagcatttgctgcttgatctgcaaatgatcttaaacggaattaacaattacaagaatcccaaactcacacggatgctgactttcaagttttatatgcctaagaaagctactgaactcaaacaccttcagtgcttggaggaagagctcaagcccctcgaggaagtcctaaaccttgcacagtccaaaaactttcacctgcgccccagggacctgatctcgaatatcaatgtgattgtcttagagctgaagggcagcgaaacaacctttatgtgtgaatatgctgacgaaactgccactattgtggaatttctgaaccgttggataaccttttgccagagcattatatctactctgacc

SEQ ID NO: 13033 - DNA, 459 bp, Artificial Sequence
  derived and/or modified sequence
atgtatcgcatgcaactgctctcgtgcatcgcgctctcgctggccctggtgactaattccgctccgacttcgtctagcaccaagaaaacccagctccagttggagcatctgcttctggatctccaaatgatcctcaacggaataaacaactacaaaaatccgaagctcactcgcatgctcaccttcaagttctacatgccaaagaaagcaaccgaactcaagcacctgcaatgcctggaggaagaactgaagccgctggaagaagtccttaaccttgcacagtccaaaaacttccatctcaggcctcgcgacctcatctccaacatcaatgtcatcgtcctggagctgaagggttccgagacgactttcatgtgtgaatacgcggacgagacggctaccattgtggagttccttaaccgctggatcaccttctgccaatcaatcatctccactctgacc

SEQ ID NO: 13034 - DNA, 459 bp, Artificial Sequence
  derived and/or modified sequence
atgtaccgtatgcagctgctgagctgtatcgctttatccctggcattagtgaccaatagcgcgcccaccagtagctctacgaaaaagacccagctgcagctggaacatctgctgttggatctccagatgatactgaatgggattaataactacaaaaatccgaagttgacccgcatgttaacttttaagttctatatgccgaaaaaggccacggagctcaagcacctccagtgcctggaggaggaactgaaaccgttggaggaagtacttaatctcgctcaaagcaaaaacttccacctcagacctagggatctcatctctaatattaatgttattgtgctcgaactgaagggaagtgagaccacctttatgtgcgaatatgctgacgaaaccgcgacgatcgtggaatttctgaatcgctggattactttttgtcagtccataatatcaaccttaaca

SEQ ID NO: 13035 - DNA, 459 bp, Artificial Sequence
  derived and/or modified sequence
atgtatcgtatgcagctcctaagctgcatagctctttcattagccttggtgacaaatagcgcccctacgtcctcctcaacaaaaaagacccaactacagctggagcatctactgttagatttgcagatgatacttaatggaatcaataattacaaaaatcccaagctcacccgtatgttaacattcaagttctatatgcccaaaaaagctaccgaattaaagcaccttcaatgtctagaagaggaactcaagcccttggaagaagttcttaacctggctcaatctaaaaactttcacttaaggccgagagatctaatctctaatataaatgtgattgtgttagagctaaaggggagtgagacaacttttatgtgtgagtatgctgacgaaactgcaaccattgtcgagtttctcaacaggtggatcactttctgccaatcaattatcagcaccttaacc

SEQ ID NO: 13036 - DNA, 459 bp, Artificial Sequence
  derived and/or modified sequence
atgtacaggatgcagctgcttagctgcatcgctctgagtctcgcccttgtaacaaactccgctcccacatcaagcagtaccaagaaaactcagctgcaattggagcacctgctgctcgacctccagatgattttgaacggaattaacaattacaagaatccaaaattaaccaggatgttaacgttcaagttttatatgccaaagaaagctaccgagctgaaacacctgcagtgcttagaggaggaattaaagcctctggaggaagtgctgaacctggcgcaaagcaagaactttcatctaaggccccgagatctaatctcgaacatcaacgtgattgtgctggagttgaaagggtccgaaaccaccttcatgtgcgagtacgccgatgagaccgccaccatcgtcgaattcctgaaccgctggatcaccttttgccagtcaatcatctcaaccctgact

SEQ ID NO: 13037 - DNA, 459 bp, Artificial Sequence
  derived and/or modified sequence
atgtacaggatgcagttactttcctgtatcgctctgtccctggcactggtgaccaattcggccccaactagcagttcaaccaaaaaaactcaactacagctggaacacctgttgcttgacttgcaaatgattctgaatggcatcaataactacaaaaatcccaaattgaccaggatgctgacattcaagttctatatgcccaaaaaggccactgagttgaagcacttgcaatgcctcgaggaagagctgaagcccttggaggaggttctgaatctggcgcagagtaagaatttccacctaaggcctagggatctgatcagcaatattaatgtcatagtgctggaactcaagggatccgaaaccactttcatgtgtgaatatgctgatgagaccgcaactatcgttgagttccttaacagatggatcacattctgtcagagcataattagcacactgacc

SEQ ID NO: 13038 - DNA, 459 bp, Artificial Sequence
  derived and/or modified sequence
atgtaccgaatgcagcttcttagctgcattgccctgagtctggctctggtgacaaactctgccccgacaagtagtagtacaaagaaaacacaactgcagctggagcacctgttactcgacttacagatgattttgaatggcattaacaattacaagaatccaaaattaactagaatgctaacatttaagttttacatgccaaagaaggctactgagctgaagcacctgcagtgcttagaggaggaactgaagccactagaggaggtgttaaacctagcccagtctaaaaattttcacctgaggcctagagatttaatttctaacattaacgtcattgtgctcgaactaaagggctccgagacaacctttatgtgcgaatacgccgatgaaactgctactatcgtggagtttctcaacaggtggatcaccttttgccaatctattatttcaacattgacg

SEQ ID NO: 13039 - DNA, 459 bp, Artificial Sequence
  derived and/or modified sequence
atgtaccgcatgcaacttctgtcgtgtatcgcgctttccctggccctggttaccaactcagcaccaacgtcgagcagcactaagaaaactcaattgcagcttgagcacctccttctggacctgcagatgattcttaatggtataaacaattacaaaaacccaaaactgacgcgcatgttgacctttaagttctacatgccgaagaaggctaccgagcttaaacatcttcagtgcctggaagaggaactgaaacccctggaagaagtcctcaacctcgcccagagcaagaatttccaccttcgccctcgcgatcttatctccaacatcaatgtgattgtgctggaattgaagggctcagaaacgacttttatgtgtgaatatgctgatgagactgcgaccatagtcgaattccttaatagatggatcaccttttgtcaatccattatctccacccttact

SEQ ID NO: 13040 - DNA, 459 bp, Artificial Sequence
  derived and/or modified sequence
atgtaccgaatgcaactcctgtcctgcattgcactgtcccttgcattggtcactaactccgctccgacgtcatcctcaaccaaaaagacccagttgcagttggaacacctcctgctggatctgcaaatgatccttaacggaatcaacaattacaagaacccgaaactgaccagaatgctgaccttcaagttctacatgcctaagaaagccactgagctcaagcatctgcagtgcctggaggaagaacttaagccactcgaggaggtgcttaacctggctcagtcaaaaaacttccatctccgcccaagggacctgatctccaatatcaacgtgattgtgctggagctcaaaggatctgaaacgacgtttatgtgtgaatacgccgatgagactgccaccatcgtggaattcctgaaccgctggatcactttctgtcaatccatcatctcgactctgacc

SEQ ID NO: 13041 - DNA, 459 bp, Artificial Sequence
  derived and/or modified sequence
atgtaccggatgcagctgctgtcttgtatcgccctttcgctggctttggtcaccaactccgcgcccactagctcaagcacgaagaaaacccaacttcaactggaacatctgttgctggatctgcagatgatcctgaatggaatcaataactacaagaacccaaagctcactaggatgctcacttttaagttttacatgccgaaaaaggctaccgaattgaagcacctgcaatgccttgaagaggagctgaaaccgctcgaggaggtcctcaatttggcacagtcgaaaaacttccacctgcgtccacgagatctgatctccaacatcaatgtgatagtgctcgaactgaagggcagtgaaactactttcatgtgcgaatatgccgacgagactgccaccattgtggaattcctgaaccgctggatcacgttctgccagtctatcatttcgaccctgacc

SEQ ID NO: 13042 - DNA, 459 bp, Artificial Sequence
  derived and/or modified sequence
atgtacagaatgcagctcctctcatgtattgctctttctcttgctctggtgaccaacagcgctcctacctcgtcgagcaccaagaaaacgcaattgcagcttgaacatctccttttggatcttcagatgatcctcaatggtattaacaactacaaaaatccgaagttgacgcggatgctgaccttcaagttttacatgcccaagaaagcgaccgagcttaaacacctgcaatgtctcgaagaggaactcaagccccttgaagaggtcctgaacctggcacaaagcaagaactttcacttgaggccacgcgatcttatttccaacattaacgtgatcgtgctggagctgaagggctcagaaacgacgttcatgtgcgaatatgccgacgaaacggcaaccatcgtcgaatttctgaatcgttggattactttctgtcagagcatcatatcgactcttacc

SEQ ID NO: 13043 - DNA, 459 bp, Artificial Sequence
  derived and/or modified sequence
atgtaccgcatgcaactcttgagttgcatcgccttgagcctcgcgctggtgactaactccgcccctacttcgagctccaccaaaaagacccagctccagcttgagcacctcctgcttgacctccagatgatcctgaacggaatcaacaattacaaaaacccgaagttgacgagaatgctgaccttcaagttctacatgccaaagaaagcgaccgaactgaagcatttgcaatgtctcgaggaggaattgaaaccattggaggaagtgcttaatctcgcccagtcgaagaatttccacctcagaccccgcgacctcatctcgaatatcaacgttattgtcctggaattgaagggctccgaaaccacctttatgtgcgaatatgcagatgaaaccgccaccattgtggagtttttgaacaggtggatcaccttctgtcagagcatcatcagcactctcacc

SEQ ID NO: 13044 - DNA, 459 bp, Artificial Sequence
  derived and/or modified sequence
atgtatcggatgcaactgctctcatgcatagctctctcactggcactggtcactaactcagccccgacgtcctcgtctaccaaaaaaacacagctacagctagagcacctactattggacctgcagatgatccttaacggaatcaataactataaaaaccctaaactgacacgtatgctcacattcaaattctatatgcctaaaaaggccaccgagttgaaacatctgcagtgtcttgaggaggaactaaagcctctggaggaggtgctgaatctggcgcaatccaagaattttcacctgcgcccgcgcgacctgatcagcaacataaatgtgattgtgctggagctcaagggatcagagactactttcatgtgcgaatacgccgatgagactgcaacaatagtagaattcctgaaccgatggataaccttctgccaaagtattattagtacactgacg

SEQ ID NO: 13045 - DNA, 459 bp, Artificial Sequence
  derived and/or modified sequence
atgtacaggatgcaacttcttagctgtatcgctctttctcttgcactggtcaccaattccgctccgacgtcgtcctcgactaagaaaactcaactgcaacttgagcaccttcttctcgatcttcaaatgatccttaacgggattaacaactacaagaatccaaagctgacgagaatgctgacctttaagttttacatgcctaagaaggcgactgaactcaagcacctgcaatgtctggaggaagaattgaaaccactcgaagaggttcttaatctggcacaatccaaaaacttccatcttcgcccacgtgatctcatctcgaacataaacgtgattgtgctggagcttaaaggatcagaaaccacctttatgtgcgaatacgccgacgaaaccgccacgattgtggagttcctgaatcgttggatcaccttctgccaaagcattatcagcactctgacg

SEQ ID NO: 13046 - DNA, 459 bp, Artificial Sequence
  derived and/or modified sequence
atgtacaggatgcagctgctttcctgcatcgctctgagcctggccctggtcactaattccgcgccgacctcgtcgtcaactaaaaagactcagctgcaactggaacacttgctcctggatctgcagatgatcctcaacggcattaacaattacaagaacccaaagctcactagaatgttgacgtttaagttctatatgccaaagaaggcaactgagctgaagcacctgcagtgcctcgaggaggaactcaagccgctggaagaagtgttgaatctggcacaatcgaagaacttccatctgcggcctagagatctcatctcaaacatcaacgtgatcgtcctggagctgaagggttcggaaaccacgtttatgtgcgagtatgcagatgaaacggcaaccatcgtggaatttctcaaccggtggatcaccttctgtcagtccatcattagcactctgacc

SEQ ID NO: 13047 - DNA, 459 bp, Artificial Sequence
  derived and/or modified sequence
atgtatcgcatgcagcttctttcctgcattgcattatcgttagcgttggttactaatagcgcaccaacgagcagttccaccaagaaaacccagctccagcttgaacacctcttgttggaccttcaaatgatccttaatgggatcaataattataaaaaccccaaactcacacgaatgctgacgtttaagttttatatgcccaaaaaagcaaccgaacttaaacaccttcagtgcctagaggaggagctcaagcctctggaagaggtgctgaatctggcccagagtaagaactttcatctgagacctagggatttaatctccaacattaatgtgattgtgcttgaactaaagggcagcgagactacctttatgtgtgagtacgctgacgagaccgccacaatcgtggaattcttgaatcgttggatcactttctgtcagagcattattagcacgttgacg

SEQ ID NO: 13048 - DNA, 459 bp, Artificial Sequence
  derived and/or modified sequence
atgtatcgaatgcaattactatcgtgtatagcgttatcgctagcgttagtaacgaattcggcgccgacgtcgtcgtcgacgaaaaaaacgcaactacaactagaacatctattattagatctacaaatgatactaaatggtataaataattataaaaatccgaaactaacgcgtatgctaacgtttaaattttatatgccgaaaaaagcgacggaattaaaacatttacaatgtttagaagaagaattaaaaccgctagaagaagtactaaatttagcgcaatcgaaaaattttcatttacgaccgcgtgatctaatatcgaatataaatgtaatagtactagaattaaaaggttcggaaacgacgtttatgtgtgaatatgcggatgaaacggcgacgatagtagaatttttaaatcgttggataacgttttgtcaatcgataatatcgacgctaacg

SEQ ID NO: 13049 - DNA, 459 bp, Artificial Sequence
  derived and/or modified sequence
atgtacaggatgcaacttctttcgtgcattgcactgtcgctcgctcttgtcacgaattcagcccccacctcgtcgtcaacgaaaaagactcagctgcaactcgagcacttgctgcttgatctgcaaatgatacttaatggaatcaacaactacaagaatcctaaactgacccgaatgctgaccttcaagttctacatgccaaagaaggccactgagctcaagcatctgcagtgcctggaagaagaactgaagccacttgaggaagtcctgaacctggcacaaagcaagaattttcatctgcgccctcgcgatctcatttccaacataaatgttatcgtgcttgagctgaagggcagcgagactacctttatgtgtgaatacgcagatgaaacggcaaccatcgtggagttcctcaacaggtggattacgttttgtcagtctattatctcgaccttgact

SEQ ID NO: 13050 - DNA, 459 bp, Artificial Sequence
  derived and/or modified sequence
atgtacaggatgcaactccttagctgtatagccctttcgcttgccttggtcacgaacagcgcaccgaccagctcctcaactaaaaagacccagcttcaactcgaacatttgcttctggatttgcagatgattcttaacgggatcaataactacaaaaaccctaagctgactagaatgttgacttttaagttttacatgccaaagaaagcgactgaactgaagcacctgcagtgcttggaagaggaactgaagcctctcgaggaagtcctgaaccttgcgcaatcgaagaattttcacctcagaccgcgtgacctcatctcgaacattaatgtgatcgtgctggaactgaagggatccgagactacttttatgtgtgagtatgcagatgaaaccgcaaccatcgtggaattcctcaatcgctggattaccttctgccaatccattatctccaccttgacg

SEQ ID NO: 13051 - DNA, 459 bp, Artificial Sequence
  derived and/or modified sequence
atgtaccgcatgcagttgctcagctgcatcgccctttcactggcactggtgactaactccgcgcctactagctccagcacgaagaaaactcagttgcagctcgaacacctcctcctcgacctccaaatgattctgaacggaattaacaactacaaaaacccaaagctcacgcggatgttgaccttcaagttttacatgccgaaaaaggcaaccgaactgaagcatctgcaatgcttggaagaagaactgaagccgcttgaggaggtgctgaacctggcacagtcgaagaattttcacctgcggccacgtgatctgatctcaaacatcaatgtgatcgtcctcgagctcaagggaagcgaaaccaccttcatgtgcgaatacgcagacgagacggccaccatagttgagtttctgaaccgatggatcactttctgccagtccattatctcgactctgacc

SEQ ID NO: 13052 - DNA, 459 bp, Artificial Sequence
  derived and/or modified sequence
atgtacagaatgcagttgctgtcctgtatcgcattgtcactggctctcgtgaccaacagcgccccgacgtcctcctccaccaaaaagacgcagctgcaattggagcacctcctgcttgacctgcagatgattctgaatgggatcaacaactacaagaatcctaaactgaccagaatgcttaccttcaaattctacatgcccaaaaaggcgactgaactcaagcaccttcagtgtctggaggaagaactcaagccgctggaagaagtgctgaaccttgcgcagtcaaagaactttcacctgcgcccacgggacctcatctcgaacatcaatgtcatcgtcctggaactgaagggatcagagactactttcatgtgcgaatacgccgatgaaactgccaccatcgtggagtttctgaatcggtggatcaccttttgccagtcgattatctcgacccttacg

SEQ ID NO: 13053 - DNA, 459 bp, Artificial Sequence
  derived and/or modified sequence
atgtacagaatgcaattgctttcctgtatagcactctctttggccctggtgaccaactcagcgcctacttcatcctctactaagaagacacagctacaactggagcacctgttgctcgacttgcagatgatcctgaatggcattaacaactacaaaaatcctaaattgacgagaatgctgaccttcaaattctacatgcctaagaaggctacagagttaaaacatttgcagtgccttgaggaggagttaaagcctctggaggaggtgctgaatctggcccagtctaagaactttcacctcagaccgcgtgacctgatttcaaacataaatgtaatagttctggagctgaagggcagtgagaccacattcatgtgtgagtacgcagacgagacagctaccatcgtggagtttctgaaccgttggattaccttttgtcagagcattatatctacactgacg

SEQ ID NO: 13054 - DNA, 459 bp, Artificial Sequence
  derived and/or modified sequence
atgtatcgcatgcaacttctatcttgcatagccctgagtttggccctggtgacaaacagcgccccaacctctagttccactaaaaagacacaactccagttggagcatctcttacttgacctgcagatgattttgaatggtatcaataactacaaaaaccctaaacttacaaggatgctgacctttaaattttatatgcccaagaaggctacggaattaaagcacctgcagtgcctcgaggaggagctgaaacctctcgaggaggtcctgaatctggcccagtctaaaaattttcatctcaggccccgcgacctgatttctaacattaacgtgatcgtgctggagctgaaaggaagcgaaacaaccttcatgtgtgagtatgctgacgaaacagcgacaatagtggagttcctcaacagatggataacattttgtcagtccatcatttctacattgaca

SEQ ID NO: 13055 - DNA, 459 bp, Artificial Sequence
  derived and/or modified sequence
atgtaccgtatgcaactgttgtcttgtattgccctctcccttgctctagtgactaacagcgctcctactagtagctccaccaaaaagacccagctacagttggagcacttactcctggacctccagatgattctgaatggcatcaacaattacaaaaacccaaaactgaccaggatgttgacatttaaattttatatgcccaagaaagcaacggagctgaagcatctgcagtgtttagaggaagagctgaaacctctcgaagaggtgctgaacctggcacagtctaaaaacttccacctacggccgagagatttgattagcaacatcaacgtcatagtgctcgagctaaagggcagtgagactactttcatgtgtgagtatgcagatgagaccgctacaatagttgagttccttaatcggtggataacattctgccaaagcataatctcaacactcaca

SEQ ID NO: 13056 - DNA, 459 bp, Artificial Sequence
  derived and/or modified sequence
atgtaccgtatgcagctcctgtcatgcattgccctgtcgctggccctggttaccaacagcgcgcctaccagctccagcaccaaaaaaacccagctgcagctggagcacttgctcctcgacctgcagatgatcttgaacggtatcaataactacaagaatcccaagttgacgagaatgctgacatttaaattctatatgccaaagaaggcgacggagctgaagcatttgcaatgcttggaggaggagctgaagcctctggaggaggtgctgaacctggcgcaaagcaaaaatttccatctgagacctcgagacttgattagcaacattaatgtcatcgtgctggaactgaagggttccgagacaacgttcatgtgcgagtacgcggatgagaccgcaaccatcgtcgagttcctaaaccgctggatcacgttctgtcagtcaattattagcaccctgacg

SEQ ID NO: 13057 - DNA, 459 bp, Artificial Sequence
  derived and/or modified sequence
atgtacaggatgcagctgctgtcctgtattgccctttcgctcgccctggtcactaattcggctcccacgtcctcctccaccaaaaagactcaattgcaactcgaacatctgctgctggacctccagatgatcttgaatggcatcaataactacaagaacccaaagctgacccggatgcttactttcaaattctacatgccaaagaaggccaccgagctgaaacacctccaatgcttggaggaggaactcaagcctctggaggaggtgcttaacctcgcccagtccaagaacttccacctcagacctcgcgatctgatttcaaacatcaacgtgatcgtgctcgaacttaaaggttctgaaaccacgtttatgtgcgaatacgcagacgaaaccgcgaccattgttgagtttcttaatcgctggatcactttctgccagtcaatcatctccacgctgact

SEQ ID NO: 13058 - DNA, 459 bp, Artificial Sequence
  derived and/or modified sequence
atgtaccggatgcagttgctgagctgcatcgcactctccctcgcactggtgactaattcagctcctacttcgtcatcaaccaagaaaacccaactgcagctcgaacacctcctgctggatctgcagatgatcctgaacggcatcaacaattacaaaaaccctaagctgaccaggatgctgacctttaagttctacatgccgaagaaggcgacggaactcaagcatcttcagtgcctggaggaagagctcaaaccacttgaagaagtcttgaacctcgcccaatcgaaaaacttccacctgcgcccgcgagacttgattagcaacatcaatgtgattgtgcttgaactgaaggggtcggaaacgacttttatgtgtgaatacgccgatgaaaccgccaccatcgtcgagtttctgaaccggtggatcaccttctgccagtcgatcatctcgactctcacc

SEQ ID NO: 13059 - DNA, 459 bp, Artificial Sequence
  derived and/or modified sequence
atgtacagaatgcaactgctgtcctgcattgctttgagtttagcacttgtgacgaattcggcgccgacctcgagcagcaccaagaagacccagctccaacttgaacatcttctgctggacctacagatgatcctgaatgggatcaataattacaagaatcccaaattgacccgcatgctgacgtttaaattctacatgccaaagaaagccacagagctgaagcatctccagtgcttagaggaggagcttaaaccgttggaagaagtgctgaatctggcacagtccaagaattttcacctgagacctcgggatctaattagcaacataaacgtgatagttttggagttgaagggcagtgaaaccacgtttatgtgcgagtatgccgacgagacagcgaccatcgtcgagtttctgaacagatggattactttctgccagagtatcatatccacactgact

SEQ ID NO: 13060 - DNA, 459 bp, Artificial Sequence
  derived and/or modified sequence
atgtaccgtatgcaattgctctcttgcatcgctttgtcccttgcactggtgactaacagcgctcctacctcatcctcaaccaaaaagactcagctgcagcttgaacatctccttctggatctccagatgattttgaacggtattaacaactacaagaaccccaagctgacacgcatgctgactttcaagttctatatgcccaagaaagctactgagctcaagcacctgcagtgcctcgaagaagagttgaagcctctcgaggaggtgctgaaccttgctcagagtaagaactttcacctgaggccccgtgacttgatcagcaacatcaacgtgatcgttctcgagctgaagggtagtgagactacctttatgtgtgagtacgcagacgaaactgccacaatcgtggagttcctgaacagatggatcaccttctgtcagtcaatcatctctacattgaca

SEQ ID NO: 13061 - DNA, 459 bp, Artificial Sequence
  derived and/or modified sequence
atgtaccgaatgcaactgcttagctgcatcgcgctctccctcgcgcttgtgaccaactcggcgcccacctcaagttcgaccaaaaagacccagctgcagctcgaacaccttcttctggatttgcagatgatcctcaacggcatcaataactataagaaccccaagctgacccggatgttgaccttcaaattctacatgccgaagaaggccactgaacttaagcatctccaatgtctcgaagaggaactgaaaccattggaagaggtcctgaacctcgctcagtccaagaatttccacctgcgcccgcgcgacttgatttcgaacatcaatgtgattgttcttgagctgaaggggtccgaaaccacgttcatgtgcgagtacgcagacgaaaccgccactatcgtggagttcctgaatagatggatcaccttttgccaatcgataatctcaactctgact

SEQ ID NO: 13062 - DNA, 459 bp, Artificial Sequence
  derived and/or modified sequence
atgtataggatgcaacttctttcttgtattgcattaagtcttgcattagttacaaatagtgcaccaacaagttcatctactaaaaaaactcaacttcaacttgaacatcttttgttagatcttcaaatgattcttaatggaataaataactataagaatcctaaattgacacgtatgcttacatttaaattttatatgcctaaaaaggcaactgagttaaaacatcttcaatgtcttgaagaagaacttaaaccattagaagaagttttaaatttagctcaatcaaaaaatttccatcttagacctagagacttaatatctaatattaatgttattgttttagaattaaagggtagtgaaactacattcatgtgtgaatatgcagatgaaactgcaactattgtagaattcttaaatagatggataactttctgtcaatcgattatttcaaccttaaca

SEQ ID NO: 13063 - DNA, 459 bp, Artificial Sequence
  derived and/or modified sequence
atgtaccgaatgcagctcctttcctgtatagcgctctcacttgccctggtcacgaacagcgcacctacctcctcctcgacgaagaaaactcaattgcagcttgagcacctgcttcttgatttgcagatgatcctcaacgggattaacaattacaaaaacccaaaacttacccggatgctcaccttcaaattctacatgccaaagaaggcaaccgaactcaagcatctgcaatgcctggaagaggaactcaagccactggaggaagtgctcaacctggcacaaagcaaaaactttcatctgcggccccgcgatctcatctccaatatcaacgtcatcgtgctggaactcaaggggtcagagactacctttatgtgtgaatacgcagacgaaaccgcaaccattgtggaattccttaaccgctggattaccttttgtcaaagcataatctcaaccctgact

SEQ ID NO: 13064 - DNA, 459 bp, Artificial Sequence
  derived and/or modified sequence
atgtaccgcatgcagctgctgtcgtgtatcgcactgtctctggccctcgtgactaacagcgcccccacgtcatcctcgactaaaaagactcaactgcaactggaacacctgctgttggacctccagatgattctgaatggcatcaataactacaagaacccgaaacttaccaggatgctgacctttaagttctacatgccaaagaaagcgaccgaacttaagcatctccaatgccttgaggaggaactcaagcctctggaagaagtgctgaacttggcccagtccaagaacttccacttgcggccgcgcgatctgatctccaatatcaacgtgatcgtcctcgagctcaagggatcagaaaccacgttcatgtgcgagtacgctgacgaaaccgcgactatcgtcgagttcctcaatagatggatcactttttgccagtcgattatcagcaccctgacc

SEQ ID NO: 13065 - DNA, 459 bp, Artificial Sequence
  derived and/or modified sequence
atgtacaggatgcaactcttgtcctgcatcgccctctctctggctctggttactaattcggcgccgacctcctcctccaccaagaagactcaactgcaacttgaacatctccttctggacctgcagatgatattgaacgggatcaacaattacaagaatccaaagttgacgcgcatgcttaccttcaagttttacatgccgaagaaggcgaccgaacttaaacacctgcagtgcctggaagaagagctgaagccgctcgaagaggtcctgaatctggcccagtccaaaaacttccacctgcgcccccgggacctgatctcgaatatcaatgtgattgtcttggaattgaaaggaagcgaaactactttcatgtgcgagtatgccgacgaaaccgcgaccatcgtcgaattcctcaaccgatggatcacgttctgtcagtccatcatctcaaccctcacc

SEQ ID NO: 13066 - DNA, 459 bp, Artificial Sequence
  derived and/or modified sequence
atgtaccgcatgcaacttctttcgtgtattgcactgtccttggcacttgtgacgaatagcgcgcctacctcctcaagcactaaaaagacccagcttcaactggaacatctgctgttggatcttcagatgatcctgaatgggatcaacaactacaagaatccaaagctgacccgtatgctcacgttcaaattctacatgccgaagaaggccaccgagctgaagcacctgcaatgccttgaagaagaactgaagcctctggaggaagtcctcaatctggcacaatcgaaaaacttccatctgcgacccagagatcttatttccaacattaacgtgattgtactcgaactgaagggctcggaaactaccttcatgtgtgaatacgccgatgaaaccgcaactattgtggagtttctcaacagatggattactttctgtcagagcataatctctactctcacc

SEQ ID NO: 13067 - DNA, 459 bp, Artificial Sequence
  derived and/or modified sequence
atgtaccgcatgcagctcctttcatgcatcgcattgtcgttggcgctggtgaccaacagcgccccgacctcaagctcgactaaaaagacccaactgcagctcgaacacctgctgctggacctccagatgatactgaacggaatcaacaactacaagaatcctaagttgactcgcatgctcacctttaagttttacatgccaaaaaaggcgaccgagcttaagcaccttcagtgcttggaagaagaactgaagcctctggaggaggtgcttaatctggcccaatccaagaatttccatctcaggccgagggatctgatctccaacatcaatgtgatcgtcctcgagctgaagggttccgagactacgtttatgtgcgagtacgcggacgaaactgccaccatcgtcgaatttctgaatcgctggatcaccttctgtcagtccatcatcagcaccttgacc

SEQ ID NO: 13068 - DNA, 459 bp, Artificial Sequence
  derived and/or modified sequence
atgtaccgaatgcagcttctaagctgcattgcgctgtctctggcgcttgtcactaattcagcaccaacatcatcctccacgaaaaaaacacagctccagctagagcatctgctcttggacttacaaatgatcctgaatgggatcaacaactacaagaatcccaagctcacccggatgctgacattcaaattctacatgcctaaaaaagcaaccgagctcaaacacctgcagtgtcttgaagaagaactgaaacccctcgaggaggtactgaatttggcacagtcaaagaacttccacctgcgcccgagagacctgatcagcaatatcaacgtgatagtgctagagctcaaagggagtgaaaccacatttatgtgcgagtacgcagatgagaccgcgactatcgtggagtttctgaataggtggataacgttttgccaatctattatctccaccctgacc

SEQ ID NO: 13069 - DNA, 459 bp, Artificial Sequence
  derived and/or modified sequence
atgtataggatgcagctgctgtcctgtattgccctctcactggccctggtaactaacagcgcaccaacctcaagctccactaagaagactcaactgcaactcgaacacctgttactagacctgcagatgattctcaacggcataaacaattataaaaatcccaagcttaccagaatgttgacattcaaattctacatgccaaaaaaagcaacagaactgaaacacctccagtgcctagaggaagagctgaaacccctggaggaggtactgaatctagcccagagtaagaactttcacctgcggccccgcgacctcataagtaacattaatgtgatagtcctagagctcaagggctctgagaccacattcatgtgtgagtatgccgacgaaaccgccacaattgttgagtttctgaaccgatggattacattttgccagagcatcatctcgactcttacg

SEQ ID NO: 13070 - DNA, 459 bp, Artificial Sequence
  derived and/or modified sequence
atgtatcgcatgcagctgctttcctgcatagcactgtcccttgcactggtgaccaactcagcgccaacttcgtcctcaaccaaaaagacccagctccaacttgaacatctccttcttgatctgcaaatgatcctgaacggaatcaataactacaagaacccaaaactgacccggatgctgacttttaagttttacatgcctaagaaggccaccgaacttaagcacctccagtgcctggaagaagaactcaagccgctggaagaagtgcttaacctggctcagtccaaaaactttcatctcagaccccgggacttgatcagcaacataaacgtgatagttctggaactgaaaggttcagagacgacgtttatgtgcgaatacgcagatgaaaccgctacgattgtggagttcctcaaccgatggatcaccttttgtcagtcgatcattagcaccctgact

SEQ ID NO: 13071 - DNA, 459 bp, Artificial Sequence
  derived and/or modified sequence
atgtaccggatgcagctgctgtcctgtatcgccctgagcctggcccttgtgaccaatagcgctccaacatcctcctcgacaaaaaaaacccaactccaactggaacacctgctcttagaccttcagatgatcttgaacggtataaataattataagaatcccaaactgactcgaatgctgacattcaaattctatatgcccaagaaggccacggagctaaaacatctgcaatgtctggaggaggagctcaagcctctggaggaggtgcttaacctcgcacagtctaaaaacttccacttgcggcccagggacctcatctccaacataaacgtcattgtgcttgagcttaagggcagtgaaacgacctttatgtgcgagtatgccgacgaaacagccacaatcgtggagttcctgaaccggtggattacattttgtcagagtattatttcaaccctgact

SEQ ID NO: 13072 - DNA, 459 bp, Artificial Sequence
  derived and/or modified sequence
atgtacagaatgcagctcctgtcatgcatcgccctgtcattggcgttggtcacgaacagcgctccgactagctcctccaccaaaaagacgcaactgcagctcgagcacctcctgcttgacttgcagatgattctgaacgggatcaacaattacaagaacccgaagctgaccaggatgctcacctttaagttctatatgccgaagaaagccactgaactcaagcaccttcagtgtctggaggaagagctgaaaccgctggaggaagtcctgaatctggcgcaatccaagaattttcacctccgtccccgggacctgatttcgaacatcaatgtgatcgtgctggaactcaaaggatcagaaactacgttcatgtgtgaatacgcggatgagacggcaaccatcgtggaatttctgaacaggtggatcactttctgccaatcgatcatctcgaccctcact

SEQ ID NO: 13073 - DNA, 459 bp, Artificial Sequence
  derived and/or modified sequence
atgtataggatgcagttactctcttgtatagccctgtctctggcactggtgacaaactccgctcctacaagctcatccaccaagaaaacccaactgcagctagagcatctgctcctcgatcttcagatgatcctgaatggaatcaataattataagaacccgaagttgacgcggatgttaacattcaagttctatatgcctaagaaagctacggaattgaaacatctacagtgtctggaggaagaactcaagcccctcgaggaggtgctgaatctggcccaatcaaagaatttccatttgcgaccacgagatctcatatccaacatcaatgtgatcgtgttagagctgaagggttctgaaacgacttttatgtgtgagtacgcagacgaaactgctactatcgttgaattcttaaatcgctggattaccttctgccagtctatcatcagtactttgaca

SEQ ID NO: 13074 - DNA, 459 bp, Artificial Sequence
  derived and/or modified sequence
atgtatcggatgcagcttctgtcgtgcatcgcgctgtcgttggcgcttgtgaccaattcagcccccacttcctccagcactaagaaaacgcaattgcaactcgaacaccttcttctggacctccagatgatcttgaacggcatcaacaactacaagaacccgaagctgactcggatgctgacgttcaagttctacatgccaaagaaggccaccgaactgaagcacctgcagtgcttggaggaagagctgaagcctctggaggaggtcttgaatctggctcagtcgaaaaactttcatctcagacctagggatctgattagcaacattaatgtgatcgtgctggagctgaaaggatcagaaactacttttatgtgtgaatacgcagacgaaacggcaaccatcgtcgaattcctgaatcgttggattaccttctgccaatccatcatctcaaccttgacc

SEQ ID NO: 13075 - DNA, 459 bp, Artificial Sequence
  derived and/or modified sequence
atgtatagaatgcagttactttcctgcattgcacttagccttgctctggtgaccaactctgcaccgacatcttcctctactaagaagacacagttacaactcgaacaccttttactggacctgcagatgattctgaacgggattaacaattacaaaaaccccaaactgacccggatgctgacgttcaagttctacatgcccaagaaggctaccgagctgaaacacttgcagtgcctggaggaagagcttaaaccactggaggaggttctcaatctggcccagagcaaaaacttccaccttagacctcgcgacttaatttcaaatatcaatgtgatcgtcttggagcttaaggggtcagaaacaacttttatgtgcgagtatgcagatgagacagccactatcgtcgaattccttaacaggtggataaccttttgccagtccatcatttccacgctgacc

SEQ ID NO: 13076 - DNA, 459 bp, Artificial Sequence
  derived and/or modified sequence
atgtacaggatgcagctactaagctgcatagctctgtctctggcgcttgtcactaacagtgcacccacctctagctcgaccaagaaaactcagctgcagctcgaacacttgctgctggatcttcagatgatcctgaatgggattaacaactacaagaaccccaaactgaccaggatgctcaccttcaaattctatatgccaaagaaagccacagagttaaagcatttgcagtgtctagaggaggaactgaagcccttggaagaagtgcttaatttggcacagtccaaaaactttcacctccggcccagagatctaattagcaacattaacgtgatcgtactagaattaaagggaagtgagacaacttttatgtgcgagtacgctgacgaaaccgcaacgatcgtggaattcctgaataggtggatcaccttttgccagtccataatcagtacccttacc

SEQ ID NO: 13077 - DNA, 459 bp, Artificial Sequence
  derived and/or modified sequence
atgtatagaatgcaactcctctcatgcatcgcactgtcactggcactggtgactaacagcgcgccaacttcatcgtcgaccaagaaaacccaacttcagctggagcatctccttctggatctgcagatgatcctgaatggcatcaacaactacaaaaacccgaaactgacgcggatgcttaccttcaagttctacatgccgaaaaaggccaccgaactgaaacacctgcaatgtttggaggaagaactgaagcctttggaggaagtccttaacctggcacaatccaagaatttccacctgcgtccacgcgacctcatatctaacatcaatgtcatcgtgttggaactcaagggatcggagactacgtttatgtgtgagtacgccgacgagactgctactattgtggaattcctgaatcgctggattaccttctgtcagtccatcatttcgaccctcact

SEQ ID NO: 13078 - DNA, 459 bp, Artificial Sequence
  derived and/or modified sequence
atgtatcggatgcagctgcttagctgcattgccctctcattagcgttggttactaactctgcaccgacgagctctagtacaaaaaagacccagctgcagcttgaacacctgctcctggacctccagatgattttaaatggtattaataattacaagaatccaaagctgacgaggatgctgaccttcaaattctacatgcccaaaaaagccaccgagcttaaacacctacagtgtttggaagaagagttgaagcctctcgaggaggtgctcaacctggcccagtccaagaacttccacctgaggcctcgcgatctgatttctaacatcaatgttatagtgctggaattaaagggctccgaaactacctttatgtgtgagtatgccgacgaaaccgcaaccatcgtggagttcctgaatagatggatcacattttgtcagagcatcatctccacactgact

SEQ ID NO: 13079 - DNA, 459 bp, Artificial Sequence
  derived and/or modified sequence
atgtacagaatgcaactgctgtcgtgtatcgcattgtcgctggcacttgtgactaattcagcaccgacttcgagctcgactaaaaagacccagcttcaattggaacatctgctgcttgaccttcagatgattttgaatgggatcaacaactacaagaacccaaagctgaccaggatgctcacttttaagttttacatgccaaagaaagcaaccgaactcaaacatctccaatgccttgaagaagaactgaagccactggaggaagtgctgaatctggcccagtcgaagaatttccatctccgtcctagggatcttatctcgaacatcaacgtcattgtgctcgagctgaaaggaagcgaaactacttttatgtgtgaatacgcagatgaaacggccaccatagtcgaattccttaaccgatggattactttttgtcagtccatcataagtactctgacc

SEQ ID NO: 13080 - DNA, 459 bp, Artificial Sequence
  derived and/or modified sequence
atgtaccggatgcagctgctcagctgtattgcgctctctctcgcactcgtcactaactcggcaccaacgtcctcatctactaagaaaacccagctgcaactggagcaccttcttctcgatcttcaaatgattcttaatggtatcaataactacaagaatcctaaactgactaggatgctgacctttaagttctacatgccaaaaaaggcaacggaactgaaacatcttcaatgccttgaagaagagcttaagccgctggaggaggttcttaatctggcccagtcgaagaacttccatctgcgcccccgcgacctgattagcaacatcaacgtaattgtcttggaacttaagggatcggaaactacgtttatgtgtgaatatgcagatgaaaccgccaccatcgtggaattcttgaaccgatggataactttttgtcaatcgattatctcgaccctcacc

SEQ ID NO: 13081 - DNA, 459 bp, Artificial Sequence
  derived and/or modified sequence
atgtacagaatgcaactgctcagctgcatcgcattgagcctggctttggtgaccaactccgccccgactagctcgtccactaagaaaacccagttgcaacttgagcatctgcttctggacctgcagatgatcctgaacggtatcaataactataagaacccgaagctcactcggatgctgaccttcaaattctacatgcctaaaaaggcaaccgaattgaagcacttgcagtgtctggaggaagaacttaagcccctcgaagaggtcctcaatcttgcccaatctaagaatttccacctgcggccgcgcgatcttatttccaacatcaatgtgatcgtcctggagctgaaaggatcagagactaccttcatgtgcgaatacgcggacgaaacggcgaccattgtagagttcctgaaccgctggatcaccttttgccagtccataatctcgacgctcact

SEQ ID NO: 13082 - DNA, 459 bp, Artificial Sequence
  derived and/or modified sequence
atgtatcgcatgcagttgttgagttgtatagccctgagcctggcgctggtgaccaattccgctccaacatccagctccactaagaagacccagctccaactggagcacttgttgttggacttgcaaatgattctgaacggaatcaacaactacaaaaaccccaagctgaccaggatgctgactttcaagttttacatgcccaaaaaggctactgagttgaaacatttgcagtgcctggaagaagaactgaaacccctcgaagaggtcctgaacctcgcccagagcaagaattttcacttgcgcccgcgcgaccttatctctaatattaacgtaattgtgttggaactcaagggcagcgaaaccacttttatgtgcgagtacgctgacgagaccgctactatcgtggagttcctgaacagatggattactttttgtcaaagcatcatttctacactgacc

SEQ ID NO: 13083 - DNA, 459 bp, Artificial Sequence
  derived and/or modified sequence
atgtaccgcatgcagctcctctcgtgcatcgctctgagtcttgccctcgttaccaactccgcacccacatcaagtagtactaaaaagactcagctgcaattagagcatctccttctggacctccagatgattctcaacggtatcaacaactacaagaatcccaaacttaccagaatgctgacatttaagttttacatgccaaagaaagctacagaactgaagcacctgcagtgcctcgaggaggagctaaagccacttgaggaggtgctgaacctcgcccaatcaaagaattttcacctacgcccaagggacctcatctctaacatcaatgttatcgtacttgagctcaagggaagcgagaccacatttatgtgcgagtacgctgacgaaactgctactattgtcgagttcctgaatcgttggattaccttctgccaaagtatcatttccaccctcacc

SEQ ID NO: 13084 - DNA, 459 bp, Artificial Sequence
  derived and/or modified sequence
atgtaccgcatgcagcttctgtcctgcattgcgctgagtctcgctctggtgaccaattccgccccaacatcatcctccaccaagaaaactcaattgcaactagaacatctgctgctggatctgcagatgatcctgaatggtatcaacaactacaagaaccctaaactgacacggatgctgactttcaaattttatatgccaaagaaagccaccgaacttaaacacttgcagtgtctcgaagaggagctaaagcccctggaagaagtgctgaacctagctcagtcaaagaactttcatttgcgccccagggatctgatcagtaatatcaacgtgattgtattggaactgaaagggagcgagaccacctttatgtgcgaatatgccgatgagaccgctactatcgtggaatttctgaataggtggattactttttgccagtcaattatctcaacgttgacc

SEQ ID NO: 13085 - DNA, 459 bp, Artificial Sequence
  derived and/or modified sequence
atgtacagaatgcaactgctttcatgcattgcgttgtcgctggcgctcgtgaccaactccgctcccacctcgtcgagcaccaaaaagacccagcttcagctcgaacatcttctgttggacctgcagatgattcttaacggcatcaataactacaagaatccaaagctgaccagaatgcttacttttaagttctacatgccgaagaaggcgacggaactgaagcatcttcagtgcctggaggaagaacttaaaccacttgaagaggtgctgaacctggcacagtcgaaaaacttccatcttaggcctagggatctgatttccaacattaacgtgatcgtgcttgaacttaaaggatcagaaacgactttcatgtgtgagtacgcagatgaaactgcaacgattgtggagttccttaacagatggataactttttgccaatcgattatctccactcttacc

SEQ ID NO: 13086 - DNA, 459 bp, Artificial Sequence
  derived and/or modified sequence
atgtaccgcatgcaattgctgtcatgcatcgcactgtctctggctcttgtgaccaactccgctccgactagctcctcaacgaagaaaacccagctgcagcttgaacatctgcttctggacctgcagatgatcctcaacggaatcaataactacaagaatccgaagctgactcggatgctgaccttcaaattctacatgccgaagaaagctaccgagcttaagcacctgcaatgcctggaagaagagctgaagccgctggaagaagtgttgaacctcgcgcagtcgaagaatttccacctgcgcccgagggatctcatctcgaacatcaatgtgatagtgttggagctgaagggctccgaaaccaccttcatgtgcgagtatgccgacgaaaccgctaccattgtcgagtttttgaaccggtggatcactttctgtcagtcgatcatttcgaccctcacg

SEQ ID NO: 13087 - DNA, 459 bp, Artificial Sequence
  derived and/or modified sequence
atgtatcggatgcagctactctcttgtatagccctgtcactcgctcttgtcactaattcagcccctacttcttcctctacaaagaagactcagcttcagctcgaacacctgctattagacctccaaatgatactaaacgggataaataactacaaaaacccgaaacttacacgaatgctaactttcaagttttatatgcccaaaaaagccacagagttgaaacacttacagtgcctagaagaggaactgaaaccactcgaagaagtgttgaatctggcccagtccaaaaattttcatttgagacctagagatctcatctcgaatataaacgtgatcgtgctcgaactcaaggggtccgaaactacttttatgtgtgaatatgctgacgaaacagccacaatcgtcgaattcctcaatcgctggattacattctgccagtctatcatctcaacactgaca

SEQ ID NO: 13088 - DNA, 459 bp, Artificial Sequence
  derived and/or modified sequence
atgtataggatgcagctgctctcttgcatcgctctttcactcgccctggtcactaattctgcgcccacctccagttctacaaaaaagacacagctccagctggaacatttactcttagatcttcagatgattctcaatggcattaacaactacaaaaacccgaagctgacccgaatgctgaccttcaaattttatatgccgaaaaaagccacagaactgaagcatctgcagtgcttagaagaggagctgaagccactggaagaggtgctgaacctggcgcagagtaagaactttcacctaagacccagagacctcattagcaacataaacgtgatcgtactggagttgaagggttccgagactacctttatgtgtgaatacgccgacgaaactgcaaccattgttgaatttttgaaccggtggataactttctgtcagtcaattataagtacacttacc

SEQ ID NO: 13089 - DNA, 459 bp, Artificial Sequence
  derived and/or modified sequence
atgtaccgcatgcagttactatcctgcatcgcactaagcctcgctctggtgaccaatagcgccccaacatccagtagtaccaaaaagacacagctccaactggaacacctgcttctagacctgcagatgatcctaaatggcataaataactacaaaaatccaaaattaactagaatgcttactttcaagttttacatgcctaaaaaagccacagagttaaaacacctgcagtgcctggaagaggagctaaagccgttagaggaagtgctgaatctggcccagtcaaagaatttccatctgcgtccaagggatctgattagtaacattaatgtgattgtgctggagctgaagggatccgagaccacattcatgtgtgagtatgctgatgaaactgccactatagttgagttcctcaataggtggataactttctgtcagtcaattatctccacattgaca

SEQ ID NO: 13090 - DNA, 459 bp, Artificial Sequence
  derived and/or modified sequence
atgtatcgcatgcagttgctttcctgcattgcactcagcttggcactggtgaccaactcggcacctacttcgagctccacgaaaaagacccaactccagttggagcacctcctgctcgatctccagatgattcttaatggaattaacaattacaagaacccgaagctgacccggatgcttactttcaagttctatatgcctaagaaggcgacggagctgaaacatctccagtgcctcgaagaggaacttaaacctctcgaggaggtccttaacctggcacagtcgaagaattttcaccttagaccaagggacctgatatccaacatcaacgtcatcgtcctcgaattgaagggaagcgaaaccacctttatgtgtgagtacgctgatgaaacggccactattgtggaatttcttaatcgttggattactttttgccaaagcatcatatctacccttact

SEQ ID NO: 13091 - DNA, 459 bp, Artificial Sequence
  derived and/or modified sequence
atgtaccgcatgcagctgctgtcctgcatcgcccttagcctggccctcgtgacgaacagtgccccgacttcctccagtaccaagaagacccagctgcaacttgagcatttgctgttggatttgcaaatgatacttaacggaattaacaactacaagaacccaaaactgactagaatgctcacgttcaagttctatatgcccaagaaggcgaccgagctcaagcatttgcaatgtctggaggaggagcttaaacctctggaggaagtgctgaatctcgcccagtccaagaactttcacttgaggcctcgggatctcataagcaacatcaatgtaattgtgctggagctcaagggcagtgaaaccacctttatgtgcgagtatgccgacgagaccgctaccatcgttgagttcttgaataggtggatcaccttttgtcaatccatcatatccactctgaca

SEQ ID NO: 13092 - DNA, 459 bp, Artificial Sequence
  derived and/or modified sequence
atgtatcgaatgcaactgttgagttgcatcgctctctcactggcattagttacaaatagtgctcctacaagcagttctacgaaaaagactcagctgcaactcgagcatttgctccttgaccttcaaatgattttgaacggaataaataactataaaaatccaaagcttactagaatgcttacttttaaattttatatgcccaaaaaagctacagagcttaagcacctgcagtgtttggaagaggaacttaagcccttggaggaagttttgaacctcgctcaatctaagaattttcatttaaggccgagggatttgattagcaatatcaatgttatcgttttagaattgaaaggctctgaaacgactttcatgtgtgagtacgcagacgaaaccgctactatagtggagttcttgaacagatggattactttctgtcagagtataatctccactttgaca

SEQ ID NO: 13093 - DNA, 459 bp, Artificial Sequence
  derived and/or modified sequence
atgtaccggatgcaactcctctcctgcatcgcactctcactcgcccttgtgacgaattcagccccgacctcctcctcgactaagaaaacccagttgcagctggagcacctgcttctggacctccaaatgatcctgaacggaatcaacaattacaagaatcccaaactgaccaggatgctgaccttcaagttctacatgccgaagaaggcgactgagctgaagcacctgcaatgcctggaagaagagttgaaaccactcgaagaggtgctgaaccttgcgcagtcgaagaactttcatctcagacctcgcgacttgatctcgaatatcaacgtcattgtcctggaactgaagggcagcgagacgaccttcatgtgcgaatacgctgatgaaactgccaccattgtggaattcctgaaccgctggatcactttttgtcagagcatcatctctaccctgact

SEQ ID NO: 13094 - DNA, 459 bp, Artificial Sequence
  derived and/or modified sequence
atgtacaggatgcagctgctgtcgtgtattgctctgtccctcgcgctggtgaccaactcggcgccgacctcctcctcgaccaaaaagacccagctgcaactggagcacctgctcctggacttgcaaatgatcctgaacgggatcaacaattacaagaacccgaagctcacccgcatgcttacgttcaagttttacatgcccaaaaaggcaaccgagctgaagcacttgcaatgtttggaggaggagctgaagccactcgaagaagtgctgaacctggcccagagcaagaatttccacctgaggccgcgggatctgatcagcaatatcaacgttatcgtgctcgagttgaagggatcggaaactaccttcatgtgtgaatatgcagacgaaaccgccactattgtcgaattcctgaacagatggatcaccttctgccagtccattatctcgaccctcact

SEQ ID NO: 13095 - DNA, 459 bp, Artificial Sequence
  derived and/or modified sequence
atgtaccgaatgcagctcctcagttgtatcgccctctctctggcccttgtaacaaattccgcccccacatcttcatcaacaaaaaagactcagctgcagctggagcacctcctcctcgatcttcagatgatcctcaatgggataaataattacaaaaatcctaaactcacacgtatgctgacatttaaattttacatgcctaaaaaggcaactgagctgaagcacttgcagtgccttgaggaagagctcaagcccctcgaagaagtcttaaatctcgcccagtcaaaaaactttcacctgcggccccgggatctaatttccaatataaatgtgatagtgctcgaactgaaagggtctgaaacaacatttatgtgtgaatatgcagatgaaacggctactatcgttgaattcctgaacaggtggataactttttgccagtctatcatctccactctaaca

SEQ ID NO: 13096 - DNA, 459 bp, Artificial Sequence
  derived and/or modified sequence
atgtacaggatgcagctgctgagttgtatcgcactgagcctcgcactcgttacaaatagcgcccccaccagctcaagcactaagaaaacccagctgcagctggagcatttactcctggatctgcaaatgattctgaatggaatcaataactacaaaaatcctaaactgacccgcatgctcaccttcaaattttatatgcctaaaaaggcaaccgaactcaagcatctgcagtgcctggaagaggaattgaaaccactggaggaagtcctgaatttggctcagtcgaagaacttccatttgcgtccacgcgacttgatttccaatattaatgttatagttctcgagcttaagggttctgaaaccactttcatgtgtgagtatgccgacgaaacggcgaccatcgtcgaatttctcaatcgatggataaccttttgtcaaagcatcatatctaccctgacg

SEQ ID NO: 13097 - DNA, 459 bp, Artificial Sequence
  derived and/or modified sequence
atgtacagaatgcagctgctaagctgtattgccctatctctggcactcgtcactaatagtgcccccacatccagctcaacaaagaagacacaacttcagctagagcacttgctgctcgatctgcagatgatcctaaacggtataaacaattacaagaatccaaaactgaccagaatgctgacctttaaattttatatgcctaagaaagccactgaactgaagcatctccagtgtctggaggaagaattgaagccgcttgaagaggtgctcaatcttgctcagtcaaaaaacttccacctgcgtcccagagacctgatctctaacattaatgtgattgtgttggagctgaagggcagcgagactacgttcatgtgtgaatacgccgacgaaacagctacaatcgttgaattcttaaatcgctggattaccttctgccaatccatcatcagcactctgacc

SEQ ID NO: 13098 - DNA, 459 bp, Artificial Sequence
  derived and/or modified sequence
atgtaccgcatgcaattactctcctgtatcgcgctttctcttgcattggttacaaattccgcaccaacatcttcatcaacgaaaaaaacacaactgcaactcgaacatctgctactcgatcttcaaatgatcttgaatggaattaacaattacaaaaatcctaaacttacccgaatgcttacattcaagttctacatgccaaaaaaggcaacagagctaaaacacttacaatgccttgaagaagaattgaagcctctggaagaagttttaaatcttgctcaaagtaaaaactttcatttacgaccaagagatcttatttctaatatcaacgttattgtactggagctaaaaggttcagagacaactttcatgtgcgaatatgccgatgaaaccgcaactatcgttgaatttttgaacagatggataacattctgccagtcaattataagtactttaact

SEQ ID NO: 13099 - DNA, 459 bp, Artificial Sequence
  derived and/or modified sequence
atgtaccgaatgcagctgctcagttgcatcgccttaagcctagccttggtgaccaactctgcccctacctcctcctcaaccaagaaaacccagttgcaactcgagcatttgctgctggatctacagatgattctgaacggaattaacaattacaagaacccaaagttgactaggatgctcacctttaaattctacatgcctaagaaagcgactgagctgaagcatctccagtgtctcgaggaagagcttaaaccacttgaagaggtcctcaacctcgcccagtcaaagaacttccacctaaggccacgagacctgatatcaaatatcaatgttattgtcctggaattgaagggctcggaaactacttttatgtgcgaatacgctgacgaaactgctacaatcgtggaatttttgaatcgttggataactttctgccaatccattatcagcaccctcacg

SEQ ID NO: 13100 - DNA, 459 bp, Artificial Sequence
  derived and/or modified sequence
atgtaccgcatgcagctcctgtcttgcatcgctttgtctcttgccctggtgaccaacagcgctcctacgtcttcttccacgaagaagacacagctccaactggagcacctgctgcttgatctgcaaatgatccttaacgggattaataactacaagaatcctaaattgaccaggatgctgactttcaaattttacatgccaaagaaagccacagagctcaagcacctgcagtgcttggaggaggagctgaagcccttggaggaagttctcaacctggctcaatccaagaattttcacctgcggccccgagaccttatttcaaacatcaacgtgatagtcctggagttgaagggttccgagactaccttcatgtgtgaatatgctgacgaaactgccaccatagtggaatttctgaaccggtggatcacattctgtcagagtatcatcagtactctgaca

SEQ ID NO: 13101 - DNA, 459 bp, Artificial Sequence
  derived and/or modified sequence
atgtaccgcatgcagctgctgtcctgcatcgcgctgtcgctggccctggtcactaatagtgcccctacctcatccagtaccaaaaagactcagctccaactcgaacacttgctcctggacctccaaatgatactgaacggaatcaataactacaaaaaccccaagctgacccgcatgcttactttcaaattctacatgccgaaaaaggcaaccgaattgaagcatttgcagtgcctcgaagaagagctgaagcctcttgaggaagtgcttaacctggcgcagtctaagaacttccacctgcggccaagagatctgatctccaatatcaatgtgatcgtccttgaactcaagggctcggaaaccacgtttatgtgcgagtacgccgatgaaaccgcaaccattgtggaattcctgaaccgatggatcaccttctgtcaatctatcatctccaccctgacc

SEQ ID NO: 13102 - DNA, 459 bp, Artificial Sequence
  derived and/or modified sequence
atgtatagaatgcaattattatcatgcattgctttatcacttgctctcgtcacaaattctgctccaacatcctcctccactaaaaaaactcagctacaactagagcatcttttgttggatctgcagatgatattgaacggaataaataattacaagaatccaaaactgactcgtatgttgacattcaagttctatatgccgaagaaagcaacagaactgaagcatcttcaatgcctggaagaagaattgaaaccattggaagaggttcttaatttggctcagtcaaaaaacttccatcttcgtccaagagatctcatttctaacatcaatgttattgttctggagcttaaaggttctgaaacaactttcatgtgcgaatacgctgatgaaacagcaactatcgtagagtttcttaatcgatggataacgttctgtcagtcaattatttcgaccctcact

SEQ ID NO: 13103 - DNA, 459 bp, Artificial Sequence
  derived and/or modified sequence
atgtaccggatgcagctgctgagctgcattgcactttccctggcactggtcactaactcggcaccaacctcgtcgtcgactaagaaaacccagctgcaactcgagcatctccttctggatctccagatgatactgaatgggattaacaactataagaaccccaaacttactcgtatgcttacctttaagttttacatgccaaagaaggcaacggaactgaagcatcttcagtgtctcgaagaggagcttaaaccccttgaggaggtcctgaacttggcgcaaagcaagaatttccacttgaggcctagagatcttatttccaacattaacgttatcgtgttggagcttaaaggctcagagactacctttatgtgtgagtacgcagatgagactgcgactatagtggaatttctcaacaggtggatcactttttgtcaatcaattatctccacccttacc

SEQ ID NO: 13104 - DNA, 459 bp, Artificial Sequence
  derived and/or modified sequence
atgtaccggatgcagctcttgtcctgcatagctttgtcacttgcgcttgtgaccaactccgcacctacctcgtcgtccacgaagaaaacccagctgcaactcgaacacctcctcctcgacttgcagatgatcttgaacggaatcaacaactacaaaaatcccaagctgaccagaatgctgacctttaagttctacatgccgaagaaggccactgaactgaagcacctgcaatgcctggaagaggaattgaagccattggaagaggtcctgaacctggcccagagtaaaaacttccatcttaggccgcgcgatctcatatcgaatatcaatgtcatcgtgctcgaactcaaggggtctgagactaccttcatgtgtgagtacgccgacgaaaccgcgactatcgtagagttcctgaaccgctggatcactttttgccaaagcattatctcgactctgact

SEQ ID NO: 13105 - DNA, 459 bp, Artificial Sequence
  derived and/or modified sequence
atgtatagaatgcagcttctgtcatgcatagccctatccttagctttggtcacaaacagcgctccaacaagctctagcacaaagaaaacccaactacagctcgaacacctgctgctggacctacagatgatactcaatggaatcaacaattacaaaaatccgaagctgacaagaatgctgacctttaaattttatatgcctaaaaaggctacagaattgaaacacctgcagtgtttggaggaggagttgaagcccctggaggaagtgttgaatttggcccagtctaaaaactttcacctgagacctagagatctgatatcgaacatcaacgtcattgtcctggagttaaaaggcagcgaaactacttttatgtgcgaatatgccgacgagaccgctacgattgtggagttcctaaaccgatggatcacattttgtcaaagcatcatctctacgctcacg

SEQ ID NO: 13106 - DNA, 459 bp, Artificial Sequence
  derived and/or modified sequence
atgtaccggatgcagctgttgagctgcattgccctctctctcgcacttgtgacaaacagtgctccgacatcctccagtactaagaagacccagctgcagctggagcacctcctgctcgatttacaaatgatcctgaacggaataaataactataagaatcctaaactcacaaggatgctcacttttaagttctacatgcccaaaaaggctacagagctcaagcatctgcaatgccttgaggaggagcttaagccactcgaggaggtgctgaacctcgcccagagtaagaatttccatctgcggcctcgagatcttatctcaaatatcaatgtgattgttctggagctgaaaggctctgaaaccacttttatgtgtgaatacgcggatgagaccgctacgatcgtggaatttttgaaccgctggatcacattttgtcaaagcattatttcgacactgact

SEQ ID NO: 13107 - DNA, 459 bp, Artificial Sequence
  derived and/or modified sequence
atgtaccgcatgcaactgctgtcctgtatcgccctgtcactcgccctggtgactaactccgctcctacctcctcctccacgaaaaagactcagcttcagcttgaacacctcctgctggatctgcagatgatccttaacggtattaacaattacaaaaacccgaagctgacccggatgctgactttcaagttttacatgcctaaaaaggccactgaactgaaacatctgcagtgcctggaggaagagctcaagccactggaggaagtgctcaacctggcacagtcgaagaattttcacctgcggccccgcgacctcatctccaacatcaacgtgatcgtgctggagctgaagggctctgagactaccttcatgtgcgaatacgcggacgagacggccaccatcgtggagtttcttaaccgctggatcaccttttgtcaaagcatcatctcgaccctgacc

SEQ ID NO: 13108 - DNA, 459 bp, Artificial Sequence
  derived and/or modified sequence
atgtacaggatgcagctattatcctgtatagcactttctctggcgcttgtgacaaattctgcccccacttctagttctactaaaaaaactcagctccaactcgaacacctgctcctcgatcttcagatgatcctcaacgggatcaataactacaaaaatcccaaactgactcggatgctcacatttaaattctatatgcccaaaaaagcgacagagctcaaacacctgcagtgcttagaggaggaattaaagccacttgaagaagtactcaatctggctcagtcgaagaacttccatctcagaccaagagatctcattagtaacatcaatgttatcgtgctggaactaaaggggtcagaaacaacattcatgtgtgaatacgccgacgaaactgctactatagtcgaattcttaaatcgatggattacattctgtcagtcgattatatcaacattaaca

SEQ ID NO: 13109 - DNA, 459 bp, Artificial Sequence
  derived and/or modified sequence
atgtaccgtatgcaactgctgtcttgcattgcgctttcactggcccttgtcacaaattctgcgcctacttcatcctcaactaagaaaacgcagctgcaactcgagcatctgctgttggatttacagatgattttaaacggaatcaataactacaaaaacccaaaattaacaagaatgttgacttttaagttttatatgcctaaaaaagcaacagaacttaaacacctgcaatgtcttgaagaagaacttaaacctttagaagaagtgctcaatctggcgcaatcaaaaaactttcatcttcggcctcgagacctgattagcaacattaacgtgattgttttggagctaaaaggttcggagactacttttatgtgcgaatacgcggatgagaccgcaacgatcgtcgaatttctgaatagatggatcacgttctgccaatccatcatttccacgcttacc

SEQ ID NO: 13110 - DNA, 459 bp, Artificial Sequence
  derived and/or modified sequence
atgtatagaatgcaattattatcatgtattgcattatctttagctcttgttacaaattcagcaccaacttcttcatcaacaaagaagactcaattacaacttgagcatttattattagatttacaaatgattttaaatggtataaataattataaaaatccaaaacttacaagaatgcttacatttaaattttatatgccaaaaaaggcaacagaattaaaacatcttcaatgtcttgaagaagaattaaaaccattagaagaagttcttaatttagcacaaagtaaaaattttcatttaagaccaagagatttaatttctaatataaatgtcatcgtacttgaactaaagggaagtgaaactactttcatgtgtgaatacgcagatgaaacagctacaattgttgaatttttaaatcgttggataacattttgtcaaagtatcattagtactttaacc

SEQ ID NO: 13111 - DNA, 459 bp, Artificial Sequence
  derived and/or modified sequence
atgtatagaatgcagctgctgagctgcatagcactgagcctggcactcgtcacaaactcagctcctacaagctcatccactaagaaaacgcagctgcaactggagcatttgctgttggatttgcagatgatccttaacggaattaataattacaaaaaccccaaactgactagaatgctgacatttaaattttacatgcccaagaaggcgacagagctcaagcacctgcagtgccttgaggaggagcttaagcctctggaagaggtgctgaacctggcgcaaagtaagaacttccatctcaggcctagggaccttatctctaacatcaatgtgatcgtcctcgaactgaaaggaagtgaaactactttcatgtgcgagtacgccgacgagacagccaccatagtggagtttcttaacaggtggattaccttttgtcaatccatcatcagcacactgact

SEQ ID NO: 13112 - DNA, 459 bp, Artificial Sequence
  derived and/or modified sequence
atgtacaggatgcaactactctcctgtatcgccttgtctttggccttagtgacgaattcagccccaactagcagcagcactaagaagacccagttgcagctcgaacatttgctgctggatctgcagatgattctgaacggcatcaacaattataaaaatccgaagctgaccagaatgctaacttttaagttctatatgccaaaaaaggctaccgaacttaaacacctgcagtgtctagaagaggagctgaaaccccttgaggaggtactcaatctagcacagtcaaaaaacttccacctgcgcccacgagacttaataagcaatatcaatgtcattgtcctggagctgaagggatctgagacaaccttcatgtgtgaatatgccgacgagaccgcaacgattgtcgagtttctcaacaggtggataaccttctgccagtcaatcatcagtaccttgaca

SEQ ID NO: 13113 - DNA, 459 bp, Artificial Sequence
  derived and/or modified sequence
atgtatcggatgcagctgctgtcctgcatcgctctgagcctggcgctggtgaccaactcggcgccaacttcatcgtccactaaaaagacgcagcttcaactcgagcaccttcttttggatcttcaaatgattctgaatggaataaacaactacaagaatccgaaactgaccagaatgttgacgtttaagttctacatgcccaagaaggctaccgagctgaagcatttgcagtgtcttgaagaagagctgaaacctctggaagaagtccttaacctggcgcaatccaagaatttccatcttcggcctcgcgacctgatttcgaacatcaatgtgatagtgctggagctgaagggttccgaaaccacttttatgtgtgagtacgcagacgaaaccgctaccattgtcgaatttcttaatcgatggattacgttttgtcaatcgatcatttcgactctgact

SEQ ID NO: 13114 - DNA, 459 bp, Artificial Sequence
  derived and/or modified sequence
atgtaccggatgcagctgctgagctgcatcgctctgtcactggctctcgtgaccaactccgcacccacttcgtcgagtaccaaaaagactcaactccagctcgaacatctgcttttggaccttcagatgatcctcaatgggatcaataactataagaacccaaaactgacccggatgctgaccttcaagttctacatgccaaaaaaggccaccgagctcaaacaccttcagtgcttggaggaggaactgaagcctctggaagaagtgcttaaccttgcgcagtccaagaatttccacctgaggcccagggatctgatctccaacattaacgtgattgttctggagctcaagggctcggaaaccaccttcatgtgtgagtacgccgacgaaacggctaccatcgtcgagtttctgaacagatggatcacgttttgccagagcatcatttcgactctgact

SEQ ID NO: 13115 - DNA, 459 bp, Artificial Sequence
  derived and/or modified sequence
atgtacaggatgcagcttctgtcctgcattgcacttagccttgccttggtcactaattccgcgccgaccagctccagcactaagaaaacccaattgcaactcgaacacctcctcctcgacctgcaaatgattttgaacgggattaacaactacaagaaccctaagctgacgagaatgttgactttcaaattctacatgccaaagaaggcgaccgagttgaagcacctgcagtgtctggaagaggagcttaaaccgcttgaggaagtactgaatttggcacaatcgaagaattttcatcttcggcctagggatctgatctcaaacatcaatgtgatagtgctcgaactcaagggttctgaaactacctttatgtgtgaatacgcagatgagacggcgactattgtggagtttctgaaccgttggatcaccttttgccagtcgattatctcgacccttact

SEQ ID NO: 13116 - DNA, 459 bp, Artificial Sequence
  derived and/or modified sequence
atgtatagaatgcagttgctaagctgtatcgcgctgagtctagccctcgttaccaactcagcacctaccagtagcagtaccaaaaagacccagctgcagctcgaacatttgctcctagacctccagatgatcctgaatgggattaataactataagaaccctaaactcacacgcatgctgaccttcaagttttacatgcctaagaaggcaactgaactcaagcatttgcagtgtttagaggaggagttaaagccactcgaggaagtgttgaaccttgcccagagtaagaactttcaccttcgccctcgggatcttatctcaaatatcaacgtcattgtgttggagctgaagggctctgaaacaacattcatgtgtgagtacgcggacgagaccgcaaccatcgtcgagtttctgaatcggtggatcaccttctgtcagtccatcatttcaactctgacc

SEQ ID NO: 13117 - DNA, 459 bp, Artificial Sequence
  derived and/or modified sequence
atgtataggatgcagctgttatcatgcatcgctctaagtcttgccctcgttaccaattccgctccaacctcttctagcacaaagaagacacagcttcagctcgaacacttgctcttggatctgcagatgatcctgaacggaatcaacaactataagaacccaaaactcacccgtatgctcaccttcaagttttatatgcccaaaaaggccacagagttgaagcacctccaatgccttgaggaagaattgaagcctctggaggaagttctgaatttggcccagtccaagaatttccatttaagacctagagacctcatttctaatattaacgttatcgttctggaactgaagggttcagagacaacgttcatgtgcgagtacgccgacgaaaccgcgactatagtggaattcctcaatagatggattaccttctgtcagagcattatcagtaccctcaca

SEQ ID NO: 13118 - DNA, 459 bp, Artificial Sequence
  derived and/or modified sequence
atgtacagaatgcaattgctgagctgcattgccctgagcctggcactggttaccaatagtgccccaacttccagctctacaaaaaaaacccaactgcagctggagcatttgttgctggacctacagatgattctaaatggcataaacaactataagaacccgaagcttacaaggatgctgacctttaaattctatatgccaaagaaggccacggaattgaagcatcttcagtgccttgaggaggaacttaagccactggaggaggtattgaatctcgcacagagcaaaaactttcacttacggccaagagacctcatatctaacatcaatgtaatagtcctggaactgaaggggtcagagacgacttttatgtgcgaatatgctgacgagaccgctacaattgtggaattcctcaacagatggatcacattctgccagagcataatatcaacacttaca

SEQ ID NO: 13119 - DNA, 459 bp, Artificial Sequence
  derived and/or modified sequence
atgtatagaatgcaactgttgtcgtgtatagcactgtcactcgcactggtgacaaatagcgcaccaaccagtagttcaacgaaaaagacccagctgcagctcgagcacctgctgctagatctgcagatgattctgaacgggataaacaattacaaaaacccaaaactgacacggatgctgacattcaagttctacatgcccaagaaagctactgagctgaaacatctgcagtgcttagaggaagagttaaagcctctcgaggaagtgctcaacctggcccagagtaaaaacttccacttacggccacgggacctgatctctaatataaatgtgattgtgctggagctgaaaggaagcgaaactacttttatgtgcgagtacgccgatgaaacagcgaccatcgtagagtttctgaaccgatggatcacattttgccaaagcatcatctccacccttaca

SEQ ID NO: 13120 - DNA, 459 bp, Artificial Sequence
  derived and/or modified sequence
atgtaccgcatgcaacttctgagctgtatagcactgtctttagctctcgtcacgaacagcgctccaaccagttcttcaacaaagaagacacagctgcaactggaacatttactccttgatcttcagatgatcttaaacggcattaacaattataaaaatccaaaattgacacgtatgctgacatttaagttctatatgccgaagaaagcgacagagctcaaacatttacaatgcttggaagaggagctcaagcctctagaggaagttctgaatcttgctcaaagcaaaaattttcatctgcgccctagggacttaatttcaaacattaacgtgattgtacttgagcttaaaggaagcgaaactacattcatgtgcgagtatgcagatgaaaccgctaccatcgtagaattcttaaatcggtggatcaccttttgtcagagtattatttcaacgctaacc

SEQ ID NO: 13121 - DNA, 459 bp, Artificial Sequence
  derived and/or modified sequence
atgtatcgcatgcaacttctctcttgtatagccctgtctcttgcacttgttactaactctgcccccacaagtagtagtactaagaaaacacagcttcaactggaacatctcctccttgatctgcagatgatactgaatgggattaataactacaaaaatccaaagcttacacgcatgctgactttcaagttctatatgccaaaaaaagcaacagagctgaaacacttacagtgcctcgaggaagagctaaaaccactggaggaggtcctcaacctagctcaatctaaaaatttccacctaaggcctcgggatctcatatccaatatcaacgtgatcgtgctggaattaaaagggagtgaaactactttcatgtgtgaatatgccgatgagacagctacaatagtggaattcttaaaccgatggatcactttctgtcagtctataataagtacactgact

SEQ ID NO: 13122 - DNA, 459 bp, Artificial Sequence
  derived and/or modified sequence
atgtaccggatgcaactcctgagctgtatcgccttgtccctggccctcgtgacgaattccgcgcccacctcatcctcaacgaaaaagactcagttgcagctggaacatctgctcttggatcttcagatgatcctgaatggaataaacaattacaaaaaccccaaactcacccgcatgctcacctttaagttttacatgcctaagaaggcaactgagctcaagcatctgcagtgccttgaggaggaactcaaaccattggaggaagtgcttaatcttgctcaaagcaagaactttcatctgcgacctcgagatctcatcagcaacatcaacgtgatcgttctggaactgaagggatcggaaactaccttcatgtgtgaatacgcagacgagacggccaccattgtggaatttctgaacagatggattaccttttgccaatccatcatttcgaccctcact

SEQ ID NO: 13123 - DNA, 459 bp, Artificial Sequence
  derived and/or modified sequence
atgtatcggatgcagctgctctcatgcatagctctatctctggccctggtcacaaactctgctcctacgagttcctccactaagaagacgcaattgcaactggagcatttgctgttggacctccagatgattttgaacggaataaataactataagaatccgaaacttaccaggatgcttacatttaaattctatatgcccaagaaggcaaccgaactcaagcacctgcaatgcctagaggaggaattgaagccactcgaggaggtgctcaatctggcacagtcaaaaaattttcatctgcgtccgagagacctgatcagtaatatcaatgtgatagtccttgagctgaaaggctcagagaccacctttatgtgcgagtacgcagacgaaactgctaccattgtagagttcctgaaccggtggattaccttctgtcagtccattatctctacactgaca

SEQ ID NO: 13124 - DNA, 459 bp, Artificial Sequence
  derived and/or modified sequence
atgtaccgcatgcagctgctgtcctgtatcgcgctgtccctggccctcgtcaccaattctgcccctactagctcctcgacgaagaaaacccagctccagctcgaacatctgctgctggacctgcaaatgatcctgaacggaatcaataactacaaaaatccgaagttgacccggatgcttacttttaagttctacatgccgaagaaggccaccgagcttaagcacttgcagtgcctggaggaggagctgaagccactggaagaggtgcttaatcttgcgcagagcaagaacttccatctgcgccctcgcgacctcattagcaatatcaacgtcatcgtcctggaactgaagggaagcgagactacttttatgtgcgaatacgccgatgagactgcaactatcgttgaattcctgaatcggtggatcaccttttgccagtccattatctcgaccctcact

SEQ ID NO: 13125 - DNA, 462 bp, Artificial Sequence
  derived and/or modified sequence
atgtacagaatgcagctgctgagctgcatcgccctgagcctggccctggtgaccaacagcgcccccaccagcagcagcaccaagaagacccagctgcagctggagcacctgctgctggacctgcagatgatcctgaacggcatcaacaactacaagaaccccaagctgaccagaatgctgaccttcaagttctacatgcccaagaaggccaccgagctgaagcacctgcagtgcctggaggaggagctgaagcccctggaggaggtgctgaacctggcccagagcaagaacttccacctgagacccagagacctgatcagcaacatcaacgtgatcgtgctggagctgaagggcagcgagaccaccttcatgtgcgagtacgccgacgagaccgccaccatcgtggagttcctgaacagatggatcaccttctgccagagcatcatcagcaccctgacctag

SEQ ID NO: 13126 - DNA, 462 bp, Artificial Sequence
  derived and/or modified sequence
atgtatcggatgcagctgctttcatgcatcgctctgtcattggccctggtgaccaacagcgcccccacctcctcatcgacaaaaaaaacccagctgcagcttgagcatcttctcttagatctccagatgattttgaacggtattaataattacaagaatcctaagcttacgcgcatgctcacattcaagttctatatgccgaagaaggctactgaattaaaacacctgcagtgtctcgaggaagaactgaaaccattggaagaagtattaaacttggcccaatccaaaaacttccatctccgtcctcgggatctgatctcaaacataaacgttattgttctcgaactgaagggtagcgagactacgttcatgtgtgagtacgcagacgaaacagccaccatcgtagagtttctcaacaggtggatcacattttgtcaatccatcatcagcactcttacctag

SEQ ID NO: 13127 - DNA, 462 bp, Artificial Sequence
  derived and/or modified sequence
atgtacaggatgcagctgctgagctgcatcgccctgagcctggccctggtgaccaacagcgcccccaccagcagcagcaccaagaagacccagctgcagctggagcacctgctgctggacctgcagatgatcctgaatggcatcaacaactacaagaaccccaagctgaccaggatgctgaccttcaagttctacatgcccaagaaggccacagagctgaagcacctgcagtgcctggaggaggagctgaagcccctggaggaggtgctgaacctggcccagagcaagaacttccacctgcggccccgggacctgatcagcaacatcaacgtcatcgtgctggagctgaagggcagcgagaccaccttcatgtgtgaatatgcagatgaaacagccaccatcgtggagttcctgaaccgctggatcaccttctgccagagcatcatcagcaccctgacctag

SEQ ID NO: 13128 - DNA, 462 bp, Artificial Sequence
  derived and/or modified sequence
atgtaccggatgcagctgctgagctgcatcgccctgagcctggccttggtgacaaactctgcacctacgtcctcttctacgaagaaaactcagcttcagcttgaacaccttctgcttgacctgcaaatgatcttgaatggcatcaacaattataagaaccctaagctgaccaggatgctaaccttcaagttctatatgccaaaaaaggctactgagttaaagcaccttcagtgtctggaggaagaactgaaacctcttgaggaggtcctgaatttggcccaatctaaaaattttcacctgcgcccacgcgatctcatctccaatattaacgtcattgtcctggagcttaaagggtccgaaaccacatttatgtgcgagtacgctgatgagaccgccacaattgtcgagttcctcaataggtggatcacattctgtcagagtattatctctacactgacttag

SEQ ID NO: 13129 - DNA, 462 bp, Artificial Sequence
  derived and/or modified sequence
atgtatagaatgcaacttctatcatgcatcgccctatctttggcactggtaacaaattccgctcccacctcgtcctctactaaaaagacccaacttcagcttgagcacctcctgctggatcttcagatgatcctcaatggaatcaacaactacaagaatcctaaattaacgaggatgttaacgtttaaattctacatgccaaagaaagccaccgagctgaaacatctacaatgtcttgaagaagaactgaagccactggaagaagtgttaaacctggctcagtctaagaacttccatttgaggccgagggatttgattagcaatataaatgttatcgtgctggagcttaaggggagtgagaccacattcatgtgcgagtatgcagacgaaactgcgactatagtggaattcctgaacaggtggataactttttgtcagagcatcatctccaccttgacttag

SEQ ID NO: 13130 - DNA, 462 bp, Artificial Sequence
  derived and/or modified sequence
atgtaccgtatgcagctgctttcttgtattgccttatctctggctctggtcaccaatagtgcccctacttcctcctccactaagaagacacaattgcagttagaacatcttctgctcgatttacagatgatcttgaacggcatcaacaattacaaaaatcctaagcttacaagaatgctcacatttaaattttatatgccaaagaaggctaccgaacttaaacatctgcaatgcctagaggaagagttaaagcctctagaggaggtcttaaaccttgctcaatcaaaaaatttccatttgcgtccccgcgatttaatctccaacatcaatgttatagtactcgagctcaaaggctcagagacaacctttatgtgcgaatatgccgacgaaaccgctacaatcgttgaattcctcaatcgctggataaccttttgtcaaagtattatttcaacgctgacctag

SEQ ID NO: 13131 - DNA, 462 bp, Artificial Sequence
  derived and/or modified sequence
atgtaccgcatgcaactgctctcctgtatagctctctctctcgcactcgttaccaactccgctcccacatcttcgtcgaccaagaaaacacagctgcagctagagcaccttctgcttgacctccagatgatcttgaacgggatcaacaactataaaaatccaaaactcacaaggatgcttacatttaaattttacatgccaaaaaaagccactgaattgaaacacctgcagtgcctggaggaagagctgaagcctcttgaggaagtattgaacctggcccagtccaaaaactttcatctgcggccccgggatctcataagtaatatcaatgtcattgttctcgagctcaaaggcagcgaaaccacctttatgtgcgaatatgctgatgaaaccgctaccatcgtggaatttctgaatcgttggatcaccttttgtcagagtattatctcaacccttacttag

SEQ ID NO: 13132 - protein, 843 aa, Artificial Sequence
  derived and/or modified sequence
MKVISLFILVGFIGEFQSFSSASSPVNCQWDFYAPWSECNGCTKTQTRRRSVAVYGQYGGQPCVGNAFETQSCEPTRGCPTEEGCGERFRCFSGQCISKSLVCNGDSDCDEDSADEDRCEDSERRPSCDIDKPPPNIELTGNGYNELTGQFRNRVINTKSFGGQCRKVFSGDGKDFYRLSGNVLSYTFQVKINNDFNYEFYNSTWSYVKHTSTEHTSSSRKRSFFRSSSSSSRSYTSHTNEIHKGKSYQLLVVENTVEVAQFINNNPEFLQLAEPFWKELSHLPSLYDYSAYRRLIDQYGTHYLQSGSLGGEYRVLFYVDSEKLKQNDFNSVEEKKCKSSGWHFVVKFSSHGCKELENALKAASGTQNNVLRGEPFIRGGGAGFISGLSYLELDNPAGNKRRYSAWAESVTNLPQVIKQKLTPLYELVKEVPCASVKKLYLKWALEEYLDEFDPCHCRPCQNGGLATVEGTHCLCHCKPYTFGAACEQGVLVGNQAGGVDGGWSCWSSWSPCVQGKKTRSRECNNPPPSGGGRSCVGETTESTQCEDEELEHLRLLEPHCFPLSLVPTEFCPSPPALKDGFVQDEGTMFPVGKNVVYTCNEGYSLIGNPVARCGEDLRWLVGEMHCQKIACVLPVLMDGIQSHPQKPFYTVGEKVTVSCSGGMSLEGPSAFLCGSSLKWSPEMKNARCVQKENPLTQAVPKCQRWEKLQNSRCVCKMPYECGPSLDVCAQDERSKRILPLTVCKMHVLHCQGRNYTLTGRDSCTLPASAEKACGACPLWGKCDAESSKCVCREASECEEEGFSICVEVNGKEQTMSECEAGALRCRGQSISVTSIRPCAAETQ

SEQ ID NO: 13133 - protein, 486 aa, Artificial Sequence
  derived and/or modified sequence
MKVISLFILVGFIGEFQSFSSASSPVNCQWDFYAPWSECNGCTKTQTRRRSVAVYGQYGGQPCVGNAFETQSCEPTRGCPTEEGCGERFRCFSGQCISKSLVCNGDSDCDEDSADEDRCEDSERRPSCDIDKPPPNIELTGNGYNELTGQFRNRVLFYVDSEKLKQNDFNSVEEKKCKSSGWHFVVKFSSHGCKELENALKAASGTQNNVLRGEPFIRGGGAGFISGLSYLELDNPAGNKRRYSAWAESVTNLPQVIKQKLTPLYELVKEVPCASVKKLYLKWALEEYLDEFDPCHCRPCQNGGLATVEGTHCLCHCKPYTFGAACEQGVLVGNQAGGVDGGWSCWSSWSPCVQGKKTRSRECNNPPPSGGGRSCVGETTESTQCEDEELEHLRLLEPHCFPLSLVPTEFCPSPPALKDGFVQDEGTMFPVGKNVVYTCNEGYSLIGNPVARCGEDLRWLVGEMHCQNGKISNWMKVNETLLVEHH

SEQ ID NO: 13134 - protein, 343 aa, Artificial Sequence
  derived and/or modified sequence
MKVISLFILVGFIGEFQSFSSASSPVNCQWDFYAPWSECNGCTKTQTRRRSVAVYGQYGGQPCVGNAFETQSCEPTRGCPTEEGCGERFRCFSGQCISKSLVCNGDSDCDEDSADEDRCEDSERRPSCDIDKPPPNIELTGNGYNELTGQFRNRVINTKSFGGQCRKVFSGDGKDFYRLSGNVLSYTFQVKINNDFNYEFYNSTWSYVKHTSTEHTSSSRKRSFFRSSSSSSRSYTSHTNEIHKGKSYQLLVVENTVEVAQFINNNPEFLQLAEPFWKELSHLPSLYDYSAYRRLIDQYGTHYLQSGSLGGEYRVLFYVDSEKLKQNDFNSVEKKKKKKKKKK

SEQ ID NO: 13135 - DNA, 2532 bp, Artificial Sequence
  derived and/or modified sequence
atgaaggtcattagcctctttattcttgtaggatttattggagagttccagagtttttctagcgcctcctcgcctgtcaattgccaatgggatttttacgccccttggagcgagtgtaatggatgtaccaagacccaaactagacggcgttcggtcgccgtttacggtcagtatggtggccaaccatgtgttgggaatgcctttgagactcagagctgtgaaccaacgagagggtgccccactgaggagggctgtggcgaacggttcaggtgcttttcagggcagtgcattagcaaaagcttggtgtgtaacggcgatagtgactgtgacgaagactcagccgacgaagatcgttgtgaagactctgaacgaaggccaagctgcgatattgacaagccccctcccaatattgaactgaccggcaatgggtataatgagctaaccggccaattccgcaaccgggtcatcaacactaagtcctttggaggccagtgcagaaaggtgttttctggcgacggcaaggacttctatcgcctgtcgggcaatgtgctgagctacactttccaagtgaaaatcaacaatgatttcaactatgaattttataactcgacatggtcgtacgttaagcatacctccacagaacatactagtagtagccgtaagcgctcattctttaggtcttcctcgtcctccagtcggagctacacctcgcacactaacgagattcataaagggaagtcttatcaattgctcgttgttgagaacactgttgaggttgctcagttcattaacaataatcccgagtttctccagctggctgaaccgttttggaaagagctcagtcacttgccgtcactctacgactattccgcataccggcgcctcatagatcagtatggaacacactacctgcaatccggaagtttaggtggtgagtaccgggttttgttttacgtggactcagaaaagttgaagcagaatgacttcaattccgtggaggaaaaaaaatgtaagtcttccgggtggcatttcgttgtcaaattctcaagccatggatgcaaagaactagagaacgcccttaaagctgcatctggaactcagaacaacgttctgaggggggagccatttattcgcggagggggggcgggatttatcagcgggttatcctatctggagctagacaatcctgctggcaacaaaaggcgttacagcgcctgggccgaatccgtcacaaacctgccacaagtgataaagcagaaattaacacctctctatgaactcgtcaaagaggtgccatgcgcatctgtgaaaaaactgtacctcaagtgggccctggaagaatacctggatgagttcgatccatgccattgtcgaccatgccaaaacgggggtctcgctacagtggaggggacgcattgcctttgccactgcaaaccctatacatttggcgccgcatgcgaacagggggttttggtcggcaaccaggccgggggagtggacggaggatggtcctgctggagctcatggtccccatgtgtgcagggcaaaaagacgcggtcacgtgagtgcaacaatccacctccttcagggggcggccggagttgcgtaggggagaccaccgaatcaactcagtgcgaagacgaggagctggaacacctgagacttctggagcctcactgtttcccgttaagcctagtgcccactgaattctgtccttctcctccagctctcaaggatggctttgtgcaggatgaaggaacaatgtttcctgtcgggaaaaacgtcgtctacacctgcaatgagggatactcactcataggtaatccggtggcaaggtgtggggaggacctacggtggctagtgggagagatgcattgtcagaaaatagcctgtgtgctgccagtgctgatggacgggattcagtctcatccacagaagcccttctacaccgtgggcgaaaaagtgacagtttcctgttccggaggcatgagcttggaagggccaagcgcattcctgtgcggcagttccttaaaatggagtcccgaaatgaagaacgctcgttgtgtccagaaagaaaaccccctcactcaggcagtgccaaagtgtcagaggtgggagaaactgcagaactcccggtgcgtgtgcaaaatgccctacgagtgtggaccatctctcgatgtgtgtgcccaagacgagaggtccaagagaattctccccttaaccgtgtgcaagatgcatgtcctacactgtcagggccgcaattatacgttaaccggacgcgattcttgtaccctgcctgcctccgcagaaaaggcttgcggagcctgtccactgtggggaaaatgtgacgccgagagcagcaaatgcgtgtgtagggaagcctccgaatgtgaggaggaggggttctcgatctgcgtcgaagtgaacgggaaagaacagactatgtctgagtgcgaggccggagctctccgctgtaggggtcagagtataagcgtcacttccatccgcccctgcgctgccgagacccagtag

SEQ ID NO: 13136 - DNA, 2532 bp, Artificial Sequence
  derived and/or modified sequence
atgaaggtgatcagcctcttcatcctggtgggcttcatcggggagttccagagcttcagcagcgccagcagccctgtgaactgccagtgggacttctacgccccctggagcgagtgcaatggctgcaccaagacccagaccaggagaagatctgtggccgtgtatggccagtatggaggccagccctgtgtgggcaatgcctttgagacccagagctgtgagcccacccggggctgccccacagaggagggctgtggggagcgcttccgctgcttcagcggccagtgcatcagcaagagcctggtgtgcaatggagacagcgactgtgatgaagattctgcagatgaggacagatgtgaggacagcgagcggcggcccagctgtgacatcgacaagcccccacccaacatcgagctgactggaaatggctacaatgagctgaccggccagttcaggaacagagtcatcaacaccaagagctttggaggccagtgcaggaaggtgttttctggagatggcaaggacttctaccgcctgtctggaaatgtgctgagctacaccttccaggtgaagatcaacaatgacttcaactatgagttctacaacagcacctggagctatgtgaagcacaccagcacagagcacaccagcagcagcaggaagaggagcttcttccgcagcagcagcagcagcagccgcagctacaccagccacaccaatgagatccacaagggcaagagctaccagctgctggtggtggagaacacagtggaggtggcccagttcatcaacaacaaccctgagttcctgcagctggccgagcccttctggaaggagctgagccacctgcccagcctgtatgactacagcgcctacagaaggctgattgaccagtatggcacccactacctgcagagcggcagcctgggcggggagtacagagtgctcttctacgtggacagcgagaagctgaagcagaatgacttcaacagcgtggaggagaagaagtgcaagagcagcggctggcactttgtggtgaagttcagcagccacggctgcaaggagctggagaatgccctgaaggccgccagcggcacccagaacaacgtgctgcggggggagcccttcatccggggcggcggggccggcttcatcagcggcctgagctacctggagctggacaacccagctggcaacaagaggcgctacagcgcctgggccgagagcgtgaccaacctgccccaggtgatcaagcagaagctgacccccctgtatgagctggtgaaggaggtgccctgtgcctctgtgaagaagctgtacctgaagtgggccctggaggagtacctggatgaatttgacccctgccactgccggccctgccagaatggaggcctggccaccgtggagggcacccactgcctgtgccactgcaagccctacaccttcggggccgcctgtgagcagggcgtgctggtgggcaaccaggccggcggcgtggatggcggctggagctgctggagctcctggagcccctgtgtgcagggcaagaagaccaggagccgggagtgcaacaaccccccaccttctgggggcggccgcagctgtgtgggggagaccacagagagcacccagtgtgaagatgaggagctggagcacctgcggctgctggagccccactgcttccccctgagcctggtgcccacagagttctgccccagccccccagccctgaaggatggctttgtgcaggatgagggcaccatgtttcctgtgggcaagaatgtggtgtacacctgcaatgaaggctacagcctcatcggcaaccctgtggcccgctgtggggaggacctgcgctggctggtgggggagatgcactgccagaagatcgcctgtgtgctgcctgtgctgatggatggcatccagagccacccccagaagcccttctacacagtgggggagaaggtgacagtgtcctgcagcggcggcatgagcctggagggccccagcgccttcctgtgtggcagcagcctgaagtggagccctgagatgaagaatgcccgctgtgtgcagaaggagaaccccctgacccaggccgtgcccaagtgccagcgctgggagaagctgcagaacagccgctgtgtgtgcaagatgccctatgaatgtggccccagcctggatgtgtgtgcccaggatgagaggagcaagaggatcctgcccctgactgtgtgcaagatgcacgtgctgcactgccagggcaggaactacaccctgaccggccgggacagctgcaccctgcctgccagcgctgagaaggcctgtggggcctgccccctgtggggcaaatgtgatgctgagagcagcaaatgtgtgtgccgggaggcctctgaatgtgaggaggagggcttcagcatctgtgtggaggtgaatggcaaggagcagaccatgtctgaatgtgaggccggggccctgcgctgccggggccagagcatctctgtgaccagcatccggccctgtgccgctgagacccagtag

SEQ ID NO: 13137 - DNA, 2532 bp, Artificial Sequence
  derived and/or modified sequence
atgaaggtgatcagcctgttcatcctggtgggcttcatcggcgagttccagtccttctcatctgctagtagccctgtcaactgccagtgggacttttacgccccttggtccgaatgcaatggctgcaccaagactcagactcgcagacgctcagtcgccgtctatggccagtacggcggacagccttgtgtgggaaacgcctttgagacccaatcgtgcgagcctactcgtggatgcccaacggaggaggggtgcggcgagcgcttccggtgtttctcaggtcagtgcatttctaagagcctcgtctgtaatggcgactccgattgcgatgaggattccgcggacgaggacaggtgcgaggacagtgaacgcagaccttcttgcgacatcgataagcccccaccaaacatcgaactcaccggaaacggctacaatgagctgaccggccagtttaggaatagagtgatcaataccaaatctttcggtgggcagtgcaggaaagtcttcagcggagatggcaaggatttttaccgcctaagcgggaatgtactgtcatacacctttcaggtgaagatcaacaacgatttcaactacgagttttacaatagcacctggtcctacgtgaagcacactagcacggagcataccagctcttcaaggaagcgtagttttttcagatcaagtagttcaagtagccggtcttacacgtctcatactaacgagatacataaaggcaaatcctaccagctcctggtggttgagaacaccgtggaagtggcacagtttatcaacaacaatccggagttcctccagctcgccgagcctttttggaaagaattgtcccatctgcccagcctgtatgactacagcgcctacaggagactcatcgatcagtatggtacacactatctacagagcggctctttagggggagagtacagagtcctattctacgtagacagcgagaagctgaagcagaatgacttcaatagtgttgaggagaaaaagtgcaaatcctccgggtggcattttgttgtgaaatttagttcccacgggtgcaaagagctagagaatgctctcaaagcagccagtggcacacagaataatgtactgagaggggagccttttatcaggggagggggtgccgggttcatctccggcttgtcctacctcgaactggacaatcctgcaggcaacaagagaaggtattcggcttgggccgaatcagtcacgaacctgcctcaggtaatcaagcagaagcttactcctctgtacgaattagtgaaggaggtgccgtgcgcctcagtcaaaaagctgtacctgaaatgggcactcgaggaataccttgatgagttcgacccgtgtcactgccgaccttgccaaaatgggggcctggccacagtggaaggcacccattgcctgtgtcactgtaagccctatactttcggtgcagcctgtgagcagggcgtgctggtgggcaaccaggcaggtggcgtcgatggtgggtggagctgttggagctcatggtcgccatgtgtccagggtaaaaaaaccaggtccagagagtgcaataatcctcctcctagcgggggtggacggtcctgtgttggtgaaacaaccgaatccactcagtgtgaggatgaggagctggagcatctgcgcctgctagaaccccattgttttcccctaagcctggtgcctactgaattttgtccgtcgccacctgccctcaaagacgggttcgtgcaggacgagggtactatgttcccagtcggcaaaaatgtggtgtacacttgtaatgaaggatactctctgatagggaaccccgtggcgcgctgcggcgaagacttgagatggctggtgggcgagatgcactgccagaagattgcctgtgtgctcccagtgttgatggacggaattcagtcacacccacagaaacccttctacactgtcggggagaaagttaccgtatcttgttccggtgggatgagcctagaaggaccttctgcctttctatgcggctcttcactcaagtggagtcccgaaatgaagaatgcgcgatgtgttcaaaaggagaatccattgacacaagccgtaccaaaatgtcagcgttgggaaaagctgcagaactcccggtgcgtgtgcaaaatgccttatgagtgtggcccttctcttgatgtttgcgcccaagatgaaagaagtaaacggatcttgcccctcactgtttgtaagatgcatgttctgcactgccagggccgtaattatactttaaccggacgcgactcgtgcaccctcccggcaagcgccgaaaaagcatgtggcgcctgcccactgtgggggaagtgcgacgctgaatcttccaaatgtgtctgccgggaagcttctgaatgcgaagaggagggattcagcatttgtgtggaagttaatgggaaggagcagacgatgagtgagtgtgaggcaggagccctgcgctgccgcggacagtctatatcggtgacaagcatccggccatgcgctgcggagacccagtag

SEQ ID NO: 13138 - DNA, 2532 bp, Artificial Sequence
  derived and/or modified sequence
atgaaagtcatcagcctgtttatcttggtcggcttcataggcgaattccagtctttttctagtgccagctccccagtgaactgtcaatgggacttctacgctccttggtcggagtgcaacggctgcacgaagacccagactcgtcgaaggagcgtggctgtttatggtcaatacggcggtcaaccatgtgttggtaatgctttcgagacacagagttgtgagcctacccgcggatgccctaccgaggagggttgcggggagaggtttcgctgtttctccggacagtgcatttccaagagcctggtgtgtaatggagacagtgactgcgacgaggattccgcggatgaggaccgctgtgaggactccgagcgacgaccaagttgcgacatagacaagcctccacctaatattgagctgaccggcaacggctacaatgagctgaccggccagttcagaaatcgcgtgatcaatacaaagtccttcggcggtcagtgtcggaaggtgttttcaggtgatggcaaagatttttatcggttgagtggaaacgtcctcagctatactttccaggtgaaaatcaacaatgacttcaattacgaattctacaactccacttggtcgtacgtgaaacacacaagcacagaacacacaagcagctcacggaagaggagcttcttccgaagcagcagtagtagttcaaggagctataccagccacaccaacgaaattcacaaaggaaagtcataccaattgctcgtcgttgagaacacagtggaagtcgcccaattcatcaataacaacccggagtttctccagctcgccgaaccattttggaaagagttgtctcatctcccttctttgtacgactactctgcttacaggcgtctgatcgatcaatatggaacccactatctccagtcagggagcctgggaggggagtatagagtcctattctatgtggactctgaaaaacttaagcaaaatgattttaacagcgttgaggagaagaagtgcaaatcgtcaggttggcacttcgtagtgaaatttagtagccacggttgcaaggagctagaaaatgctctgaaggctgcgagtggtacgcagaataatgtgctgaggggtgaacctttcatcaggggaggcggtgccggatttatttcaggtttgtcctacctggagctggataatccagcgggaaacaagcgacgttactctgcatgggcagagtctgttaccaacttgccacaggtcatcaagcaaaaactcacgcccctttacgagcttgtcaaggaggtgccctgcgcatcagtcaagaaactctatctgaaatgggcactggaagaatatctggacgaattcgacccctgccactgtcgaccttgtcaaaacgggggactcgcgacagtggagggcacccactgcttatgccattgtaagccctatacgttcggtgctgcgtgtgaacagggcgtgcttgtgggcaatcaggctggaggggtggatggtgggtggtcttgctggagttcatggagcccttgcgtccaggggaaaaagacccggtccagagagtgcaacaatcctcccccatcaggcggaggtcgttcctgcgtgggagaaactactgagagcactcagtgcgaggacgaagaactggaacatctgcgactgctcgaacctcactgttttccactctccctcgtgccaactgaattttgtccttccccccctgcactgaaagacggattcgtacaggacgaaggaactatgtttcctgtgggcaaaaatgtagtgtacacatgcaacgagggttattccctgataggtaatcccgtagcacgctgcggagaggatcttagatggctagtgggtgagatgcactgtcagaaaattgcctgcgtgttaccagtgcttatggacggaatccagtcccaccctcaaaaacccttctatactgtcggggagaaggttacagtaagctgcagcgggggaatgagcttggaggggcctagcgcctttctgtgtgggtccagcctgaagtggtcacctgaaatgaaaaacgctaggtgcgtccagaaggagaatccactcacacaagccgtaccgaagtgccagaggtgggagaaattacagaacagcagatgcgtgtgcaagatgccttatgagtgcggcccatcattagacgtttgtgctcaagatgaaagatcaaagaggattctgccactcaccgtgtgcaaaatgcacgtcctgcactgccagggtcggaactatactctgactgggagggactcatgcaccttgccagcaagcgccgagaaagcctgcggggcatgccccctgtggggcaagtgtgatgccgagtcatccaagtgtgtgtgtcgagaagccagtgagtgtgaagaagagggtttctcgatatgtgtggaagtaaacggcaaggagcagactatgtccgaatgcgaagccggagccctgcgatgtaggggccagtcaattagcgtcacatctattcgcccttgtgcggctgagacacagtag

SEQ ID NO: 13139 - DNA, 4257 bp, Artificial Sequence
  derived and/or modified sequence
attgaactgagaacatttgctgtgtttcctgatttatagatatgtttctaagaaacatatctataacttccaaacagtcccagctggctgtagctaaggctgtgtaattgataagatgcatctggtttcaaggcacagattaagtacaaggtcaggctcttgctgtcgttggagaatccggttggggtaggagctaaatctcaggaccacttgctctatatatgagtgccaagataatctagagcagggagaggcagagaggcaggcagcctgctgggctcttcctgctgttgaaaacttacccggcccttacagaggaaatcttcctcctctcttctgccctgaatgttttcccaaacatgaaggtgataagcttattcattttggtgggatttataggagagttccaaagtttttcaagtgcctcctctccagtcaactgccagtgggacttctatgccccttggtcagaatgcaatggctgtaccaagactcagactcgcaggcggtcagttgctgtgtatgggcagtatggaggccagccttgtgttggaaatgcttttgaaacacagtcctgtgaacctacaagaggatgtccaacagaggagggatgtggagagcgtttcaggtgcttttcaggtcagtgcatcagcaaatcattggtttgcaatggggattctgactgtgatgaagacagtgctgatgaagacagatgtgaggactcagaaaggagaccttcctgtgatatcgataaacctcctcctaacatagaacttactggaaatggttacaatgaactcactggccagtttaggaacagagtcatcaataccaaaagttttggtggtcaatgtagaaaggtgtttagtggggatggaaaagatttctacaggctgagtggaaatgtcctgtcctatacattccaggtgaaaataaataatgattttaattatgaattttacaatagtacttggtcttatgtaaaacatacgtcgacagaacacacatcatctagtcggaagcgctccttttttagatcttcatcatcttcttcacgcagttatacttcacataccaatgaaatccataaaggaaagagttaccaactgctggttgttgagaacactgttgaagtggctcagttcattaataacaatccagaatttttacaacttgctgagccattctggaaggagctttcccacctcccctctctgtatgactacagtgcctaccgaagattaatcgaccagtacgggacacattatctgcaatctgggtcgttaggaggagaatacagagttctattttatgtggactcagaaaaattaaaacaaaatgattttaattcagtcgaagaaaagaaatgtaaatcctcaggttggcattttgtcgttaaattttcaagtcatggatgcaaggaactggaaaacgctttaaaagctgcttcaggaacccagaacaatgtattgcgaggagaaccgttcatcagagggggaggtgcaggcttcatatctggccttagttacctagagctggacaatcctgctggaaacaaaaggcgatattctgcctgggcagaatctgtgactaatcttcctcaagtcataaaacaaaagctgacacctttatatgagctggtaaaggaagtaccttgtgcctctgtgaaaaaactatacctgaaatgggctcttgaagagtatctggatgaatttgacccctgtcattgccggccttgtcaaaatggtggtttggctactgttgaggggacccattgtctgtgccattgcaaaccgtacacatttggtgcggcgtgtgagcaaggagtcctcgtagggaatcaagcaggaggggttgatggaggttggagttgctggtcctcttggagcccctgtgtccaagggaagaaaacaagaagccgtgaatgcaataacccacctcccagtgggggtgggagatcctgcgttggagaaacgacagaaagcacacaatgcgaagatgaggagctggagcacttgaggttgcttgaaccacattgctttcctttgtctttggttccaacagaattctgtccatcacctcctgccttgaaagatggatttgttcaagatgaaggtacaatgtttcctgtggggaaaaatgtagtgtacacttgcaatgaaggatactctcttattggaaacccagtggccagatgtggagaagatttacggtggcttgttggggaaatgcattgtcagaaaattgcctgtgttctacctgtactgatggatggcatacagagtcacccccaaaaacctttctacacagttggtgagaaggtgactgtttcctgttcaggtggcatgtccttagaaggtccttcagcatttctctgtggctccagccttaagtggagtcctgagatgaagaatgcccgctgtgtacaaaaagaaaatccgttaacacaggcagtgcctaaatgtcagcgctgggagaaactgcagaattcaagatgtgtttgtaaaatgccctacgaatgtggaccttccttggatgtatgtgctcaagatgagagaagcaaaaggatactgcctctgacagtttgcaagatgcatgttctccactgtcagggtagaaattacacccttactggtagggacagctgtactctgcctgcctcagctgagaaagcttgtggtgcctgcccactgtggggaaaatgtgatgctgagagcagcaaatgtgtctgccgagaagcatcggagtgcgaggaagaagggtttagcatttgtgtggaagtgaacggcaaggagcagacgatgtctgagtgtgaggcgggcgctctgagatgcagagggcagagcatctctgtcaccagcataaggccttgtgctgcggaaacccagtaggctcctggaggccctggtcagcttgcttggaatccagcaggcagctggggctgagtgaaaacatctgcacaactgggcactggacagcttttccttcttctccagtgtctaccttcctcctcaactcccagccatctgtataaacacaatcctttgttctcccaaatctgaatcgaattactcttttgcctcctttttaatgtcagtaaggatatgagcctttgcacaggctggctgcgtgttcttgaaataggtgttaccttctctgggccttggttttttaaaatctgtaaaattagaggattgcactagagaaacttgaatgctccattcaggcctatcattttattaagtatgattgacacagcccatgggccagaacacactctacaaaatgactaggataacagaaagaacgtgatctcctgattagagagggtggttttcctcaatggaaccaaatataaagaggacttgaacaaaaatgacagatacaaactatttctatcctgagtagtaatctcacacttcatcctatagagtcaaccaccacagataggaattccttattctttttttaatttttttaagacagagtctcactttgttgcccaggctggagcgcagtggggtgatctcatctccctgcaacctccgcctcctgggttcaagcgattcttgtgcctcagcttcccaagcagctgggattacaggtgcccgccaccacgcccagctaatttttgcatttttagtagagatggggtttcaccatgttggccacgctcgtctccaactcctgacctcaggtaatccgcctgccttggcctcccaaagtgctgggattacagacatgaaccaccacgcctggctggaatacttactcttgtcgggagattgaaccactaaaatgttagagcagaattcattatgctgtggtcacaggggtgtcttgtctgagaacaaatacaattcagtcttctctttggggttttagtatgtgtcaaacataggactggaagtttgcccctgttcttttttcttttgaaagaacatcagttcatgcctgaggcatgagtgactgtgcatttgagaatagttttccctattctgtggatacagtcccagagttttcagggagtacacaggtagattagtttgaagcattgaccttttatttattccttatttctctttcatcaaaacaaaacagcagctgtgggaggagaaatgagagggcttaaatgaaatttaaaataagctatattatacaaatactatctctgtattgttctgaccctggtaaatatatttcaaaacttcagatgacaaggattagaacactcattaaagatgctattcttcagaa

SEQ ID NO: 13140 - DNA, 2532 bp, Artificial Sequence
  derived and/or modified sequence
atgaaggtgatcagcctgttcatcctggtgggcttcatcggcgagttccagagcttcagcagcgccagcagccccgtgaactgccagtgggacttctacgccccctggagcgagtgcaacggctgcaccaagacccagaccagaagaagaagcgtggccgtgtacggccagtacggcggccagccctgcgtgggcaacgccttcgagacccagagctgcgagcccaccagaggctgccccaccgaggagggctgcggcgagagattcagatgcttcagcggccagtgcatcagcaagagcctggtgtgcaacggcgacagcgactgcgacgaggacagcgccgacgaggacagatgcgaggacagcgagagaagacccagctgcgacatcgacaagcccccccccaacatcgagctgaccggcaacggctacaacgagctgaccggccagttcagaaacagagtgatcaacaccaagagcttcggcggccagtgcagaaaggtgttcagcggcgacggcaaggacttctacagactgagcggcaacgtgctgagctacaccttccaggtgaagatcaacaacgacttcaactacgagttctacaacagcacctggagctacgtgaagcacaccagcaccgagcacaccagcagcagcagaaagagaagcttcttcagaagcagcagcagcagcagcagaagctacaccagccacaccaacgagatccacaagggcaagagctaccagctgctggtggtggagaacaccgtggaggtggcccagttcatcaacaacaaccccgagttcctgcagctggccgagcccttctggaaggagctgagccacctgcccagcctgtacgactacagcgcctacagaagactgatcgaccagtacggcacccactacctgcagagcggcagcctgggcggcgagtacagagtgctgttctacgtggacagcgagaagctgaagcagaacgacttcaacagcgtggaggagaagaagtgcaagagcagcggctggcacttcgtggtgaagttcagcagccacggctgcaaggagctggagaacgccctgaaggccgccagcggcacccagaacaacgtgctgagaggcgagcccttcatcagaggcggcggcgccggcttcatcagcggcctgagctacctggagctggacaaccccgccggcaacaagagaagatacagcgcctgggccgagagcgtgaccaacctgccccaggtgatcaagcagaagctgacccccctgtacgagctggtgaaggaggtgccctgcgccagcgtgaagaagctgtacctgaagtgggccctggaggagtacctggacgagttcgacccctgccactgcagaccctgccagaacggcggcctggccaccgtggagggcacccactgcctgtgccactgcaagccctacaccttcggcgccgcctgcgagcagggcgtgctggtgggcaaccaggccggcggcgtggacggcggctggagctgctggagcagctggagcccctgcgtgcagggcaagaagaccagaagcagagagtgcaacaaccccccccccagcggcggcggcagaagctgcgtgggcgagaccaccgagagcacccagtgcgaggacgaggagctggagcacctgagactgctggagccccactgcttccccctgagcctggtgcccaccgagttctgccccagcccccccgccctgaaggacggcttcgtgcaggacgagggcaccatgttccccgtgggcaagaacgtggtgtacacctgcaacgagggctacagcctgatcggcaaccccgtggccagatgcggcgaggacctgagatggctggtgggcgagatgcactgccagaagatcgcctgcgtgctgcccgtgctgatggacggcatccagagccacccccagaagcccttctacaccgtgggcgagaaggtgaccgtgagctgcagcggcggcatgagcctggagggccccagcgccttcctgtgcggcagcagcctgaagtggagccccgagatgaagaacgccagatgcgtgcagaaggagaaccccctgacccaggccgtgcccaagtgccagagatgggagaagctgcagaacagcagatgcgtgtgcaagatgccctacgagtgcggccccagcctggacgtgtgcgcccaggacgagagaagcaagagaatcctgcccctgaccgtgtgcaagatgcacgtgctgcactgccagggcagaaactacaccctgaccggcagagacagctgcaccctgcccgccagcgccgagaaggcctgcggcgcctgccccctgtggggcaagtgcgacgccgagagcagcaagtgcgtgtgcagagaggccagcgagtgcgaggaggagggcttcagcatctgcgtggaggtgaacggcaaggagcagaccatgagcgagtgcgaggccggcgccctgagatgcagaggccagagcatcagcgtgaccagcatcagaccctgcgccgccgagacccagtag

SEQ ID NO: 13141 - protein, 19 aa, Artificial Sequence
  derived and/or modified sequence
MSRLPVLLLLQLLVRPGLQ

SEQ ID NO: 13142 - protein, 152 aa, Artificial Sequence
  derived and/or modified sequence
MSRLPVLLLLQLLVRPGLQAPMTQTTPLKTSWVNCSNMIDEIITHLKQPPLPLLDFNNLNGEDQDILMENNLRRPNLEAFNRAVKSLQNASAIESILKNLLPCLPLATAAPTRHPIHIKDGDWNEFRRKLTFYLKTLENAQAQQTTLSLAIF

SEQ ID NO: 13143 - DNA, 459 bp, Artificial Sequence
  derived and/or modified sequence
atgagccgactgcctgtgctgttactgctccaactgctggtcagacctggactccaggctccaatgacccagactacccccctcaagacctcttgggtaaactgtagcaatatgattgacgagatcattacacacctgaaacaacccccactgccactcctcgactttaacaacctcaatggggaggaccaggacatactgatggagaataatcttcggcggccgaacctagaagcgtttaatagagcagttaagagtctccagaatgctagcgcgatagagtcgattctaaagaatctgttgccctgtttgcccctggccactgctgcccctaccaggcatcccattcatattaaggatggagactggaacgagtttcgcagaaagctgaccttctacctcaaaactctcgagaatgcacaggctcagcaaaccactctgagccttgccatattctag

SEQ ID NO: 13144 - DNA, 1050 bp, Artificial Sequence
  derived and/or modified sequence
gaggttccatgtcagataaagatccttccgacgcctgccccacaccaccacctccccccgccttgcccggggttgtgggcaccttgctgctgcacatataaggcgggaggctgttgccaactcttcagagccccacgaaggaccagaacaagacagagtgcctcctgccgatccaaacatgagccgcctgcccgtcctgctcctgctccaactcctggtccgccccggactccaagctcccatgacccagacaacgcccttgaagacaagctgggttaactgctctaacatgatcgatgaaattataacacacttaaagcagccacctttgcctttgctggacttcaacaacctcaatggggaagaccaagacattctgatggaaaataaccttcgaaggccaaacctggaggcattcaacagggctgtcaagagtttacagaacgcatcagcaattgagagcattcttaaaaatctcctgccatgtctgcccctggccacggccgcacccacgcgacatccaatccatatcaaggacggtgactggaatgaattccggaggaaactgacgttctatctgaaaacccttgagaatgcgcaggctcaacagacgactttgagcctcgcgatcttttgagtccaacgtccagctcgttctctgggccttctcaccacagagcctcgggacatcaaaaacagcagaacttctgaaacctctgggtcatctctcacacattccaggaccagaagcatttcaccttttcctgcggcatcagatgaattgttaattatctaatttctgaaatgtgcagctcccatttggccttgtgcggttgtgttctcatttttatcccattgagactatttatttatgtatgtatgtatttatttatttattgcctggagtgtgaactgtatttattttagcagaggagccatgtcctgctgcttctgcaaaaaactcagagtggggtggggagcatgttcatttgtacctcgagttttaaactggttcctagggatgtgtgagaataaactagactctgaaca

SEQ ID NO: 13145 - DNA, 459 bp, Artificial Sequence
  derived and/or modified sequence
atgagccggctgcctgtgctgctgctgctgcagctgctggtgcggcccggcctgcaggcccccatgacccagaccacccccctgaagacctcctgggtgaactgcagcaacatgattgatgagatcatcacccacctgaagcagccccccctgcccctgctggacttcaacaacctgaatggagaggaccaggacatcctgatggagaacaacctgcggcggcccaacctggaggccttcaacagagctgtgaagagcctgcagaatgccagcgccatcgagagcatcctgaagaacctgctgccctgcctgcccctggccacagctgcccccaccaggcaccccatccacatcaaggatggagactggaatgagttccggaggaagctgaccttctacctgaagaccctggagaatgcccaggcccagcagaccaccctgagcctggccatcttctag

SEQ ID NO: 13146 - DNA, 459 bp, Artificial Sequence
  derived and/or modified sequence
atgagccggctgcccgtgctgctgctgctgcagctgctggtgcggccaggccttcaggctcctatgactcagacaacacctttgaagacatcctgggtgaactgcagtaatatgatcgatgaaatcattacacacctgaagcaacctccccttccgctccttgattttaataatctcaacggcgaagaccaggatatattgatggagaacaacctgcggaggcctaatctggaagccttcaacagagcagtgaaatctctgcagaacgcgtctgcgatcgaaagcattctcaagaatctcctaccttgcctcccgctggccaccgcagcgcctacccgacaccccatacacatcaaggacggcgattggaacgagttccgccgcaagttgacattttatttgaagacacttgagaacgctcaagcacagcaaactaccttaagtctggctatattttag

SEQ ID NO: 13147 - DNA, 459 bp, Artificial Sequence
  derived and/or modified sequence
atgtccaggctgcccgtcctcctgctgctccagctgttagtaagacccggattacaagcccctatgacgcaaactaccccactgaaaacttcatgggtcaactgctctaacatgattgacgagatcattacgcatttgaagcaaccccctcttccactcctggacttcaataacctgaacggagaagatcaggacattttgatggagaataaccttcgcagaccaaatttggaggcattcaaccgcgctgtgaaatccctccaaaacgcctctgccattgagtctattctgaagaatctgttgccttgtttacccctggctactgcagcccctacacggcaccccattcacattaaggacggtgattggaacgagtttaggagaaaattaacattctaccttaagaccctagagaatgctcaagcccaacaaactacgctttcattggctatcttctag

SEQ ID NO: 13148 - DNA, 459 bp, Artificial Sequence
  derived and/or modified sequence
atgagcagactgcccgtgctgctgctgctgcagctgctggtgagacccggcctgcaggcccccatgacccagaccacccccctgaagaccagctgggtgaactgcagcaacatgatcgacgagatcatcacccacctgaagcagccccccctgcccctgctggacttcaacaacctgaacggcgaggaccaggacatcctgatggagaacaacctgagaagacccaacctggaggccttcaacagagccgtgaagagcctgcagaacgccagcgccatcgagagcatcctgaagaacctgctgccctgcctgcccctggccaccgccgcccccaccagacaccccatccacatcaaggacggcgactggaacgagttcagaagaaagctgaccttctacctgaagaccctggagaacgcccaggcccagcagaccaccctgagcctggccatcttctag

SEQ ID NO: 13149 - protein, 153 aa, Artificial Sequence [sequence omitted]

SEQ ID NO: 13150 - DNA, 616 bp, Artificial Sequence
  derived and/or modified sequence
tgcatcgttagcttctcctgataaactaattgcctcacattgtcactgcaaatcgacacctattaatgggtctcacctcccaactgcttccccctctgttcttcctgctagcatgtgccggcaactttgtccacggacacaagtgcgatatcaccttacaggagatcatcaaaactttgaacagcctcacagagcagaagactctgtgcaccgagttgaccgtaacagacatctttgctgcctccaagaacacaactgagaaggaaaccttctgcagggctgcgactgtgctccggcagttctacagccaccatgagaaggacactcgctgcctgggtgcgactgcacagcagttccacaggcacaagcagctgatccgattcctgaaacggctcgacaggaacctctggggcctggcgggcttgaattcctgtcctgtgaaggaagccaaccagagtacgttggaaaacttcttggaaaggctaaagacgatcatgagagagaaatattcaaagtgttcgagctgaatattttaatttatgagtttttgatagctttattttttaagtatttatatatttataactcatcataaaataaagtatatatagaatct

SEQ ID NO: 13151 - DNA, 462 bp, Artificial Sequence
  derived and/or modified sequence
atgggcctgaccagccagctgctgccccccctgttcttcctgctggcctgcgccggcaacttcgtgcacggccacaagtgcgacatcaccctgcaggagatcatcaagaccctgaacagcctgaccgagcagaagaccctgtgcaccgagctgaccgtgaccgacatcttcgccgccagcaagaacaccaccgagaaggagaccttctgcagagccgccaccgtgctgagacagttctacagccaccacgagaaggacaccagatgcctgggcgccaccgcccagcagttccacagacacaagcagctgatcagattcctgaagagactggacagaaacctgtggggcctggccggcctgaacagctgccccgtgaaggaggccaaccagagcaccctggagaacttcctggagagactgaagaccatcatgagagagaagtacagcaagtgcagcagctag

SEQ ID NO: 13152 - DNA, 462 bp, Artificial Sequence
  derived and/or modified sequence
atgggactcacatctcaacttctccctccacttttcttcctgctggcctgtgctggtaactttgtacatggccataaatgcgatatcactctgcaagaaattatcaaaacactaaacagcctgacagagcagaaaaccctgtgtactgaactgacagttaccgacatcttcgccgcttcaaagaatacaacggaaaaggagacattctgccgagctgccaccgtgcttagacaattctattcgcatcacgaaaaggacacgcggtgcctgggtgccactgctcagcagtttcaccgtcacaagcagttaataagattcctgaaacggctggacaggaatctctggggcctggccggactaaactcttgtcccgtgaaagaggccaatcaatctaccttggagaatttcctggagcgacttaaaacaatcatgagggagaagtacagtaagtgctcttcctag

SEQ ID NO: 13153 - DNA, 462 bp, Artificial Sequence
  derived and/or modified sequence
atgggcctgaccagccagctgctgcccccactcttcttcctgctggcctgtgccggcaactttgtgcacggccacaagtgtgacatcaccctgcaggagatcatcaagaccctgaacagcctgacagagcagaagaccctgtgcacagagctgactgtgacagacatctttgctgccagcaagaacaccacagagaaggagaccttctgccgggccgccaccgtgctgcggcagttctacagccaccacgagaaggacacccgctgcctgggcgccacagcccagcagttccaccgccacaagcagctgatccgcttcctgaagaggctggacaggaacctgtggggcctggccggcctgaacagctgccctgtgaaggaggccaaccagagcaccctggagaacttcctggagcggctgaagaccatcatgagggagaagtacagcaagtgcagcagctag

SEQ ID NO: 13154 - DNA, 462 bp, Artificial Sequence
  derived and/or modified sequence
atgggcctgaccagccagctgctgccccccctgttcttcctgctggcatgcgctggaaacttcgtgcacgggcacaagtgcgacatcacactgcaagagattataaaaacactgaacagtctgaccgaacaaaagacactttgcaccgagctgaccgtaacagatatattcgcagcctctaagaacactaccgagaaagagacattctgccgggccgcaactgtccttagacagttttacagtcatcacgagaaagacacaagatgcctcggggccactgcacagcaatttcatcgacataagcagcttattcggttccttaagagactggaccgaaacctctggggcctagctggtcttaacagttgcccagtaaaagaagcaaaccagtcaactctcgaaaattttctggagagactcaaaaccatcatgagggaaaagtactcgaagtgttcctcctag

SEQ ID NO: 13155 - DNA, 462 bp, Artificial Sequence
  derived and/or modified sequence
atgggacttactagtcaattgctacccccattgttttttttgcttgcttgtgccggaaattttgtgcacggccataaatgtgacatcacactgcaggagataataaagaccctgaactcactgacggagcagaaaacgctgtgcacagagcttacagtgacagatatctttgctgcatccaaaaacaccacggagaaagaaacattttgcagggcagccaccgttctgaggcaattctactcacaccacgagaaggatacaaggtgcttaggtgccaccgctcagcagtttcatcgccacaaacaactcattcgtttcctcaagaggctcgatagaaacctctgggggctggccggactgaatagctgcccagtcaaggaggccaaccagtcaaccctagagaattttctagaaagactcaagaccatcatgcgtgaaaaatacagcaaatgcagcagctag

SEQ ID NO: 13156 - DNA, 642 bp, Artificial Sequence
  derived and/or modified sequence
tgcatcgttagcttctcctgataaactaattgcctcacattgtcactgcaaatcgacacctattaatgggtctcacctcccaactgcttccccctctgttcttcctgctagcatgtgccggcaactttgtccacggacacaagtgcgatatcaccttacaggagatcatcaaaactttgaacagcctcacagagcagaagactctgtgcaccgagttgaccgtaacagacatctttgctgcctccaagaacacaactgagaaggaaaccttctgcagggctgcgactgtgctccggcagttctacagccaccatgagaaggacactcgctgcctgggtgcgactgcacagcagttccacaggcacaagcagctgatccgattcctgaaacggctcgacaggaacctctggggcctggcgggcttgaattcctgtcctgtgaaggaagccaaccagagtacgttggaaaacttcttggaaaggctaaagacgatcatgagagagaaatattcaaagtgttcgagctgaatattttaatttatgagtttttgatagctttattttttaagtatttatatatttataactcatcataaaataaagtatatatagaatctaaaaaaaaaaaaaaaaaaaaaaaaaa

SEQ ID NO: 13157 - protein, 144 aa, Artificial Sequence
  derived and/or modified sequence
MLLAMVLTSALLLCSVAGQGCPTLAGILDINFLINKMQEDPASKCHCSANVTSCLCLGIPSDNCTRPCFSERLSQMTNTTMQTRYPLIFSRVKKSVEVLKNNKCPYFSCEQPCNQTTAGNALTFLKSLLEIFQKEKMRGMRGKI

SEQ ID NO: 13158 - DNA, 435 bp, Artificial Sequence
  derived and/or modified sequence
atgctgctggccatggtgctgaccagcgccctgctgctgtgcagcgtggccggccagggctgccccaccctggccggcatcctggacatcaacttcctgatcaacaagatgcaggaggaccccgccagcaagtgccactgcagcgccaacgtgaccagctgcctgtgcctgggcatccccagcgacaactgcaccagaccctgcttcagcgagagactgagccagatgaccaacaccaccatgcagaccagataccccctgatcttcagcagagtgaagaagagcgtggaggtgctgaagaacaacaagtgcccctacttcagctgcgagcagccctgcaaccagaccaccgccggcaacgccctgaccttcctgaagagcctgctggagatcttccagaaggagaagatgagaggcatgagaggcaagatctag

SEQ ID NO: 13159 - DNA, 435 bp, Artificial Sequence
  derived and/or modified sequence
atgctgctggctatggtgttgacaagtgcactgttgctgtgcagcgtagcagggcagggctgccccactcttgccggaatccttgacattaacttcctcatcaacaaaatgcaggaagaccccgcaagcaagtgccattgttcagccaatgtgacgagctgtctgtgcctcgggattccatccgacaactgcacacgcccatgtttctccgaaagactgtcacaaatgaccaacaccacaatgcagaccagatatcccttgatcttctcgagagtgaagaagagcgtcgaggtgttgaaaaacaataagtgcccgtatttctcttgcgagcaaccttgcaaccagacgactgcaggtaatgcactgacatttctgaagtcactcctcgagatctttcagaaggagaaaatgcgaggtatgcggggaaagatctag

SEQ ID NO: 13160 - DNA, 435 bp, Artificial Sequence
  derived and/or modified sequence
atgctgctggccatggtgctgaccagcgccctgctgctgtgcagcgtggccggccagggctgccccaccctggccggcatcctggacatcaacttcctgatcaacaagatgcaggaggaccctgccagcaagtgccactgcagcgccaacgtgaccagctgcctgtgcctgggcatccccagcgacaactgcacccggccctgcttcagcgagcggctgagccagatgaccaacaccaccatgcagacccgctaccccctcatcttcagccgggtgaagaagtctgtggaggtgctgaagaacaacaagtgcccctacttcagctgtgagcagccctgcaaccagaccacagctggaaatgccctgaccttcctgaagagcctgctggagatcttccagaaggagaagatgaggggcatgaggggcaagatctag

SEQ ID NO: 13161 - DNA, 435 bp, Artificial Sequence
  derived and/or modified sequence
atgctgctggccatggtgctgaccagcgccctgctgctgtgcagcgttgctggccaggggtgccctacactggccggaattcttgatatcaatttcctgataaacaagatgcaggaagatccagcaagcaagtgccactgcagtgctaacgtcacctcatgtctgtgccttggcatacctagcgacaattgtaccaggccttgcttctctgaacgactgtcgcagatgactaatacgacaatgcagactagatatcctctgatcttctccagggtgaagaagtccgtcgaagtgctgaagaataataagtgtccatatttttcctgcgagcaaccatgcaatcagacaaccgctgggaacgccctcactttcctgaagtctctgctggaaatctttcagaaagaaaagatgcggggtatgagaggcaagatctag

SEQ ID NO: 13162 - DNA, 435 bp, Artificial Sequence
  derived and/or modified sequence
atgctgctggccatggtgctaaccagcgcgctgctactttgctctgtggctgggcagggctgtccaacactggcaggtattttggatataaactttttgatcaataagatgcaggaagatcctgctagtaagtgccattgtagtgccaatgtgacttcctgtctgtgcctgggcataccctcagacaactgcacacgtccttgctttagtgagaggctgtcacaaatgacaaatactacaatgcagacacgttacccactgatattctcacgagtcaaaaaatcggtggaagtgctcaagaataacaagtgtccttatttctcctgtgagcagccctgtaatcagacaaccgctgggaatgctctcacctttttgaagagtctgctggaaatcttccaaaaagagaagatgcggggaatgagggggaagatctag

SEQ ID NO: 13163 - DNA, 591 bp, Artificial Sequence
  derived and/or modified sequence
ccgctgtcaagatgcttctggccatggtccttacctctgccctgctcctgtgctccgtggcaggccaggggtgtccaaccttggcggggatcctggacatcaacttcctcatcaacaagatgcaggaagatccagcttccaagtgccactgcagtgctaatgtgaccagttgtctctgtttgggcattccctctgacaactgcaccagaccatgcttcagtgagagactgtctcagatgaccaataccaccatgcaaacaagatacccactgattttcagtcgggtgaaaaaatcagttgaagtactaaagaacaacaagtgtccatatttttcctgtgaacagccatgcaaccaaaccacggcaggcaacgcgctgacatttctgaagagtcttctggaaattttccagaaagaaaagatgagagggatgagaggcaagatatgaagatgaaatattatttatcctatttattaaatttaaaaagctttctctttaagttgctacaatttaaaaatcaagtaagctactctaaatcagtatcagttgtgattatttgtttaacattgtatgtctttattttgaaataaat

SEQ ID NO: 13164 - protein, 808 aa, Artificial Sequence
  derived and/or modified sequence
MAELLASAGSACSWDFPRAPPSFPPPAASRGGLGGTRSFRPHRGAESPRPGRDRDGVRVPMASSRCPAPRGCRCLPGASLAWLGTVLLLLADWVLLRTALPRIFSLLVPTALPLLRVWAVGLSRWAVLWLGACGVLRATVGSKSENAGAQGWLAALKPLAAALGLALPGLALFRELISWGAPGSADSTRLLHWGSHPTAFVVSYAAALPAAALWHKLGSLWVPGGQGGSGNPVRRLLGCLGSETRRLSLFLVLVVLSSLGEMAIPFFTGRLTDWILQDGSADTFTRNLTLMSILTIASAVLEFVGDGIYNNTMGHVHSHLQGEVFGAVLRQETEFFQQNQTGNIMSRVTEDTSTLSDSLSENLSLFLWYLVRGLCLLGIMLWGSVSLTMVTLITLPLLFLLPKKVGKWYQLLEVQVRESLAKSSQVAIEALSAMPTVRSFANEEGEAQKFREKLQEIKTLNQKEAVAYAVNSWTTSISGMLLKVGILYIGGQLVTSGAVSSGNLVTFVLYQMQFTQAVEVLLSIYPRVQKAVGSSEKIFEYLDRTPRCPPSGLLTPLHLEGLVQFQDVSFAYPNRPDVLVLQGLTFTLRPGEVTALVGPNGSGKSTVAALLQNLYQPTGGQLLLDGKPLPQYEHRYLHRQVAAVGQEPQVFGRSLQENIAYGLTQKPTMEEITAAAVKSGAHSFISGLPQGYDTEVDEAGSQLSGGQRQAVALARALIRKPCVLILDDATSALDANSQLQVEQLLYESPERYSRSVLLITQHLSLVEQADHILFLEGGAIREGGTHQQLMEKKGCYWAMVQAPADAPE

SEQ ID NO: 13165 - protein, 808 aa, Artificial Sequence
  derived and/or modified sequence
MAELLASAGSACSWDFPRAPPSFPPPAASRGGLGGTRSFRPHRGAESPRPGRDRDGVRVPMASSRCPAPRGCRCLPGASLAWLGTVLLLLADWVLLRTALPRIFSLLVPTALPLLRVWAVGLSRWAVLWLGACGVLRATGGSKSENAGAQGWLAALKPLAAALGLALPGLALFRELISWGAPGSADSTRLLHWGSHPTAFVVSYAAALPAAALWHKLGSLWVPGGQGGSGNPVRRLLGCLGSETRRLSLFLVLVVLSSLGEMAIPFFTGRLTDWILQDGSADTFTRNLTLMSILTIASAVLEFVGDGIYNNTMGHVHSHLQGEVFGAVLRQETEFFQQNQTGNIMSRVTEDTSTLSDSLSENLSLFLWYLVRGLCLLGIMLWGSVSLTMVTLITLPLLFLLPKKVGKWYQLLEVQVRESLAKSSQVAIEALSAMPTVRSFANEEGEAQKFREKLQEIKTLNQKEAVAYAVNSWTTSISGMLLKVGILYIGGQLVTSGAVSSGNLVTFVLYQMQFTQAVEVLLSIYPRVQKAVGSSEKIFEYLDRTPRCPPSGLLTPLHLEGLVQFQDVSFAYPNRPDVLVLQGLTFTLRPGEVTALVGPNGSGKSTVAALLQNLYQPTGGQLLLDGKPLPQYEHRYLHRQVAAVGQEPQVFGRSLQENIAYGLTQKPTMEEITAAAVKSGAHSFISGLPQGYDTEVDEAGSQLSGGQRQAVALARALIRKPCVLILDDATSALDANSQLQVEQLLYESPERYSRSVLLITQHLSLVEQADHILFLEGGAIREGGTHQQLMEKKGCYWAMVQAPADAPE

SEQ ID NO: 13166 - DNA, 381 bp, Artificial Sequence
  derived and/or modified sequence
atgatcagcttccacgtgatcttcctgagcctgggccggggcaagctgttcctgcctgttaacttctgctttttaaaactcaaaaattctcaggtgcggattcctaaagatttcacctgtaacctccacgtgttatttcggaccgtgcaaggggaggacagaaatactatgtttagagggcattggtctatctacagcaggaactttcctcttgctgttgtgccagcctacgtgactgaagacggcaagaacacatcccatagagccagtggacagttctgcaatgcactgtctcagggtgagatccctagcagtctccaattggtgaatagctacgcactggaacctaggacagacatgccatgcaactttctgacatag

SEQ ID NO: 13167 - DNA, 2427 bp, Artificial Sequence
  derived and/or modified sequence
atggccgagctgctggccagcgccggcagcgcctgcagctgggacttccccagagccccccccagcttccccccccccgccgccagcagaggcggcctgggcggcaccagaagcttcagaccccacagaggcgccgagagccccagacccggcagagacagagacggcgtgagagtgcccatggccagcagcagatgccccgcccccagaggctgcagatgcctgcccggcgccagcctggcctggctgggcaccgtgctgctgctgctggccgactgggtgctgctgagaaccgccctgcccagaatcttcagcctgctggtgcccaccgccctgcccctgctgagagtgtgggccgtgggcctgagcagatgggccgtgctgtggctgggcgcctgcggcgtgctgagagccaccgtgggcagcaagagcgagaacgccggcgcccagggctggctggccgccctgaagcccctggccgccgccctgggcctggccctgcccggcctggccctgttcagagagctgatcagctggggcgcccccggcagcgccgacagcaccagactgctgcactggggcagccaccccaccgccttcgtggtgagctacgccgccgccctgcccgccgccgccctgtggcacaagctgggcagcctgtgggtgcccggcggccagggcggcagcggcaaccccgtgagaagactgctgggctgcctgggcagcgagaccagaagactgagcctgttcctggtgctggtggtgctgagcagcctgggcgagatggccatccccttcttcaccggcagactgaccgactggatcctgcaggacggcagcgccgacaccttcaccagaaacctgaccctgatgagcatcctgaccatcgccagcgccgtgctggagttcgtgggcgacggcatctacaacaacaccatgggccacgtgcacagccacctgcagggcgaggtgttcggcgccgtgctgagacaggagaccgagttcttccagcagaaccagaccggcaacatcatgagcagagtgaccgaggacaccagcaccctgagcgacagcctgagcgagaacctgagcctgttcctgtggtacctggtgagaggcctgtgcctgctgggcatcatgctgtggggcagcgtgagcctgaccatggtgaccctgatcaccctgcccctgctgttcctgctgcccaagaaggtgggcaagtggtaccagctgctggaggtgcaggtgagagagagcctggccaagagcagccaggtggccatcgaggccctgagcgccatgcccaccgtgagaagcttcgccaacgaggagggcgaggcccagaagttcagagagaagctgcaggagatcaagaccctgaaccagaaggaggccgtggcctacgccgtgaacagctggaccaccagcatcagcggcatgctgctgaaggtgggcatcctgtacatcggcggccagctggtgaccagcggcgccgtgagcagcggcaacctggtgaccttcgtgctgtaccagatgcagttcacccaggccgtggaggtgctgctgagcatctaccccagagtgcagaaggccgtgggcagcagcgagaagatcttcgagtacctggacagaacccccagatgcccccccagcggcctgctgacccccctgcacctggagggcctggtgcagttccaggacgtgagcttcgcctaccccaacagacccgacgtgctggtgctgcagggcctgaccttcaccctgagacccggcgaggtgaccgccctggtgggccccaacggcagcggcaagagcaccgtggccgccctgctgcagaacctgtaccagcccaccggcggccagctgctgctggacggcaagcccctgccccagtacgagcacagatacctgcacagacaggtggccgccgtgggccaggagccccaggtgttcggcagaagcctgcaggagaacatcgcctacggcctgacccagaagcccaccatggaggagatcaccgccgccgccgtgaagagcggcgcccacagcttcatcagcggcctgccccagggctacgacaccgaggtggacgaggccggcagccagctgagcggcggccagagacaggccgtggccctggccagagccctgatcagaaagccctgcgtgctgatcctggacgacgccaccagcgccctggacgccaacagccagctgcaggtggagcagctgctgtacgagagccccgagagatacagcagaagcgtgctgctgatcacccagcacctgagcctggtggagcaggccgaccacatcctgttcctggagggcggcgccatcagagagggcggcacccaccagcagctgatggagaagaagggctgctactgggccatggtgcaggcccccgccgacgcccccgagtag

SEQ ID NO: 13168 - DNA, 1644 bp, Artificial Sequence
  derived and/or modified sequence
atggccatccccttcttcaccggcagactgaccgactggatcctgcaggacggcagcgccgacaccttcaccagaaacctgaccctgatgagcatcctgaccatcgccagcgccgtgctggagttcgtgggcgacggcatctacaacaacaccatgggccacgtgcacagccacctgcagggcgaggtgttcggcgccgtgctgagacaggagaccgagttcttccagcagaaccagaccggcaacatcatgagcagagtgaccgaggacaccagcaccctgagcgacagcctgagcgagaacctgagcctgttcctgtggtacctggtgagaggcctgtgcctgctgggcatcatgctgtggggcagcgtgagcctgaccatggtgaccctgatcaccctgcccctgctgttcctgctgcccaagaaggtgggcaagtggtaccagctgctggaggtgcaggtgagagagagcctggccaagagcagccaggtggccatcgaggccctgagcgccatgcccaccgtgagaagcttcgccaacgaggagggcgaggcccagaagttcagagagaagctgcaggagatcaagaccctgaaccagaaggaggccgtggcctacgccgtgaacagctggaccaccagcatcagcggcatgctgctgaaggtgggcatcctgtacatcggcggccagctggtgaccagcggcgccgtgagcagcggcaacctggtgaccttcgtgctgtaccagatgcagttcacccaggccgtggaggtgctgctgagcatctaccccagagtgcagaaggccgtgggcagcagcgagaagatcttcgagtacctggacagaacccccagatgcccccccagcggcctgctgacccccctgcacctggagggcctggtgcagttccaggacgtgagcttcgcctaccccaacagacccgacgtgctggtgctgcagggcctgaccttcaccctgagacccggcgaggtgaccgccctggtgggccccaacggcagcggcaagagcaccgtggccgccctgctgcagaacctgtaccagcccaccggcggccagctgctgctggacggcaagcccctgccccagtacgagcacagatacctgcacagacaggtggccgccgtgggccaggagccccaggtgttcggcagaagcctgcaggagaacatcgcctacggcctgacccagaagcccaccatggaggagatcaccgccgccgccgtgaagagcggcgcccacagcttcatcagcggcctgccccagggctacgacaccgaggtggacgaggccggcagccagctgagcggcggccagagacaggccgtggccctggccagagccctgatcagaaagccctgcgtgctgatcctggacgacgccaccagcgccctggacgccaacagccagctgcaggtggagcagctgctgtacgagagccccgagagatacagcagaagcgtgctgctgatcacccagcacctgagcctggtggagcaggccgaccacatcctgttcctggagggcggcgccatcagagagggcggcacccaccagcagctgatggagaagaagggctgctactgggccatggtgcaggcccccgccgacgcccccgagtag

SEQ ID NO: 13169 - DNA, 2427 bp, Artificial Sequence
  derived and/or modified sequence
atggccgagctgctggccagcgccggcagcgcctgcagctgggacttccccagagccccccccagcttccccccccccgccgccagcagaggcggcctgggcggcaccagaagcttcagaccccacagaggcgccgagagccccagacccggcagagacagagacggcgtgagagtgcccatggccagcagcagatgccccgcccccagaggctgcagatgcctgcccggcgccagcctggcctggctgggcaccgtgctgctgctgctggccgactgggtgctgctgagaaccgccctgcccagaatcttcagcctgctggtgcccaccgccctgcccctgctgagagtgtgggccgtgggcctgagcagatgggccgtgctgtggctgggcgcctgcggcgtgctgagagccaccggcggcagcaagagcgagaacgccggcgcccagggctggctggccgccctgaagcccctggccgccgccctgggcctggccctgcccggcctggccctgttcagagagctgatcagctggggcgcccccggcagcgccgacagcaccagactgctgcactggggcagccaccccaccgccttcgtggtgagctacgccgccgccctgcccgccgccgccctgtggcacaagctgggcagcctgtgggtgcccggcggccagggcggcagcggcaaccccgtgagaagactgctgggctgcctgggcagcgagaccagaagactgagcctgttcctggtgctggtggtgctgagcagcctgggcgagatggccatccccttcttcaccggcagactgaccgactggatcctgcaggacggcagcgccgacaccttcaccagaaacctgaccctgatgagcatcctgaccatcgccagcgccgtgctggagttcgtgggcgacggcatctacaacaacaccatgggccacgtgcacagccacctgcagggcgaggtgttcggcgccgtgctgagacaggagaccgagttcttccagcagaaccagaccggcaacatcatgagcagagtgaccgaggacaccagcaccctgagcgacagcctgagcgagaacctgagcctgttcctgtggtacctggtgagaggcctgtgcctgctgggcatcatgctgtggggcagcgtgagcctgaccatggtgaccctgatcaccctgcccctgctgttcctgctgcccaagaaggtgggcaagtggtaccagctgctggaggtgcaggtgagagagagcctggccaagagcagccaggtggccatcgaggccctgagcgccatgcccaccgtgagaagcttcgccaacgaggagggcgaggcccagaagttcagagagaagctgcaggagatcaagaccctgaaccagaaggaggccgtggcctacgccgtgaacagctggaccaccagcatcagcggcatgctgctgaaggtgggcatcctgtacatcggcggccagctggtgaccagcggcgccgtgagcagcggcaacctggtgaccttcgtgctgtaccagatgcagttcacccaggccgtggaggtgctgctgagcatctaccccagagtgcagaaggccgtgggcagcagcgagaagatcttcgagtacctggacagaacccccagatgcccccccagcggcctgctgacccccctgcacctggagggcctggtgcagttccaggacgtgagcttcgcctaccccaacagacccgacgtgctggtgctgcagggcctgaccttcaccctgagacccggcgaggtgaccgccctggtgggccccaacggcagcggcaagagcaccgtggccgccctgctgcagaacctgtaccagcccaccggcggccagctgctgctggacggcaagcccctgccccagtacgagcacagatacctgcacagacaggtggccgccgtgggccaggagccccaggtgttcggcagaagcctgcaggagaacatcgcctacggcctgacccagaagcccaccatggaggagatcaccgccgccgccgtgaagagcggcgcccacagcttcatcagcggcctgccccagggctacgacaccgaggtggacgaggccggcagccagctgagcggcggccagagacaggccgtggccctggccagagccctgatcagaaagccctgcgtgctgatcctggacgacgccaccagcgccctggacgccaacagccagctgcaggtggagcagctgctgtacgagagccccgagagatacagcagaagcgtgctgctgatcacccagcacctgagcctggtggagcaggccgaccacatcctgttcctggagggcggcgccatcagagagggcggcacccaccagcagctgatggagaagaagggctgctactgggccatggtgcaggcccccgccgacgcccccgagtag

SEQ ID NO: 13170 - DNA, 2427 bp, Artificial Sequence
  derived and/or modified sequence
atggctgaactgctggcaagcgccggtagcgcgtgtagctgggactttcctagagccccaccatccttcccaccaccagccgcctcgcggggaggcctggggggtacaaggtcattccggccacacagaggagccgagtcccctcgtcctggtagagaccgcgatggggtccgtgtgcctatggcttcatcacggtgtccagccccacgcggctgcagatgcctccccggtgccagtcttgcctggctgggcacagtactgctgctgttggctgactgggtcctgctccgtacagcgctaccacggattttttctctcctggtccccactgccctgccactgctgcgtgtctgggctgtcggattaagccgctgggctgtcctgtggcttggggcctgcggcgtcctgagagcaacagttggctccaagagcgaaaacgccggagcacagggttggctggctgcccttaaacccctcgctgctgcacttgggttggctctgcccggtctggctctcttcagggagttaatttcatggggggcccctggctcagccgatagcacccgcctgctgcactgggggtcccaccctacagccttcgtggtgagttatgccgccgccctccccgccgctgccctgtggcacaagttggggtcactttgggtccctggcgggcagggtggctcaggtaatcctgtgcggcgcctgcttggatgcctgggaagcgaaacccgacgcctgtctttgtttttggtgcttgtggtgctgtcttccctcggggagatggcaattccgttctttacaggacggctcactgactggattctgcaggacggcagcgctgacacttttactagaaacttaacgctgatgagtattcttacaatcgccagtgctgtactggagttcgttggagatggaatctataacaacacaatgggacacgttcactcccatctgcagggtgaggtcttcggcgcagtgctgagacaggagactgaattctttcagcagaatcagacgggtaacattatgtcgcgggtcactgaggacacttccactctgtctgactcactttctgaaaaccttagtttatttctttggtatctggtgcgtggcctctgcctgctcggcataatgttatgggggtcagtgagcctgacaatggttaccctgatcaccttaccgctgttgttcctcttacccaaaaaggtaggaaagtggtatcagctgttggaagtgcaggttcgcgagtccctggctaaatccagtcaggttgctattgaagccctatcggccatgccaactgtgcgaagctttgccaatgaagagggcgaagctcagaaatttcgtgaaaagctgcaggagatcaagacactgaaccaaaaggaagcagtagcctacgctgtgaacagttggacgacttctattagcggcatgctcctaaaggtcggcatcctctatataggaggtcagctggttacctccggggctgtgtctagcggaaacctggtgacatttgttctgtatcagatgcagttcacacaggctgttgaggtgctcctttccatttatccacgagtgcaaaaggcagttggaagttccgagaagatttttgagtacctggacagaactccccgctgcccgccgtccgggttgctaacgcctctacatctggaaggcctcgtgcaattccaagacgtgtcattcgcttatcctaatagaccagatgtgttagtgcttcaagggctcacctttacactgcgtccaggggaggtgacggcattggtgggacccaatggctccggcaaatccacggtggccgccttacttcagaacctctaccagcctacagggggacagctcttgttagatgggaagcccctgccccagtatgagcataggtatctccacagacaagtggctgccgtcggtcaggaacctcaggtgttcggaaggtctctgcaggaaaacatcgcctacggcttaactcaaaaaccaaccatggaagaaattacagcagctgccgttaagtccggtgcccatagctttatttccggattaccccagggatacgacacagaagtcgatgaagcaggtagtcagctctcaggcgggcaaaggcaagctgtggctctggcacgggctctgattcgaaagccatgtgtcctcatcctggacgacgcaacttcggcactggacgctaattcgcagttacaagtggagcagcttttgtatgagtccccagagagatattcacgttctgtcctcctcattacccagcatttgagtctggtggagcaggcagatcacattttgttccttgagggaggtgccatcagagaaggaggtacccatcaacagctgatggagaagaaagggtgttactgggcaatggtacaggcacccgctgatgcaccagagtag

SEQ ID NO: 13171 - DNA, 2427 bp, Artificial Sequence
  derived and/or modified sequence
atggctgagctgcttgcttcggcaggatctgcatgttcctgggatttccctcgggccccgccatcttttcctccccccgcagcttccagaggaggcctgggaggaacccggagttttcggcctcaccgcggagccgaaagcccgcgcccaggccgggatcgcgacggcgtgagagtgcccatggcatcctctaggtgtccagcaccccggggatgtcgctgtctcccaggcgcctctcttgcttggctcgggacggttctgctcttgttggccgattgggtgctgctgaggaccgcattgccacgcatcttttctctactagtgccaacggccttgcctctgttaagggtgtgggctgtgggtctttcacgttgggcagtgttatggctgggggcttgcggagtgcttcgtgcaacggtgggctccaaaagcgagaacgcaggggctcagggttggctggcggctctaaaaccgcttgccgcagcactggggctggctttgccgggcctcgccctctttagggagctgatttcttggggagccccaggtagcgctgacagcacccggttactccactggggaagccatccaacagcatttgttgtgtcctatgcggctgcccttccggcagctgccctgtggcacaaactcggttccttgtgggtgccaggaggccagggaggtagcggaaaccccgtgcgacgcttacttggttgtctaggaagcgagacccgcaggctctctctgtttctggtgttggtcgtcctttcttctctgggcgaaatggcgatcccgttttttaccggacgactgaccgactggatcctacaggacggctcggctgatacctttactagaaacctcaccttaatgagcatactcaccatcgccagtgctgtgctagagtttgtaggagacggtatctacaataatacaatgggacatgtgcactcgcacctgcagggagaggtgttcggggcagttctgaggcaggagacagagtttttccagcagaaccaaacaggcaacattatgtcccgtgtgaccgaagacacgtcgactttatccgattcactctcggagaacctcagcctttttttgtggtatctcgtaagagggctgtgtctgcttggcatcatgctttggggtagcgtgagcctcaccatggtgaccctcatcaccctgccactcctcttcttgctgcccaagaaagtgggaaaatggtaccagctactagaagtgcaagtgcgcgaatctctggcaaagagttcacaggtcgccattgaagctctaagtgccatgcctaccgtaaggtcttttgccaacgaagagggtgaagcccagaaatttagagagaagctgcaagagatcaaaacactcaaccagaaggaggcagtcgcctatgctgtaaattcatggaccacatcaatttccggaatgcttctcaaggtgggaattttgtatatcggggggcagttggttacatctggtgcggtatccagtggaaatctagtgacttttgtgctgtaccaaatgcagtttactcaagctgtggaggtcctactgtcgatctacccccgcgtgcagaaggcggtcggatccagcgaaaaaatattcgagtatttggatagaactcctcgttgccccccttcaggcctgctgacacctctgcatctggaaggcctggtgcagtttcaggatgtctcattcgcataccccaaccggccagacgttttagttttacagggactgacatttactctgcgcccaggcgaggtgaccgcacttgtagggccaaacgggagcggcaagagtaccgtagccgcccttctgcagaacctgtatcaaccaacggggggtcagctcctcttagacgggaaaccacttccccaatatgagcaccgttatctacataggcaagttgctgcggtggggcaggagcctcaggtatttggccgttcccttcaggagaatatcgcatacggactcacccagaagccaacgatggaggagatcacagcagccgctgtaaaaagcggtgcacattccttcatcagcggcctcccacagggatacgataccgaagtcgatgaggcggggtcacaactaagcgggggccagcgccaagcggtcgctctcgctcgggcgctcatacgcaagccctgcgtactgatcctggatgacgccacttcggctctcgacgcaaactcccagctccaagtagagcagttgctatatgaaagtccggagcgatattctcggagcgtcctccttattactcagcatctgtctctggtcgagcaggctgaccatattctgttcttagaaggcggcgctatcagggaaggaggaacacatcaacagctgatggaaaaaaagggctgttattgggctatggtgcaagctcccgccgacgccccagagtag

SEQ ID NO: 13172 - DNA, 2427 bp, Artificial Sequence
  derived and/or modified sequence
atggctgagctgctcgcttctgctggcagcgcctgttcctgggactttcctcgggcacctccctcatttcctcccccagcagcatcacgtggtgggctgggcggaacaagatctttcaggccacaccgtggcgccgagtctcccagacccggtcgggaccgggacggcgtgcgggttcccatggcgtcatccaggtgtccggcccctcgagggtgcaggtgcctccctggcgcgagtctcgcctggttggggactgtactcttgttgctggctgactgggtgctcctccgcaccgcactccctaggatcttcagcctacttgtgcctacggcactccccctgctcagagtgtgggcagtgggtcttagccgatgggctgtgctgtggttgggggcctgcggggtactacgagccactgtgggaagtaaaagcgaaaatgccggagctcaaggatggctggctgccctcaaacctttggccgccgcactggggctggctctcccgggcttagccctctttcgagagcttatctcatggggggctcccggctcggccgatagtacccggctgctgcattggggttcccacccgaccgcttttgtagtgagttatgccgcagccctgcctgctgccgccctgtggcataaactcggcagtctgtgggtccccggaggtcagggtggatctggtaatcctgttcgccgcctgttggggtgcctcgggtcagagactagacggcttagcttgttcctcgtcctcgtggtactatccagtctgggtgagatggctattccattctttacagggagactaacagactggattctacaggacggcagcgcagatactttcacacggaatctgactctcatgtccattctcaccatcgcgagcgcagttctggaatttgttggagacggtatttacaacaataccatgggccatgtgcacagccatctgcaaggcgaggtcttcggggctgtcctcaggcaagagactgaattcttccaacagaaccagacagggaatataatgtctcgcgtcactgaagacactagcactttatcagattctctgtccgagaacctgtcactctttctgtggtacctggtcagaggactgtgcctgctcggaataatgctgtgggggagcgtgtcattaactatggtaacactcattaccctgcctctgctctttctgctccccaagaaggtagggaaatggtatcagcttcttgaagtgcaggtgcgtgagtcccttgcaaagtcttcacaggtagctatcgaagccctgtcagctatgcccaccgtgcggtccttcgcaaacgaagagggcgaggctcaaaagttccgtgagaaacttcaggaaatcaagaccctaaaccaaaaggaggcagtcgcctacgccgttaattcctggacaaccagcatctccgggatgcttcttaaagtgggcatcttatatatcggaggccagcttgtgacctccggtgccgtgtcctccggtaatctcgtcacttttgtgctgtaccagatgcagtttacgcaggcggtagaggtattacttagcatatacccacgggtgcagaaagctgtagggtcatctgaaaaaatcttcgagtacctggaccgcaccccacgctgccctccaagcgggcttctcaccccgctacacctggagggactggtccagttccaggatgtctcttttgcctacccaaatcgccccgacgtgttggtgttacaaggcctgacttttaccctccgccccggagaagtgaccgccctcgttggcccaaacgggtcaggaaagagtacagtcgctgcacttctgcagaatctgtaccaacccacggggggtcagttactgttggacgggaagccactgcctcaatacgaacatagatacctccatcgccaagttgccgctgttgggcaggagccgcaggtgtttggacgctcgcttcaagagaatattgcttacgggttaacccagaagcctacaatggaggaaataaccgctgccgcggtcaagtctggcgcgcatagcttcatcagcggcctgccccaaggatacgacacggaggtcgatgaggctggcagtcaactgtcaggaggacagcgacaggccgtcgctttggcacgcgcgctgattaggaaaccttgtgttctgatcttggatgatgcaaccagtgcacttgatgcaaacagccagctacaagtggaacaactgctgtacgaatcccccgagagatatagcagaagcgtgctcctgattacacagcatctatccctcgtcgagcaggccgaccacatcttgttcttagagggcggggctatccgagagggggggacccaccaacagctaatggagaagaagggttgctactgggccatggtacaggcccctgcggacgcacctgaatag

SEQ ID NO: 13173 - DNA, 2427 bp, Artificial Sequence
  derived and/or modified sequence
atggctgaactgctcgcatctgcgggctccgcctgtagctgggactttccacgggccccgccgtcctttcctccacccgcggcgagcagaggcgggctggggggaacccgctcatttcggcctcatcggggcgccgaatcccccaggcctggtcgagatagggatggggtccgggttcctatggcttctagtcgctgtcctgcgccacggggatgtaggtgtttgcctggggccagcctcgcctggctgggcaccgtattgcttttgctggccgattgggtcttgcttcgaaccgccctcccccgcatcttcagcctgttagtgcctacagccctccccctgctgcgtgtgtgggctgtgggactgagtcgatgggctgtgttgtggctgggagcatgtggagtgctcagggcaacagtcggatctaaatccgaaaatgctggggcacagggttggctggcggcactgaaaccactcgctgcagccctcggcctggctctcccaggcctggcccttttcagggagctgatctcttggggcgcaccaggctctgctgatagcacacgcctgctacattggggttcccaccccacggcctttgtggtgtcttacgcagcagctttgcccgcagccgccctctggcacaagctgggctctctctgggtgcccggaggacagggaggaagtgggaacccggtgcgccgacttttggggtgtctagggtccgagactagaaggctgtcgctgtttctggtcttggtggtcctcagttctcttggtgagatggcgataccctttttcacgggacggctgaccgactggatcctgcaggatggttctgccgataccttcactagaaacctgacccttatgagcatattgaccatagccagcgccgtactggagtttgttggcgacggcatatacaacaatacgatgggtcacgtccattctcacctccagggggaagttttcggcgccgtcctgaggcaggagacagaattcttccagcagaaccagaccggcaatatcatgtctcgggttaccgaggacacctcgactctttcggactctttgagcgaaaatcttagcttgttcctgtggtacctagtgcggggcctgtgtctgctgggcattatgttgtggggatcggtgtcactaacaatggtaactctcattacgctgcctctcttgttcctgcttcccaagaaggtcgggaagtggtatcagcttcttgaagtccaggtgcgagagtcactagcaaaatcatcacaggtagctattgaggccctatccgcaatgcccactgtgcggagttttgcgaacgaggaaggggaggcacaaaagttcagggaaaagttgcaggaaataaagacactgaaccagaaagaggctgtagcctatgccgtgaacagctggaccaccagcatctcaggaatgttgttaaaggtggggattctgtatatcgggggccagcttgtgacatctggagccgtttcaagtggtaacctggtcaccttcgtgctctatcagatgcagttcacacaggccgttgaggtattgctcagcatatatcccagggttcaaaaggctgtgggaagctcagagaagatctttgagtatctggatcgtacaccgaggtgcccacccagcggcctactcacacctctgcatctggagggactggtgcaatttcaggacgtatcttttgcatatcccaatcgacccgatgtcctggtgctccagggcctcacttttaccctgaggccaggagaggtgaccgcattggtgggcccaaacggttcggggaagtccactgtggcagccctgctgcagaacttgtaccagcccaccggagggcagctgcttttagatggaaaacccctgccacagtacgagcacagatatttgcacaggcaagtggccgctgtgggacaggaaccccaggtcttcggcaggagcttgcaggaaaatattgcttatgggctgacacaaaaacctacaatggaagagattaccgcagcggccgtgaagtccggagcccacagcttcatctccggactgccacagggttacgacacagaggttgatgaggctggctcgcagctttccgggggacaacggcaggctgttgctcttgcccgggctctcattaggaagccttgcgtattaattttggacgacgccacttcagctctggacgctaattcccagctgcaagtcgagcagctgctgtatgaatcccccgaaaggtattcccggagcgtgcttctcataactcagcatctttctctggtggagcaggctgaccacatcctcttcctagaaggaggtgctatacgggagggtggaactcaccagcagctcatggaaaaaaaggggtgttattgggccatggtgcaagctccggccgatgcaccagaatag

SEQ ID NO: 13174 - DNA, 2427 bp, Artificial Sequence
  derived and/or modified sequence
atggctgagcttctcgcctcggcaggttccgcctgcagctgggactttcccagagcaccaccatcattccccccacccgcagcgtctcggggagggctgggcgggacaaggtcatttcgaccacataggggcgctgaatcgcctagaccaggtcgcgacagagatggtgtgcgtgtccctatggcctcaagtcgctgtcccgcacccagagggtgccgttgtctgcctggggcgtctctagcctggttggggacggtgctgctgctgcttgcagattgggtgctgctacgtacagccctccctcgcatcttctcattgttagtgcccactgcattgccactgttgcgcgtctgggctgtgggactgagccggtgggctgtgttgtggctgggtgcttgcggtgtgctgcgtgcgactgtcggatccaaaagcgagaacgccggtgcccagggttggctggccgccttgaagccattggctgcggctcttggccttgctctgccgggcttagctttgttcagagaattaatcagttggggagccccaggcagcgccgactcaacccgactgctgcattggggaagtcaccccacagcctttgtagtgtcctacgccgctgccttacctgccgcagccctgtggcacaagctgggctctctgtgggtgccaggaggccagggtggcagtggcaacccagttaggaggcttctaggatgcctagggtccgaaaccagaagattgagcctatttcttgtattggtggtcctctcgagcctgggcgaaatggcgatacccttctttacggggaggctgaccgattggatcctacaggatggctccgctgacacctttactagaaatctgacgctgatgagcatcctgactatcgcttccgccgtgctcgaattcgttggggacgggatttacaacaatacaatggggcatgtacattctcaccttcagggggaagtctttggggccgtgttgaggcaggagaccgagttctttcagcagaatcagacgggcaacatcatgagtcgggtcacagaggacactagcactctgagcgactcgttgtctgaaaatctgtccctgttcctgtggtatttagtgcgcggattgtgcttgttgggaatcatgctctggggcagcgtgagtttgacgatggtgaccctgatcacattacctctgttgttcctgctgcccaaaaaagttggtaagtggtaccagttactcgaggtccaggtgcgggagagtttggccaagagttcccaggtagctatcgaggccctgtcggccatgccaactgtccggtcatttgccaacgaggaaggggaggcccagaagtttcgagaaaaattgcaagagatcaagactttgaaccaaaaggaggcagttgcatatgcagtgaactcctggacgaccagtataagcggcatgctcctcaaagtggggattctgtacattggcgggcagctggtcactagcggagcggtgagcagtgggaaccttgtcacattcgtactgtaccagatgcagttcacccaggccgtagaagtactgctctcaatttatccacgggtacagaaggcggttggcagcagtgaaaagatctttgaatacttagacaggaccccccgatgtccaccttctggcttgctcacccctctgcacctggaagggctggtacagtttcaggacgtgagtttcgcataccctaacaggcctgacgtgctcgtgctgcaaggattaacttttactctcaggcccggagaagtgacagctctcgtcggccctaatggatccggcaagtccaccgtcgcggcccttctacaaaacctttatcagccaacaggcgggcagctcttgctcgacggcaaacccttgccccagtatgagcacagatatctgcaccgtcaggtagccgcggtaggacaggagcctcaggttttcgggaggtctcttcaggagaacatagcctacgggttgacacagaagcccactatggaggaaattactgcagcagccgtgaagagcggtgcgcatagtttcattagcggactacctcagggctacgacactgaggtggacgaggcggggtctcagctcagcggtggccaaagacaagcggtggccttggcccgcgctctgattaggaaaccctgtgtgctcattctggacgacgccaccagcgccctcgacgcgaactcacagctgcaggtcgaacagctcctctatgaatctccagaaaggtattctaggtctgtcctgttaattacacagcacctgtctctggtcgagcaggctgaccacattctgttcctggagggaggcgcaataagggaaggaggcactcatcagcagctcatggaaaaaaaggggtgttattgggcgatggtgcaagcccccgctgatgccccggagtag

SEQ ID NO: 13175 - DNA, 1644 bp, Artificial Sequence
  derived and/or modified sequence
atggccattccgttcttcaccggaagactgaccgattggatcctccaagatggatctgccgatacgtttacaaggaatttaaccttaatgtccattcttactatagcaagtgccgtgctcgagtttgtcggcgatggcatctataacaataccatgggacatgtgcatagccatctgcagggggaagtgtttggtgccgtgctccgccaagagacagaattctttcaacagaatcagaccggcaacataatgtccagggtgaccgaggatactagcacattgtctgacagtctttcagagaatctcagccttttcttgtggtacttggttaggggcctgtgtctcttgggcattatgctgtggggatctgttagcctgacgatggtaactcttataacgttgccgctgttgttccttctcccaaagaaagtggggaaatggtatcagttactggaggtccaggtgagggaatctctagccaagtccagccaagtggcgatcgaagccctgtctgccatgccaacagttagatcatttgcgaacgaggagggcgaagctcaaaaattcagagagaaactgcaggagattaagaccctaaaccagaaggaagctgtggcctacgccgtaaatagctggacaacctccatctcgggtatgttactgaaggtcggtatcctttacatcggtggacaactggtgacctcaggggccgtgtcctccgggaacctggtaacatttgtactgtaccagatgcagtttactcaagccgtggaagttctgttgtccatatatcctcgagtccagaaggcagtgggctcaagcgagaagatatttgaatatctcgacagaacacccagatgccccccatctggattgttaaccccgttgcatttggaagggcttgtacagttccaagatgtttcattcgcctatccgaataggcctgatgtgttggtgttacagggactcacctttacactgcgccctggagaggtaactgcccttgtgggcccaaacgggtccggcaagtcaactgtggcggccctgctgcagaatctttaccagcccacgggcggtcagctcctgctcgacggaaagccattaccacagtatgagcatcgatacctgcaccggcaggtagctgccgtgggccaagagccccaggtattcggacgctctctccaagagaatatcgcctacggactcacccagaagcccacaatggaagagatcaccgcagccgcagtgaaaagcggagcccattcttttataagtggacttccgcaaggttacgacaccgaggtcgacgaagcagggtctcaattatccgggggccagcggcaagccgtggcactagctagagccttgatccggaagccgtgcgtcctaatcctggatgacgctactagcgccttggatgccaacagtcagctgcaggtggagcaactgctctatgagtctccagaacgctactctcgctccgtcttgttgatcacccaacatctcagtcttgtggaacaagccgatcacatcctcttcctggagggcggtgccattcgcgagggaggcacgcaccaacagctcatggagaagaagggatgctattgggccatggtgcaggcacccgctgatgctcctgagtag

SEQ ID NO: 13176 - DNA, 2427 bp, Artificial Sequence
  derived and/or modified sequence
atggccgaactcttagctagtgccggctctgcctgtagttgggactttccaagggccccgccttcctttccccctccagctgcttcacgtggtggccttggcgggacccgcagctttcgcccccatcggggcgctgagtcacccaggcctggacgggatagagacggcgtgagggtgcctatggcctcttcacgctgtccagctcctagaggctgtcgctgtctgcccggcgcctcccttgcctggcttggtaccgtgcttctgttgttagccgactgggtgttgctcagaactgccttaccacgaatattttcactcctggttcccactgctctgccactgttgcgagtttgggcagtgggactgagtcgctgggctgtgttatggctcggagcgtgcggagtgcttagagcaacaggtggaagcaaatctgagaacgccggtgctcaggggtggctggccgcacttaagccactcgctgccgcactaggcttggccctgccggggttagctctttttcgagaactgatctcctggggcgccccaggaagcgccgactccacaagactgctgcactggggaagtcatcccacagcctttgtggtgtcctatgctgctgcacttccagccgcagctctctggcacaagttaggctcactgtgggttccgggtggtcagggagggagcggtaatcctgtgaggcggctcctgggttgcctcggtagcgagactcgcaggctgtcccttttcctggtgcttgtggtgcttagttctctgggagagatggctattccgttttttacaggccggctcacggattggatcctgcaggacggatccgcagacacatttactcgcaacctgactttgatgagcatcttaactatcgccagtgcagtcctggagtttgtgggcgatggaatttacaacaacaccatgggccatgttcacagccatctccaaggcgaggtcttcggggctgtcctgcgccaggaaaccgaattcttccagcagaaccagactgggaatattatgagccgcgttaccgaggatacaagtactctgtccgactccctgtctgaaaatctcagcctgtttctctggtatctggttcgggggctgtgcttgttaggcattatgctgtggggcagtgtgtcactgacgatggtgaccctcatcacgctccctctcctcttcctcctcccaaagaaggtaggaaagtggtaccagctgctggaggtgcaggtgcgggagagtctggccaagagctctcaagtggccatagaggccctcagcgcgatgccgactgtaaggtccttcgcaaatgaggaaggtgaagcccagaagtttagagagaaactgcaggaaatcaagaccctcaaccagaaggaggccgtggcgtatgccgtcaattcttggaccacaagcatttctggaatgctcttgaaggtcggaatactgtacataggagggcagttagttacgtcaggggcagtgtcgagtgggaacctggtgacctttgtgctttaccagatgcagtttacacaggcagtcgaagtgttactgtccatctatccacgcgtgcagaaggcagtcggctcctcagagaagatttttgagtacttggacagaacacccaggtgtcctccatcgggacttctcacacccttacacctggagggtctggtacaatttcaggatgtgtccttcgcttaccccaacaggcctgatgtactcgttttacaagggctgactttcacactgagaccaggggaggtgacggccttggtgggccctaatggaagcggtaaaagtaccgtcgcagctctgttacaaaacctttatcagcctaccggggggcagctcctgcttgatggtaagccgttacctcaatacgagcatagatacctgcatcgtcaggtcgcggccgttggccaggagccacaggtgttcggacgatctctgcaggaaaacatagcttacggtctgactcagaagcctaccatggaggaaattactgccgctgcggtgaagagtggtgcacactcatttatctcaggcctgcctcaggggtacgacaccgaagttgacgaggccggaagccaactctccggtggacagaggcaagccgtcgcactggcaagggccttaataagaaagccctgtgtgttgatactcgatgatgctacatctgctctggatgcgaattcccagctacaggtggagcaactcttgtacgaatccccagagcgatattcgcgcagtgtcttgctaattactcagcacctgtctttagtggagcaggccgaccacatcctctttctcgagggcggagccatccgggaaggcggcacccaccaacagctgatggagaagaaggggtgttactgggcaatggtccaggctcctgctgatgcgcctgagtag

SEQ ID NO: 13177 - DNA, 2427 bp, Artificial Sequence
  derived and/or modified sequence
atggccgaacttttggccagtgccggctccgcttgctcatgggatttccctcgggcgccacccagcttccctccacccgccgctagcagaggcggactgggcggcacgcggagcttccggccacatcgcggcgcggaatcaccgcgcccaggcagggatcgagacggcgtgagagttcctatggctagctcccgatgccccgcacctaggggctgtcggtgtctccccggcgcttcactggcttggctggggacggtactgctcctcctggcggactgggtgttgctgaggaccgccctcccgcgaatctttagcctcctcgtgcccaccgcgctacctctgttgcgggtttgggctgtcggtttatctagatgggcggtgctgtggttgggtgcatgtggggtgctgcgtgccactgtgggatcaaagtcagaaaacgcaggtgcccagggctggctggcggcccttaaacctttagcggccgctctgggcctggccctgccagggttggctctattccgtgagctgatctcctggggggctccagggtccgctgacagcactaggcttctccattggggatcccacccaaccgcgtttgtggtgagctacgccgccgcactgcccgccgccgcactgtggcacaagcttgggtccctgtgggtgcccggaggtcagggcggctctgggaatccagtgcgccgcctgttaggctgtcttggaagcgaaacccgccgtctttcactgtttttagtactcgtggttctcagcagcctcggcgagatggccatcccgttcttcacgggtagactcacagactggatcctgcaggatggctctgccgatactttcaccaggaaccttacactcatgtcgatcctgaccattgcttctgccgtcctggaattcgtcggagacggcatttataataacactatgggacacgtccactcacaccttcagggcgaggtgtttggcgcagttttaagacaggagacagagttctttcagcagaatcagacgggcaatatcatgagtagggttacagaagacacatccactctgtcagacagcctatccgagaacctgagtcttttcctctggtatctcgtgcgcggcctctgcctgctcggaatcatgctgtggggatctgtgtcactgaccatggttacgctcatcaccctgcccctcctctttctgctgcctaagaaggtggggaaatggtatcagctgctggaagtgcaggtacgggagagcttagccaagagctcccaagtggcaattgaggctctttcggcaatgcctactgtgcggtctttcgctaatgaggagggtgaagcacagaagtttcgggagaaacttcaggagattaaaactctcaaccaaaaggaggccgtggcctatgcagtaaatagctggacgacatcaatctctggaatgcttctgaaggtgggcattctgtatattggagggcagctggttacctctggggcagtatctagtgggaatctggtcacgtttgttctgtaccagatgcagtttacccaggctgtggaagtgctactgagcatctacccgagggtccagaaggccgttggttctagcgagaaaatctttgagtacctggataggactcccagatgtcctccgagtggattactgaccccacttcacctggagggcctcgtccagttccaagatgtgagtttcgcctaccccaataggccagatgtgcttgttctacaggggctgacctttactttacggcctggggaggtaaccgcattagtgggtccaaatggtagcggtaaatctaccgtggccgccctgctgcagaacctctaccaacccaccgggggacagctgctcctcgatggcaagccactgcctcagtatgagcatcgctatcttcacagacaggtggcagccgtaggccaggaaccgcaggtgttcgggcgcagcctccaggaaaacattgcgtatggattgacacagaaaccaacgatggaggaaattaccgccgcagctgtgaaatctggcgcccacagctttatctcaggattaccccaggggtatgatacggaggtggacgaggctggttcccaactgtcaggcggccaacggcaagcagtcgcgttggcacgagccctcatccgcaagccctgtgtgttaatactcgacgacgctacttcggccctcgatgcgaactctcagttgcaggtagaacagctgctgtatgaatcccctgaaaggtattcccggtccgtcttactcatcacccaacatctaagcttggtggaacaagccgaccatatcctgtttctggaaggtggagcgattcgcgagggaggtacacaccagcagcttatggagaagaaaggttgttattgggctatggtacaggcccccgcggacgcccctgagtag

SEQ ID NO: 13178 - DNA, 2427 bp, Artificial Sequence
  derived and/or modified sequence
atggccgaattacttgcttctgcgggcagcgcctgtagctgggattttcctagagccccaccatcttttccaccccccgccgccagtcggggcggcttgggtgggactaggtcatttcggcctcatcgcggggccgagtctcctcggccaggtagggatcgcgacggcgtccgcgtgccaatggcctcgtctcgctgtcctgcccctagaggatgtcgttgcctaccaggggccagcttggcttggctgggaacggtgttattgctacttgcagattgggtgctcttacgcacagctctgccgagaatcttctccctgctcgtgcccaccgccctgccgctgttaagggtttgggctgtgggtcttagccggtgggctgttttgtggttaggagcctgtggcgtgttaagggcaacggtgggttctaagtcggaaaacgccggcgcccaaggctggctcgccgcattgaaacctttagccgccgctctcggcctggccctccccgggctggcgttgttccgtgagctcattagttggggtgccccgggtagtgccgattccactagactcctgcactggggttcccaccctacagcctttgtggtgtcctatgccgcagctctcccggcagctgccctatggcacaaactggggtcactgtgggttcctggaggccaggggggttccgggaacccagtccggaggcttctcggctgcctgggtagtgagaccaggcggctctcactcttcctggtcctggtggtcttgtcgtctcttggggagatggccattccgtttttcactggaagattgacagactggattctccaggatggctcagctgacacatttacacggaatcttaccctgatgtcgatcctgaccatcgcctctgccgtcctcgagttcgtgggcgatggtatttacaacaataccatgggccacgtccattctcatctccagggcgaggtgttcggagccgtgttgcgtcaagaaacagaattttttcagcagaaccagactggtaatatcatgagccgggtgacggaagatacctcgacactctcggactctctgagtgaaaatctgtccctcttcctgtggtacttggtgcggggcctgtgtttgctgggaatcatgctgtggggttctgttagcttgactatggtcacattgattactttgcctctgctcttcctgctaccaaagaaagtagggaagtggtaccagctcctcgaggtccaggtgcgtgaaagtttagcaaagtcctcgcaggtggccatcgaggcattaagtgcaatgccaacagtgcgaagctttgctaacgaggaaggagaagctcagaaattccgggaaaagctgcaggaaatcaagacgttaaaccaaaaagaggctgtggcatatgctgttaacagctggaccactagtatttccggcatgctgctgaaggtgggtatactatatatcggggggcaactcgtcaccagtggagccgtgtccagcgggaatctagtgaccttcgtgctttaccagatgcagttcacgcaggctgtggaagtcctgctgtccatctaccctagagtccagaaagctgtggggtcatctgaaaaaatctttgagtacttggaccgaaccccacgctgtcctcccagcggactgctcacccctctccatctagaaggcctggtgcagttccaggatgtatccttcgcatacccaaataggcccgatgttctggtgctccagggcctgacgtttacactgagacctggcgaagttactgctttagttgggcctaatggcagcggaaaatctacagtcgccgccctgctccagaatctgtaccaaccaacgggaggccagctgctcttagacggaaaacctctaccccagtatgagcacaggtatcttcatcgacaggttgccgctgtcggtcaggagccacaggtgtttggaaggtctctgcaggaaaacatcgcctatggattgacacagaagcccactatggaggagattacagccgccgctgtcaaatctggtgctcatagttttatttctggtctacctcaaggatacgacacagaagttgatgaggcggggagccagctgtccgggggccagaggcaggcggtggcactagctagggctctgattcggaaaccatgcgttctgatcctggacgacgccacaagtgcactggatgctaactcccaactgcaggtggagcaactcctgtatgagagtcccgagcggtactcacggtctgtcctgcttatcacacagcacttgtcactggttgagcaagcagaccatattcttttcctcgaaggcggggccatcagagaaggaggaactcatcagcagctcatggagaaaaagggatgctactgggccatggtgcaggctcctgctgacgctccagagtag

SEQ ID NO: 13179 - DNA, 1644 bp, Artificial Sequence
  derived and/or modified sequence
atggccatacccttttttaccgggcgtctgactgattggatccttcaagacggtagtgcagacacattcacaagaaatctcactttgatgtccattctgactattgcaagtgctgtgttagagttcgtcggcgatggcatctacaacaataccatgggacacgtccacagccacttgcagggcgaagtctttggggccgtgctccgccaggagaccgagttcttccagcagaatcagaccggtaatattatgtcccgcgtcactgaggacacttctacgctaagcgacagcctcagcgagaacctgagcctcttcctctggtacttagtgcgcggcctgtgtttgctcggaataatgctgtgggggagcgtgtctctaactatggttacccttatcactctccccctgctgtttttgctcccaaagaaagtggggaagtggtaccaactgctcgaggtgcaggtgagggagagcctggccaaatcaagtcaggtggcgatcgaagctctttcagcaatgcccacagtgagatcctttgcgaacgaggagggggaggcccaaaagtttcgggaaaaactgcaggagataaagacactgaaccagaaagaagcagtggcttacgccgtaaactcatggacaacctcaatttctggaatgctgttgaaggtgggaatcctgtacataggaggccagctcgtgacctcaggagccgtctccagcggaaacctggtcactttcgtcctctaccagatgcagttcacccaggctgtggaggtgctcctttccatttacccgcgcgtgcaaaaggctgtaggttctagcgagaaaattttcgagtacctcgaccgaacaccacgctgtcccccaagcgggctgttgacacctctccaccttgagggactggtgcaattccaagatgtgagcttcgcttaccctaacagaccagacgtcttagtgctgcagggactgacattcacactacggccgggagaggtcaccgccttggtaggacctaacggttctgggaaatcaactgtggctgcactcctgcagaacttgtaccagcccaccggcggtcaactgctattggatggcaagccattgccacagtatgaacaccgctacctgcatcgacaggttgccgcagtgggacaggagcctcaggttttcggtagaagtctgcaggaaaacatagcctacggtctgacccagaagcccaccatggaagagatcacagcagctgcagtgaagagcggggctcatagcttcataagtgggttaccacagggttatgatactgaggtcgatgaggccggatcacagctgtctggcgggcagcgccaggctgtggccctcgccagggcccttattcgtaaaccatgtgtcctgatcctggatgatgccacctccgccttggacgcaaacagtcagctacaggtcgaacagctgctgtatgagagccccgagcgctattccagaagcgtgcttctgatcacgcaacacctgtccctggtggagcaagctgatcatatactgttcttggaaggcggtgcaattcgcgaaggcggcacccatcagcagctgatggagaagaaaggctgttattgggccatggttcaggcccctgccgatgcccccgagtag

SEQ ID NO: 13180 - DNA, 1644 bp, Artificial Sequence
  derived and/or modified sequence
atggctatcccctttttcacaggtcgtctcaccgactggattctccaggatggctcagccgatacatttaccaggaatctgactctcatgtcaatcctgaccatcgcctccgctgtactggagtttgtcggtgacgggatctacaacaacaccatgggtcacgtgcactcacatcttcaaggggaggtgttcggtgccgtgctgcgccaagaaacggaattctttcagcagaatcaaaccgggaatatcatgtccagggtgacggaggatacatccactctctctgacagtctcagcgagaacctctctctcttcctctggtatctggtcaggggactctgcctcctcggtattatgctgtggggatctgtgagtttaacaatggtgaccctgattaccctgcccctcctgttcctactgccaaagaaagttggcaagtggtaccagctcctggaggttcaggtcagagagtctctcgccaaaagctctcaggttgctattgaagccctctcagctatgcctaccgtgaggtcattcgctaatgaggagggagaggcccagaagttccgtgagaaattgcaggaaataaaaaccctaaaccagaaggaagccgtcgcttacgccgtgaactcttggactacctctatttctggtatgctccttaaggtgggcatactgtacataggagggcagctggttacgtccggcgcagtctcatccggaaacctggtcacttttgtactgtatcagatgcagtttacccaggccgtcgaagtcctgcttagcatttatcctcgtgttcagaaagcagtgggaagtagtgaaaagatctttgagtatttggatcggactcccagatgtccaccgtccgggctgctcaccccactgcaccttgagggcctcgttcagtttcaagacgtaagcttcgcttatccaaatcgccccgatgtcctggtcctgcaggggctgacttttaccctacggcccggagaggtaaccgccctggtaggacctaacggtagcggcaagtctactgtcgccgcgctgctccagaacttgtaccagccgaccggtggccagctattgctcgatggcaagccccttcctcagtacgagcatcgctacttgcatcgtcaggtggccgccgtgggacaggagcctcaagtttttggacgttcgctgcaggagaatatcgcttacggcttgacccagaagcctactatggaagaaatcactgctgcggctgttaagagtggggctcacagtttcattagtgggttgccacagggttacgacaccgaagtggacgaggcaggctctcagctgagcggtggccagagacaggctgtagctctggccagggccctgatcaggaagccctgcgtcttaatattggacgatgccacgtctgccctcgacgccaactctcagctgcaagtagaacagctgctgtatgagtctcctgagcgctactccaggtccgttctcctcatcacacagcatctgagcctggtggaacaggccgatcacattctgttcctggagggtggcgcgattagggaaggtggaacccaccaacagctgatggagaagaagggctgttattgggccatggtgcaggcgcctgctgatgcaccggagtag

SEQ ID NO: 13181 - DNA, 1644 bp, Artificial Sequence
  derived and/or modified sequence
atggccatacctttttttacgggacgcttgaccgattggatcctccaggatgggtcggctgatacctttacccggaatttgaccctcatgtctatcctgaccattgcatccgcggttttagagtttgtaggtgacgggatatacaacaataccatgggacacgtgcactcccacttgcagggagaagtctttggtgccgtgctgcggcaagagacggagttttttcagcagaaccagaccgggaacattatgtccagggtaaccgaggacaccagtaccctgtctgactcattgagcgaaaatcttagcctgtttttgtggtacctggtgaggggcctctgccttctaggcatcatgctgtgggggtccgtgtcactgaccatggtgactttgatcacgctgccactcctgttcttgctccctaagaaagttggcaagtggtaccagttgctcgaggtgcaagtgcgagagagcttggcaaaatcaagtcaggtggccatcgaagcactttctgccatgcctaccgtaaggtcattcgccaacgaagagggtgaggcccaaaagttcagagaaaaactgcaggagatcaaaacacttaatcaaaaggaggccgttgcctacgcagtcaactcatggacaactagtatttcggggatgctgctgaaggtagggattctgtacataggagggcagcttgttacatctggagcagtttcgtctggtaatttagtcactttcgtcctgtatcaaatgcaattcacacaggccgtggaagtacttctgagtatatacccgagagtccagaaggcagtggggtcctcggagaagatctttgaatatctcgataggacccctcgatgccctccctccggattgttgacaccactacacctcgagggtctggttcagttccaagatgtcagtttcgcatatcctaatagaccagacgtgctggtgctgcaaggcctcaccttcaccctgagacctggtgaggtgactgctctggttggcccaaacggatctgggaagagtacggtggcagcactgctgcagaacctgtatcagccaaccggcggccaactgctgctggacggaaaaccattgccgcagtacgaacaccggtacttgcaccgccaagtggctgcggtgggccaagagccccaggtttttgggcgcagccttcaggagaatattgcctacggacttacacagaagcctaccatggaagagataactgccgcagccgttaagagcggggcccattccttcatcagtgggctcccccaggggtacgacacagaggtcgacgaggccggtagtcagctgagtggagggcagaggcaggctgtcgcgctggctcgggccctgatcagaaaaccctgcgtgttgatcctggatgatgccacaagcgccctggatgccaactcccagttacaggtagagcagttactctatgaaagcccagagagatattcacggagcgtcctgctgatcacccagcacctgtctcttgtggagcaggctgatcatattctgtttctggaggggggcgctatcagggaaggcggtacacaccagcagctgatggaaaaaaaagggtgttactgggctatggtacaagcacctgcagacgcacccgagtag

SEQ ID NO: 13182 - DNA, 1644 bp, Artificial Sequence
  derived and/or modified sequence
atggctattcctttctttacaggtcggttgacagattggattttgcaagacggaagcgctgacacgttcacccgaaatttaacactgatgtcgatcttgactatcgcgtccgccgtgctggaattcgtgggagacggtatctacaataatacaatgggccacgtccatagccatcttcaaggagaagttttcggggcagtcctccgacaagagacggagttttttcagcagaatcagaccggtaatatcatgagcagagtaacggaggacaccagcacacttagcgattccctaagcgaaaacctgagtctctttttgtggtatcttgttcggggtttatgtcttctgggaattatgttatgggggagcgttagcctgaccatggtcacattgatcacactgcctctcctgttcctattgcccaagaaagttggaaaatggtaccagttacttgaagtgcaggtgagagagagcctggctaagagttcccaggtggcaatcgaggctctgtcagccatgcccactgtcagaagttttgcaaatgaggagggagaagcacagaagtttagggagaagctccaggagattaagactctaaaccagaaggaggcagtggcctacgctgtgaactcttggacaaccagcattagtggcatgctccttaaggtgggcatactgtacatcggtggacagcttgttacttcaggcgccgtttcttccggcaacctcgttactttcgtgctctatcagatgcagttcacacaggccgtggaagttttgctgagcatatatccaagagtgcagaaagctgtgggctcctccgaaaaaattttcgaatacctggacagaacacccagatgtcctcccagcgggctccttacccccctgcacttggaaggcttagtacagttccaggatgttagttttgcctacccgaaccgtcccgacgtgctggtgctccaaggtctgacttttacactgcgtcctggcgaggtcactgccctcgtgggtccaaacggatcaggaaaatccacagtggctgccttactccagaacctctaccaacccaccggaggacaattgctcctggacggtaagcctctcccccagtacgagcacagatacctgcacagacaggtggcggcggtcggtcaggagccacaagtgtttgggcgttctttgcaggagaatatcgcatacggcctgacacaaaaaccaacaatggaggagatcactgccgccgcagtgaaaagcggagcccatagctttatttcgggattgccccaaggctacgacacggaggttgatgaggctggctcccagctgagtggggggcagaggcaagccgtggccctggccagggcacttatccgaaagccctgcgtcctcattctcgacgatgccacctcagctctagatgccaattcacagctgcaggtggagcagttgctgtatgaaagcccagagagatactcacggtccgtccttcttattacccaacatctttcgctggttgagcaggccgaccacattctgtttcttgagggcggagcaatcagagaggggggtacccatcagcaactgatggaaaagaagggctgttattgggctatggtccaggcccccgcagacgcgcccgagtag

SEQ ID NO: 13183 - DNA, 1644 bp, Artificial Sequence
  derived and/or modified sequence
atggccatccctttcttcaccggccgcctgaccgattggattctgcaggacggtagcgccgacacattcacaagaaatttgaccctgatgtcaatcctgactatcgcctctgctgtgctggaatttgtcggtgacggtatctacaacaacactatgggccacgtgcattcccatctgcagggcgaagtgttcggggctgtccttaggcaagagacagaatttttccaacagaatcagaccgggaatatcatgagcagggtcaccgaggacacatccaccctgagtgactctctgtcagaaaatctatcgctgttcctgtggtatctggtgaggggactgtgtttgttagggattatgttgtgggggtcagttagtttgacaatggtgactctcatcacattacctctcctgttcttgctcccgaaaaaggtcgggaaatggtaccagttgctagaagtacaagtccgcgaaagcctggccaagagctctcaagtggcaattgaggctctcagcgcaatgcccacagtgcggagctttgcaaatgaagaaggagaggcccagaagttccgggaaaaactgcaggaaattaagacactgaatcagaaagaggctgtcgcatatgcggtaaactcatggaccactagcattagtggcatgcttctgaaagtgggcatattatatattggcggacagctagtcaccagtggtgctgtgagttcgggaaacctggtgactttcgtactgtaccaaatgcagttcacacaagcagtggaggtgctgctgagcatctatcctagggtgcagaaagcagttgggagcagcgagaaaatcttcgagtacttggatcggacaccccggtgtcctccttctggtttgctgacgccattacatctggagggcctggtgcagtttcaggatgtttcttttgcttatcccaaccgacccgatgtactcgtgctgcagggcctgacgtttacactgagacctggtgaagtaacggccctggtagggcctaatgggtcaggaaagtccaccgtggccgcacttctgcagaatctgtaccagcccaccggcggacaacttttgctcgatggcaagcctctgcctcagtacgaacatcggtacctgcaccgccaggtggccgcagtgggacaggagcctcaggtgttcggacggtcccttcaggagaacatagcctatggcctaactcagaagccaacaatggaggaaattactgccgccgctgtcaagagcggcgcccacagcttcatcagcggtctgcctcaggggtacgatacagaggtggatgaagctggctctcagctcagtggtggacagagacaggcagttgcactggctagagccttgatcaggaagccctgcgtcctgattttggacgacgctacgagcgccctggacgccaactctcagctacaggtggagcagctgctgtacgaaagcccagagaggtactccagatcagtgttgctaattactcagcacttgagtctcgtggaacaggccgaccatatcctcttcctggaaggcggtgctattagggagggtgggacacaccagcagcttatggagaaaaaagggtgttattgggccatggtgcaggcccctgccgacgctccagaatag

SEQ ID NO: 13184 - DNA, 1644 bp, Artificial Sequence
  derived and/or modified sequence
atggccattccttttttcaccggtagactgaccgactggatccttcaagatggcagtgccgacacattcactcggaacctcacactgatgtccatactgactatcgcgtcggcagttttagagttcgtgggagatgggatatataacaacacaatgggtcacgtccactcccacctccagggcgaggtgttcggggcggtgctgagacaggagacagagttcttccaacagaatcaaaccggcaacattatgtctagagtaacagaagacacaagtactctgagcgactctttatcagagaacttaagtctcttcctgtggtatctagtgcgtggcctctgtctgctggggatcatgctatgggggagtgtgtcactcactatggtgacgcttataaccctcccccttctattcttgcttcccaagaaggtgggaaagtggtatcagctgctggaggttcaggttcgggagtccctcgctaagtccagccaggtggctatagaggctctttcggctatgcccaccgtgagaagcttcgccaacgaggagggggaggctcagaagttcagggagaaacttcaagaaattaagactctgaaccagaaggaggcggtcgcatatgcagtgaattcttggacaaccagcatatccggtatgttgctgaaagtgggaatcctttacatcgggggccaactggtaacttcgggagccgtgtcatccggaaaccttgttacttttgtcctgtaccagatgcaattcacccaggccgttgaagtgctgctcagcatctatcctagggtacaaaaagcggtcggttcatcagagaaaatatttgaatacttggatcgcacaccaaggtgccccccttctggcctgttaacgccccttcacctggaggggctggtccagttccaggatgtatccttcgcatacccgaatagacctgatgtactcgttctccagggccttacttttacgctgcggccaggcgaagtgacagcccttgtgggtcctaatggcagcggcaagagcactgtcgctgccctcttgcagaatctgtatcaaccgaccggcggacagttactcctggacgggaagccccttccacagtacgaacatcggtatctgcacagacaggttgctgcggtcggacaggagcctcaggtgttcggaaggtcactgcaggaaaacattgcttatggtctgacccagaaacccactatggaggaaatcaccgccgccgccgtcaagtccggcgctcactcattcatcagcggactgccccaggggtatgataccgaggttgatgaagccggatctcagctgagtgggggtcaacgccaggcggttgcactcgcccgggctctcattagaaagccttgtgtactgatcttggatgacgccacgtctgctttggatgccaattcacaattgcaggtggaacaactcctttacgagtcccctgaaaggtactcaaggtctgtgttgctgatcacccagcacctcagcctggtcgagcaggcagaccatattctatttctggaaggcggggctatcagagagggcggcacacaccagcaacttatggaaaagaagggctgttattgggccatggtacaggccccggccgatgcaccggaatag

SEQ ID NO: 13185 - DNA, 1644 bp, Artificial Sequence
  derived and/or modified sequence
atggctattcccttctttaccgggaggctgactgactggatcctgcaggatggcagtgctgatacatttacgagaaatctcactctgatgtctattctaacaattgcgagtgctgtgctggaattcgtcggggatggaatatacaataatacaatgggacacgtccactctcacctgcaaggcgaggttttcggtgctgtcctccgacaggaaacggaattctttcagcaaaaccagactggtaacataatgtcaagggtgacggaagacacctctactctctccgatagtctgtctgagaacctgtccctcttcctgtggtatctagttcggggcctgtgtctccttggcattatgttatggggctctgtgagtctgacaatggtgactctcatcacattgccgctgttgtttcttctaccgaagaaggtcgggaagtggtaccaactcctcgaagttcaagtgagagagtctctggccaaaagctctcaggtagcaatcgaggccctgtccgcaatgcccaccgtgaggtcctttgccaacgaagagggcgaggcccagaagtttagagaaaaattgcaggagattaaaacgctcaaccagaaggaagcagtagcctacgccgtcaattcttggacaaccagcatttctggcatgctgctcaaggtcggtatcctctacatcggcgggcagctagtgaccagtggtgcggtttcttccggaaatttagtgacctttgttctctatcaaatgcagtttacacaggcggtggaggttctgctttcaatctacccgcgagtccagaaggcagtgggctcaagcgaaaagatatttgaatatttggacaggactccgcgatgtcccccgagtgggctgctgactcccctccacctagaaggactcgtccagttccaggacgtgagctttgcttatccaaatcgacccgacgtactggtactgcagggtctcacgttcacactgcgaccaggagaagttactgcattagttgggcccaacggctcaggaaaatctacagtggcagccctcttgcagaacttataccaaccaaccggcggccagcttctattagacggcaagcccctgccgcaatacgagcacaggtacctgcaccgacaggtggctgccgttgggcaagagccacaggtattcggccgctctttgcaagaaaacatagcttacggtcttacccaaaagccaaccatggaggagattaccgcagcagcggtcaaatccggggcacattcatttatatccgggctcccgcaaggctacgatactgaggttgatgaagccggttctcaactttccggcgggcagaggcaggccgtcgccctggcccgggctctcattaggaaaccatgtgtgctcatcctggatgacgcaacaagcgccctggatgctaacagtcagctacaagtggagcaactgctgtacgaatcgccggagcgctatagtcgctccgtgctcctcattacacagcacctgagccttgtggagcaggccgatcatattctgtttttagagggaggcgctattagggagggtgggacacatcaacagctcatggaaaagaaggggtgttattgggcaatggttcaggctcccgccgatgcgcccgagtag

SEQ ID NO: 13186 - DNA, 2427 bp, Artificial Sequence
  derived and/or modified sequence
atggccgagctgctggccagcgctggcagcgcctgctcctgggacttcccccgggccccacccagcttccccccacctgctgccagcagaggaggcctgggcggcaccaggagcttccggccccacagaggagctgagagcccccggcccggccgggacagagatggagtgcgggtgcccatggccagcagccgctgcccagccccccggggctgccgctgcctgcccggggccagcctggcctggctgggcaccgtgctgctgctgctggccgactgggtgctgctgaggacagccctgccccgcatcttcagcctgctggtgcccacagccctgcccctgctgcgggtgtgggccgtgggcctgagccgctgggccgtgctgtggctgggcgcctgtggggtgctgcgggccaccgtgggcagcaagtcagaaaatgctggggcccagggctggctggccgccctgaagcccctggccgccgccctgggcctggccctgcccggcctggccctcttccgggagctgatctcctggggcgcccctggcagcgctgacagcacccggctgctgcactggggcagccaccccacagcctttgtggtgtcctatgctgctgccctgcctgctgctgccctgtggcacaagctgggcagcctgtgggtgcctgggggccagggcggcagcggcaaccctgtgcggcggctgctgggctgcctgggcagcgagacccggcggctgagcctcttcctggtgctggtggtgctgagcagcctgggggagatggccatccccttcttcaccggccgcctgacagactggatcctgcaggacggcagcgctgacaccttcaccaggaacctgaccctgatgagcatcctgaccatcgccagcgctgtgctggagtttgtgggagatggcatctacaacaacaccatgggccacgtgcacagccacctgcagggcgaggtgtttggagctgtgctgcggcaggagacagagttcttccagcagaaccagacaggcaacatcatgagccgggtgacagaggacaccagcaccctgagtgacagcctgtctgagaacctgagcctcttcctgtggtacctggtgcggggcctgtgcctgctgggcatcatgctgtggggctctgtgtccctgaccatggtgaccctcatcaccctgcccctgctcttcctgctgcccaagaaggtgggcaagtggtaccagctgctggaggtgcaggtgcgggagagcctggccaagagcagccaggtggccatcgaggccctgagcgccatgcccaccgtgcgcagctttgccaatgaggagggggaggcccagaagttccgggagaagctgcaggagatcaagaccctgaaccagaaggaggccgtggcctatgctgtgaacagctggaccaccagcatcagcggcatgctgctgaaggtgggcatcctgtacatcggcggccagctggtgaccagcggggctgtgagcagcggcaacctggtgacctttgtgctgtaccagatgcagttcacccaggccgtggaggtgctgctgagcatctacccccgggtgcagaaggctgtgggcagcagcgagaagatctttgagtacctggacaggaccccccgctgccccccatctggcctgctgacccccctgcacctggagggcctggtgcagttccaggatgtgtcctttgcctaccccaacagaccagatgtgctggtgctgcagggcctgaccttcaccctgcggcctggagaggtgacagccctggtgggccccaacggcagcggcaagagcacagtggccgccctgctgcagaacctgtaccagcccaccggcggccagctgctgctggatggcaagcccctgccccagtatgagcaccgctacctgcaccggcaggtggccgctgtgggccaggagccccaggtgtttggccgcagcctgcaggagaacatcgcctacggcctgacccagaagcccaccatggaggagatcacagctgctgctgtgaagagcggggcccacagcttcatcagcggcctgccccagggctatgacacagaggtggatgaagctggcagccagctgagcggcggccagaggcaggccgtggccctggcccgggccctgatcaggaagccctgtgtgctgatcctggatgatgccaccagcgccctggatgccaacagccagctgcaggtggagcagctgctgtatgagagccctgagcgctacagccgctctgtgctgctgatcacccagcacctgagcctggtggagcaggccgaccacatcctcttcctggagggcggggccatccgggagggcggcacccaccagcagctgatggagaagaagggctgctactgggccatggtgcaggccccagcagatgcccctgagtag

SEQ ID NO: 13187 - DNA, 1644 bp, Artificial Sequence
  derived and/or modified sequence
atggccatccccttcttcaccggccgcctgacagactggatcctgcaggacggcagcgctgacaccttcaccaggaacctgaccctgatgagcatcctgaccatcgccagcgctgtgctggagtttgtgggagatggcatctacaacaacaccatgggccacgtgcacagccacctgcagggcgaggtgtttggagctgtgctgcggcaggagacagagttcttccagcagaaccagacaggcaacatcatgagccgggtgacagaggacaccagcaccctgagtgacagcctgtctgagaacctgagcctcttcctgtggtacctggtgcggggcctgtgcctgctgggcatcatgctgtggggctctgtgtccctgaccatggtgaccctcatcaccctgcccctgctcttcctgctgcccaagaaggtgggcaagtggtaccagctgctggaggtgcaggtgcgggagagcctggccaagagcagccaggtggccatcgaggccctgagcgccatgcccaccgtgcgcagctttgccaatgaggagggggaggcccagaagttccgggagaagctgcaggagatcaagaccctgaaccagaaggaggccgtggcctatgctgtgaacagctggaccaccagcatcagcggcatgctgctgaaggtgggcatcctgtacatcggcggccagctggtgaccagcggggctgtgagcagcggcaacctggtgacctttgtgctgtaccagatgcagttcacccaggccgtggaggtgctgctgagcatctacccccgggtgcagaaggctgtgggcagcagcgagaagatctttgagtacctggacaggaccccccgctgcccccccagcggcctgctgacccccctgcacctggagggcctggtgcagttccaggatgtgtcctttgcctaccccaacagaccagatgtgctggtgctgcagggcctgaccttcaccctgcggcctggagaggtgacagccctggtgggccccaatggaagtggcaagagcacagtggccgccctgctgcagaacctgtaccagcccactggaggccagctgctgctggatggcaagcccctgccccagtatgagcaccgctacctgcaccggcaggtggccgctgtgggccaggagccccaggtgtttggccgcagcctgcaggagaacatcgcctacggcctgacccagaagcccaccatggaggagatcacagctgctgctgtgaagagcggggcccacagcttcatcagcggcctgccccagggctatgacacagaggtggatgaggccggcagccagctgagcggcggccagaggcaggccgtggccctggcccgggccctgatcaggaagccctgtgtgctgatcctggatgatgccaccagcgccctggatgccaacagccagctgcaggtggagcagctgctgtatgagagccctgagcgctacagccgctctgtgctgctgatcacccagcacctgagcctggtggagcaggccgaccacatcctcttcctggagggcggggccatccgggagggcggcacccaccagcagctgatggagaagaagggctgctactgggccatggtgcaggccccagcagatgcccctgagtag

SEQ ID NO: 13188 - DNA, 2427 bp, Artificial Sequence
  derived and/or modified sequence
atggccgagctgctggccagcgctggcagcgcctgctcctgggacttcccccgggccccacccagcttccccccacctgctgccagcagaggaggcctgggcggcaccaggagcttccggccccacagaggagctgagagcccccggcccggccgggacagagatggagtgcgggtgcccatggccagcagccgctgcccagccccccggggctgccgctgcctgcccggggccagcctggcctggctgggcaccgtgctgctgctgctggccgactgggtgctgctgaggacagccctgccccgcatcttcagcctgctggtgcccacagccctgcccctgctgcgggtgtgggccgtgggcctgagccgctgggccgtgctgtggctgggcgcctgtggggtgctgcgggccactggaggcagcaagtcagaaaatgctggggcccagggctggctggccgccctgaagcccctggccgccgccctgggcctggccctgcccggcctggccctcttccgggagctgatctcctggggcgcccctggcagcgctgacagcacccggctgctgcactggggcagccaccccacagcctttgtggtgtcctatgctgctgccctgcctgctgctgccctgtggcacaagctgggcagcctgtgggtgcctgggggccagggcggcagcggcaaccctgtgcggcggctgctgggctgcctgggcagcgagacccggcggctgagcctcttcctggtgctggtggtgctgagcagcctgggggagatggccatccccttcttcaccggccgcctgacagactggatcctgcaggacggcagcgctgacaccttcaccaggaacctgaccctgatgagcatcctgaccatcgccagcgctgtgctggagtttgtgggagatggcatctacaacaacaccatgggccacgtgcacagccacctgcagggcgaggtgtttggagctgtgctgcggcaggagacagagttcttccagcagaaccagacaggcaacatcatgagccgggtgacagaggacaccagcaccctgagtgacagcctgtctgagaacctgagcctcttcctgtggtacctggtgcggggcctgtgcctgctgggcatcatgctgtggggctctgtgtccctgaccatggtgaccctcatcaccctgcccctgctcttcctgctgcccaagaaggtgggcaagtggtaccagctgctggaggtgcaggtgcgggagagcctggccaagagcagccaggtggccatcgaggccctgagcgccatgcccaccgtgcgcagctttgccaatgaggagggggaggcccagaagttccgggagaagctgcaggagatcaagaccctgaaccagaaggaggccgtggcctatgctgtgaacagctggaccaccagcatcagcggcatgctgctgaaggtgggcatcctgtacatcggcggccagctggtgaccagcggggctgtgagcagcggcaacctggtgacctttgtgctgtaccagatgcagttcacccaggccgtggaggtgctgctgagcatctacccccgggtgcagaaggctgtgggcagcagcgagaagatctttgagtacctggacaggaccccccgctgccccccatctggcctgctgacccccctgcacctggagggcctggtgcagttccaggatgtgtcctttgcctaccccaacagaccagatgtgctggtgctgcagggcctgaccttcaccctgcggcctggagaggtgacagccctggtgggccccaacggcagcggcaagagcacagtggccgccctgctgcagaacctgtaccagcccaccggcggccagctgctgctggatggcaagcccctgccccagtatgagcaccgctacctgcaccggcaggtggccgctgtgggccaggagccccaggtgtttggccgcagcctgcaggagaacatcgcctacggcctgacccagaagcccaccatggaggagatcacagctgctgctgtgaagagcggggcccacagcttcatcagcggcctgccccagggctatgacacagaggtggatgaagctggcagccagctgagcggcggccagaggcaggccgtggccctggcccgggccctgatcaggaagccctgtgtgctgatcctggatgatgccaccagcgccctggatgccaacagccagctgcaggtggagcagctgctgtatgagagccctgagcgctacagccgctctgtgctgctgatcacccagcacctgagcctggtggagcaggccgaccacatcctcttcctggagggcggggccatccgggagggcggcacccaccagcagctgatggagaagaagggctgctactgggccatggtgcaggccccagcagatgcccctgagtag

SEQ ID NO: 13189 - DNA, 2427 bp, Artificial Sequence
  derived and/or modified sequence
atggccgagctgctggccagcgccggcagcgcctgcagctgggacttcccgcgtgctccaccctccttcccccctccagccgccagtaggggcggtctgggcggaacgcggagctttcgaccacacagaggcgctgaatctccacgcccgggacgggatagagacggtgtgagagttcccatggcgtcgagtcgatgtccagcccctagaggctgtcgctgcttgcccggagcatcactggcctggctcggtaccgtgctccttctgctggctgactgggtgctgctgaggaccgcactgccacgaatcttctctctgctggtgcccaccgccctgccactgttgagggtgtgggccgttggtctgtctaggtgggcagtgctgtggctcggtgcttgtggagtgctgagggccacagtggggtcaaaaagtgagaacgctggcgctcaggggtggctggctgctcttaaacctttggccgctgctctggggctggctctcccaggtctcgccctcttccgagagctgatttcctggggtgcacctggcagcgctgattctacccggctcttacactgggggtcacatcctactgcctttgttgtgtcttacgcagcagcactcccagccgcggccctgtggcacaaactgggcagcctgtgggtccctggggggcagggagggtcggggaacccagtaaggagactcctgggctgtttgggcagtgagaccagaaggttgtccctattcttggtgctggtggtgctctcgagcctcggagagatggcaatcccattcttcaccggccgcctgacagattggatcctgcaggatggcagtgccgacacattcacccgaaacctcaccctgatgtctattcttaccatcgctagcgctgtactcgagtttgtaggtgacggtatctataataataccatgggacatgttcacagccaccttcaaggtgaagtgtttggggctgttttacggcaagaaaccgaattcttccagcagaaccaaaccggaaatatcatgagtcgcgtgacagaggacacttctactctatcagattctctgagcgaaaatctgtcactgttcctgtggtatcttgtgagaggtctgtgcctccttgggatcatgctgtggggatctgtctctctcaccatggtgacactgatcactctgccacttctcttcctactccctaagaaggtcgggaaatggtaccagttgctggaagtccaagtaagggaatccctggcgaagagctctcaggttgctatcgaggctctgagtgccatgcctacagtgcggtccttcgcgaacgaggagggagaggcccagaagttccgcgaaaagctgcaggaaattaagaccctgaatcagaaggaggccgtggcttatgctgtgaactcttggaccacttcaatctctggaatgctgcttaaagtcggcatactgtatatcggaggacagttggtgaccagcggtgcggtaagttcgggcaatttggttactttcgtactgtatcagatgcagtttacccaggccgttgaggttctcctctccatctatccacgagtacaaaaggctgtgggctcttcagagaagattttcgagtaccttgatcgaacaccacgatgccctccgtctggcttactcacgcccctgcatctggagggtctagtccaatttcaggacgtctcttttgcctaccccaatcgccccgacgttctggtcctgcaggggctcacttttacactgcgtcccggcgaggtcaccgccctcgtgggaccaaacgggagcggcaaatccactgtcgccgcactcttgcagaatctctatcagccaacaggagggcagctcttgcttgacggcaagcccctgccacagtacgagcataggtacctccatagacaggtggcagcagtaggtcaagagccgcaggtgtttggtaggtccctgcaggaaaacatcgcatacggactgacccagaagccaactatggaggagataaccgccgcagccgttaaatccggcgcccattcgtttatttctggtcttccccaggggtacgatacagaggtagacgaggcagggagtcagctaagcggcggccagagacaggccgtggccctcgcccgtgctctgatccggaaaccctgtgtattaatccttgatgacgcaaccagcgccctcgatgctaactcccagttgcaggtagaacagctcctctacgagtcccctgaaagatatagcagaagcgtgctcctgattactcagcatctctctctcgtcgaacaggccgaccatatcttgtttctggaaggcggggcgatcagggaaggaggcacccaccagcagcttatggaaaaaaaaggatgttattgggccatggtacaagcgcccgcggacgctcctgagtag

SEQ ID NO: 13190 - DNA, 2427 bp, Artificial Sequence
  derived and/or modified sequence
atggccgagctgctggccagcgccggcagcgcctgcagctgggacttcccccgagccccgccatcctttcccccaccagcggcttccaggggcggcttgggaggtacacggtcatttagaccgcataggggcgccgaatcaccgcgtcccggtagggatcgagatggtgttcgagtgcctatggcgtcttcgcgctgtccagcccctcgcggttgtagatgtctcccgggggccagtctggcctggttgggcacggttctattgttactggccgattgggtgctgctccgcacagcattgccccggattttttccctacttgtacccacggcactgcccctcttgcgggtatgggcggtgggactcagtagatgggcggtactatggctgggcgcttgtggagtcttgcgggctaccgttggctccaagagcgagaatgcgggcgcacaggggtggttggccgcgctaaaaccactcgccgccgccctcggccttgcgctccccggtctggcactgtttagagagttgatcagctggggagcccctgggtccgcggatagtacccgcttgctccactggggcagtcaccccaccgccttcgtggtttcatacgctgctgcgctgcccgccgccgccctctggcataaactggggagtctctgggtgccaggtggccagggaggttctggtaatcctgtgaggcggttgctcggctgtttggggtcggagaccaggaggctgtctctctttctggtcctcgtggtcctgtcctcgttgggcgagatggcaataccattcttcacaggtaggctcaccgactggatcctgcaggacggttcagctgatacttttacaaggaacctgaccctaatgtcaatccttacgatcgcctcagccgtcctggagtttgtgggcgacggaatctacaacaataccatgggtcacgtgcacagccacttgcagggagaagtgtttggagccgtgcttcggcaggagactgaattttttcaacagaaccagacgggaaacattatgagtcgcgtaaccgaagatacttccactctatccgattcgctgtccgagaacttgtccctattcctgtggtacctggtgcgtggtctttgtctgctcggaatcatgctctgggggtctgtgtcgttgacaatggtcacactcattacactgcctctgctctttcttctccctaagaaagtcgggaagtggtaccaactcttggaagttcaagtccgcgagtccctagcaaaaagctctcaggtggctattgaggcactcagtgctatgccaacggtccgaagctttgcaaacgaggaaggcgaagcacagaaatttcgggaaaagctgcaggaaatcaagacactgaatcaaaaggaagcggtagcttatgcagttaattcttggacaacgagcattagcggaatgctcctgaaagtcggcattttatacatcggcggccagcttgtgacgagcggtgccgtgtcatccggaaatctggttacctttgttctttatcaaatgcagttcactcaggccgttgaggtgcttctgtcaatctatccccgggttcagaaagctgttggttcctcagaaaaaatcttcgaatatctcgacagaacaccacgatgtcctccctcaggactgctgacacccctccacctggaaggcctggtccaatttcaagacgtgtccttcgcatatcctaaccggcctgacgtcctggttctgcaggggctgacttttaccttgcgccctggtgaagtcacagcactcgtcggccctaacgggtccgggaagtcaactgtggcagccctccttcaaaacctgtaccaaccaaccggaggacagctactgctggacggtaaacctcttccacaatatgagcaccgctatctgcatcggcaggtggctgcagtgggtcaggaaccccaggtctttggccgctcattgcaggagaatatcgcatacggcctgacccagaagccaaccatggaggaaattacagcagcagctgtgaaaagcggggcgcattcctttattagcggactgccacaaggctacgatacagaggtggacgaagctggtagccaacttagcggaggccaaaggcaggcagtggccctcgctcgggctttgattcggaagccctgcgtacttatcctggatgacgcaaccagcgccttagatgccaatagccagctgcaagtggagcagttgctgtacgaatcaccggagcgttactcaaggagtgtcctgttgataacgcagcatctgagtctcgttgaacaggctgaccacattctgtttctggagggtggagcaatcagggagggagggacccaccagcagctcatggaaaaaaaggggtgctactgggcaatggtgcaggctcctgcggatgccccagaatag

SEQ ID NO: 13191 - DNA, 2427 bp, Artificial Sequence
  derived and/or modified sequence
atggccgagctgctggccagcgccggcagcgcctgcagctgggacttccccagggctcctccatcatttccgcctcccgctgcatcgcgaggggggctcggaggcacgcggtcctttcggccacatcggggggcagaaagcccgcgaccaggcagagatcgcgacggggtgagggtgcccatggcatccagcagatgcccagcccctcgtggctgccgatgtctccccggcgcctctctcgcctggctggggacggttttgctcctcctggccgattgggttctcctgaggactgcacttcctcgtatcttctctctgttggtgcccacagctcttcctctcctaagggtgtgggccgtgggactttctcgttgggccgtgctgtggctcggggcctgtggcgtgttacgcgctactgtgggtagtaagtcagaaaatgccggagctcagggatggctggcagctttaaagcccctcgccgcagcactggggctggctcttccaggacttgcactgttccgcgaactgattagttggggggcccccggaagcgctgactccacaagactgctacactgggggtcacaccctaccgcctttgtggtgtcatatgccgccgcgctcccagccgctgccctttggcacaagttaggtagtctctgggtaccaggcggccagggaggctccggaaaccccgtccgtcggctccttggttgtctggggtccgagacccggcggctctccctattcctggtgttagtggtcctaagctcccttggcgaaatggccattcctttctttaccggccggctgacggactggatcttgcaggacggctcagccgatacttttactcggaatctcaccctgatgtccattctgaccatcgcttcggccgtgctggagttcgttggtgacggtatctacaacaataccatgggccacgtccacagtcatctgcagggagaagtgttcggagcagttttgcgtcaggaaacggagtttttccagcagaatcaaacaggaaatatcatgtccagagtcactgaggataccagtacattaagcgacagcctcagtgagaatctgagcctatttctctggtacctcgtccgagggctgtgcttactgggaattatgctgtggggaagcgtgtcactcacaatggtcacgctgattaccctccctctgctctttctactacccaagaaggttggtaaatggtaccaactgctggaggtgcaggtcagggaatcattggccaagagctctcaagtagccattgaagccctgagcgcaatgcctacagtcaggtcttttgccaacgaggaaggggaggcccaaaagtttcgcgagaagttgcaggagataaaaacactgaaccaaaaggaagccgtggcctacgccgtgaactcatggaccacgagtatctctggcatgctcctgaaagtggggattctctatatcggggggcaattggtgacctccggagcagtgagcagcggcaaccttgtcacctttgtgttgtatcagatgcagttcacccaggcagttgaggtgcttctgtccatctatccacgcgtgcagaaagccgtggggagttctgaaaagatctttgagtacctggatcgcacgcctcggtgccctccatcagggcttttaacgcctcttcacttggagggcttagtgcaattccaggatgtgagttttgcgtatccaaatagaccagacgtgcttgttctacaaggacttacttttactttgaggcccggcgaagtgactgccttagtgggccctaatggctcaggaaagtcaaccgtcgcagcactcctgcagaacttgtaccagcccactggaggacagctactgctcgacggaaagccgctcccacagtatgaacacaggtaccttcaccggcaggttgctgccgttggccaggaaccccaggttttcgggcggagtctccaagagaatatagcgtacggcctgacccagaagccaacaatggaggagattacggcggctgctgtgaagtctggcgcgcacagctttatttcaggtctgccccaggggtacgacacagaagttgacgaagcgggctcccaattgtcaggcggccagaggcaagccgtggccctggcgcgggcgctcattcgcaagccttgtgtgctcatcctagatgacgccacctctgctttagacgctaacagtcagctgcaggtcgagcagctgctttacgaaagccctgagcgctactcacgatccgtgctgctgatcacacaacacctgtccctggtggagcaggctgatcacattctcttcctggaaggaggggctataagagaggggggaactcaccaacagcttatggagaagaaaggatgctattgggcgatggtgcaggctcccgctgacgctccagagtag

SEQ ID NO: 13192 - DNA, 2427 bp, Artificial Sequence
  derived and/or modified sequence
atggccgagctgctggccagcgccggcagcgcctgcagctgggacttccccagagcgccgcctagcttcccaccccccgcagcctctcggggaggcctaggtgggacacgatcatttcggccccaccggggggcggaatcccctagacccgggagggatagggacggagtgcgggtgcccatggccagctccaggtgtcccgccccgaggggatgtcgctgcctcccaggagctagccttgcttggctgggcaccgtgctgctgctgctggctgactgggtactgcttaggactgcccttcctcggattttctctctgctagttccaacggctctgcctcttctccgggtctgggctgtcggtctgtccaggtgggctgtgctctggttgggcgcttgtggggtgctacgcgccaccgtcggcagcaaaagcgagaatgccggcgcgcaggggtggctcgctgcacttaagcccctcgccgccgctctggggctcgcacttccagggctcgctttatttagggagctaatttcttggggggcccccggcagcgcggattccacaaggctcttgcactggggatcacatcccactgcatttgtggtgtcctacgccgcagctctgcccgctgctgccctttggcacaaactgggcagcctatgggtgccagggggacagggaggctcaggcaatccagtgcgacgccttttgggctgcttggggtcagagacccggcggctttccctgtttctggtgctggtcgtactgtcatcattaggtgagatggccataccgttctttacgggcagactgaccgactggatcctgcaggacggctccgctgacacatttacaagaaacctgacacttatgagcattctgacgatcgcctctgccgtgctggagtttgtgggcgatggcatttataacaacacgatggggcacgtgcatagtcacctgcagggcgaggtttttggcgcggtgctcaggcaggagacggagtttttccagcaaaaccagacgggaaatatcatgagtcgtgtgactgaagatacgagtacgctcagcgactctttatcggagaatcttagtctgttcttgtggtacctagtccggggactatgcctcctggggataatgttgtggggaagtgttagtcttaccatggtaacactgatcactttgccccttctcttcctacttcctaaaaaagtgggtaaatggtatcagctcctggaggtgcaggtcagagagtctctggcaaagagctctcaagtggccatcgaagccttgtctgcgatgcccacagtcaggtcttttgccaacgaggagggtgaggcccaaaagttccgggaaaaactgcaggaaattaagaccctcaaccagaaggaagccgtggcttacgctgtaaacagttggacaacttctatcagcggtatgctgctcaaagtcgggattttgtatattggcgggcagttggtaaccagcggggcggtctctagtggtaatctagtgacgttcgtgctgtatcagatgcagtttacacaggctgtggaggtccttctgtcgatctaccccagagttcagaaagcagtcgggagctcagagaaaattttcgagtatctcgatagaaccccgcggtgtccgccttcgggacttcttacacctctgcacctggagggcctcgtgcagtttcaggacgtaagctttgcctatcccaatcggcccgacgtgttggttctgcagggactgacatttacgctcaggcctggggaggtcaccgcattggtcggacctaacggatcaggaaagtcgactgtagcagctctactgcagaacctgtatcagccaacaggcggccagctgctgcttgatgggaagccgctgcctcaatatgagcacagatacttacataggcaggtggccgccgtcggccaggaacctcaggtgtttggccgttctctgcaggagaacatcgcttacggcctaacacagaaaccaacgatggaggaaatcactgccgccgcagttaagagcggagcacacagcttcatttctggactgcctcagggctatgataccgaggtggacgaagcgggaagtcagctcagcgggggccagagacaggccgtggccctggcccgggccctgattagaaaaccttgcgtgttgattctagacgacgccaccagcgccctcgatgccaattcacaactccaagtagaacaactcctgtacgaatctccagaacgctacagccggagtgtgctgctgatcacacagcacttgagcctagtcgaacaggccgatcatatcctgtttttggagggcggggccattcgggaaggtggaacccatcagcagctcatggaaaagaagggctgctattgggccatggtacaggcacctgcagacgcgccagaatag

SEQ ID NO: 13193 - DNA, 2427 bp, Artificial Sequence
  derived and/or modified sequence
atggccgagctgctggccagcgccggcagcgcctgcagctgggactttccgcgcgcccccccgtcgttcccccctcccgccgcaagcaggggtggattgggtgggaccaggtcgttcagaccacaccgcggggccgagtcccccagacccggcagagatcgtgacggggtgcgggttccaatggcttctagtagatgtccagccccaagaggctgcaggtgtctccctggagcctctctcgcttggctaggaacagtgttactgctcctggcggactgggtgctgctcaggacagcccttccacggattttcagtcttcttgtcccgacagccttgcctcttctgcgcgtgtgggcagtaggtctgtctcgatgggctgtgctttggctgggcgcttgcggcgttctgcgcgcaaccgtcggttctaagtccgagaatgccggagcccaaggatggctcgctgcccttaagcccttggcagccgcccttggtctggcactgcctggcctagcattgttccgagagctaatatcttggggcgcccccgggtctgctgacagcaccaggctgctgcattggggaagtcaccccactgcttttgtcgtgtcctacgcggctgccctgcctgcagcggctctctggcacaagctcgggtctctctgggtcccaggcggacagggcggcagtgggaatcccgtgaggcggctcctgggctgtttaggctctgagacgagacgtcttagtttgtttttggtactagttgttctgtcttcccttggggagatggccatcccttttttcactggccgactcacggattggatcctgcaggacggcagcgccgacacatttaccagaaatctgacactgatgagtatcctgacgatcgcctccgctgtcctggaattcgttggcgacggaatttacaacaataccatgggccatgtgcattcccatttgcagggagaggtcttcggggccgtccttcgtcaggagaccgaatttttccagcagaatcagacaggcaacatcatgtctcgtgtaacggaggatacgtccacactctccgacagcctctctgaaaacttgtctttgttcttatggtatctggttcggggcttgtgtctgctgggcataatgctgtggggtagcgtttccttaactatggtaacactgattactctacccctgctgttccttctccctaaaaaggtgggcaaatggtatcagctcttagaggtccaagttagagaaagccttgccaagtcaagccaggtggccattgaagccctcagtgcaatgcctacagtgaggagtttcgcgaatgaggagggcgaggcgcaaaagtttagggagaagcttcaggaaataaagacacttaaccagaaggaggcagtcgcatatgcagttaacagctggactacctccatttctgggatgctgctcaaagttgggattttgtacattggggggcaactcgtcacttcaggagcagtgtcatcaggaaatctggtcacctttgttctgtaccagatgcaatttacccaggccgtcgaggtgctgctctctatctacccaagagtgcagaaggcagttgggagttcagagaagatttttgagtacctagaccgcactccacgatgccccccaagcgggctgcttacgcccctgcatttggagggcctcgtacagtttcaggacgtcagcttcgcttaccccaaccgaccggatgttttagtgctccagggcttgaccttcaccttaagacccggagaggtcacggcactggtcggacctaatgggtcaggcaagtccacagtcgcagccctactccagaatttgtatcagccaacaggcgggcagctcctgctggacggaaaaccattgccccagtacgaacatagatacctgcaccgccaggtggccgccgttggacaagaaccacaggtcttcggccgctcccttcaggagaatatcgcctacggcctgacgcagaagcctactatggaagaaattaccgcagcagccgtgaaatcgggcgcccactccttcatcagcggcttgccccagggatacgacaccgaggtcgacgaagctggctcacagctgagcggcggccagagacaggcagttgctctggcacgagcattgatcagaaaaccttgcgtcctcatcctggacgatgcaactagtgcattagatgctaatagccaactgcaagtggaacaactgctatacgaaagccctgaacgatactctcggtctgtgctcctcattacccaacacctctccctagtggaacaggcagatcacatcctcttcttggagggcggagccattcgagagggcgggactcaccagcagctgatggaaaagaaaggatgctactgggcaatggttcaggcccccgctgacgctccagagtag

SEQ ID NO: 13194 - DNA, 1644 bp, Artificial Sequence
  derived and/or modified sequence
atggccatccccttcttcaccggccggctgaccgactggatcctgcaagacggctctgcagatacattcacaaggaatcttactcttatgtccatactgaccatagcgagcgctgtgctggaattcgttggcgacgggatctacaacaacaccatgggacatgtgcattcacacttacaaggagaagtatttggggccgttctaaggcaggaaaccgagtttttccaacagaaccagacaggtaatatcatgagcagagtgaccgaggatacatctaccctttcagattccctgagcgagaatctgtccttattcttatggtacctggtcagaggattgtgtcttctgggcattatgctttggggctccgtcagcctgactatggtgaccctaattactctgccccttttattcctactgcctaagaaagtgggcaagtggtatcagttactggaggtccaagtgagggagtccctggctaaaagtagccaggttgctatagaggccttgagcgcgatgcccactgtgaggtccttcgcgaatgaggagggcgaggcccaaaagtttcgcgagaagttgcaagagataaaaaccctaaaccagaaggaggctgtcgcctacgccgtgaactcttggacgacgtcgatttctggaatgctcctgaaagtgggtatactatacattggcggtcaactggttacctcgggtgccgtaagctcaggcaatctcgtgacttttgtcttatatcagatgcagtttactcaggcggtcgaggtcttgctgagcatctatccccgcgtacagaaggctgtggggagctcggaaaaaatttttgagtatcttgaccgaactccacgttgcccaccttcaggccttctcaccccactacacctggagggtctggtgcagttccaggacgtctcttttgcctaccccaatcggcctgacgtgctggtgttgcagggacttactttcacgttaagacccggcgaagtgacagccctggttggccccaacgggtctgggaaaagtactgtggcagccttacttcagaacttgtaccagccaacaggcgggcagctcctcctagacggcaaaccactgcctcagtacgagcaccggtatctccatcggcaagtggccgcagtcggccaggagccccaagtgttcggacgttcacttcaggaaaacatcgcttatggcctcactcagaaaccgacaatggaagagattacagcggccgcagtcaagtctggtgcacatagcttcatctccggcctgccccagggatacgacaccgaagtagatgaggcaggctcccagttaagtggaggccagagacaagccgtcgctctggccagagctctgattcgtaaaccatgtgtgctcattctcgacgatgcgacatccgccttagatgcaaatagccagttacaggtggagcaactactatacgagtctcctgaacggtattccagaagcgtgcttcttataacccaacacctgtccctggtagagcaggctgaccatatcctgtttctggagggaggagctattcgtgaaggcggaacgcaccaacagcttatggagaagaaggggtgctattgggcaatggtccaagcccctgctgatgctcccgagtag

SEQ ID NO: 13195 - DNA, 2427 bp, Artificial Sequence
  derived and/or modified sequence
atggccgagctgctggccagcgccggcagcgcctgcagctgggacttcccgcgcgctcctccctcatttcctccacctgccgctagcagaggcggccttggcggtactcgctcttttcgcccccataggggggctgaaagccctaggccagggcgggatcgagatggcgtgagagtgcctatggcctcctcccggtgccccgcgccacgggggtgccggtgcctgccaggcgcatctctggcttggctgggaactgtgttactcttgttggctgactgggtactgctacggacagctctgcctcgcatcttcagtctgctggtccctacagcactgccactcctgagggtgtgggcagtgggactctctcgttgggccgttctttggctgggagcgtgcggcgttttacgcgctaccggaggaagcaagtcggaaaacgccggagcccagggttggctggcagcactcaagccactggctgcagcccttgggctggccctaccaggcctcgcactctttcgggagctgatctcctggggtgcccccgggagtgccgattccacccgactgttgcactgggggagccaccctacggcttttgtagtctcttacgcagccgctctgcccgcagcagccctgtggcataaactggggtctttgtgggtacccgggggacagggtggcagtggaaatccggttcgtcgtctcttaggatgcttaggatcggagacaaggagactgtcactgtttctggtgctggtcgtcctatccagcctcggtgaaatggccatcccattttttactggccggctcacagactggattctacaagacgggagtgccgacacttttaccaggaaccttacccttatgagtatcttaactatcgctagtgcagtgctggagtttgtaggcgatggaatttataacaacactatgggacacgttcacagtcacctgcagggcgaagtttttggggccgttcttcggcaggagacggaattttttcaacagaaccagaccggaaatattatgagcagggtgaccgaagacacaagcacgctcagtgattccctgagtgagaatctgagcctgtttctatggtatttggtgcgcggcctatgtctgctaggcatcatgttgtggggctctgtctctttgactatggtcacgctgattacacttccactcttgtttttgctgcctaaaaaggtgggcaaatggtatcagctgctggaggttcaggtgcgtgaatcactggctaagtccagtcaagtggctatagaagcactcagcgccatgccaacggttcgcagctttgctaacgaagagggggaggcgcagaagttcagggaaaagcttcaggagataaagacattgaaccaaaaagaggccgtagcttatgccgtgaattcttggactacctccatatctggcatgctgcttaaagtggggatcttgtacatcggcggccagctggtaacctccggagcggtctcctctgggaacctggtgactttcgtgctgtaccagatgcagttcacccaggccgtagaggtactgttgagcatctaccctcgggttcagaaagccgtcggtagcagcgagaagatttttgaatatttggaccgcactccgaggtgtccgccaagcggcctcctgactcctctccaccttgaaggactggtacagttccaggatgtcagcttcgcctacccaaaccggccggacgtgctggttctacagggcctcacatttaccctcagacctggggaggttaccgcgttggtgggacctaacgggtctggcaagagtaccgtggccgccctgctacagaatctttaccagcccaccggcggtcagctgctgctggatgggaaacccctgcctcagtatgagcatcggtatctccacaggcaagtagctgcggtaggacaagaaccccaggtattcggtcgcagtctgcaggaaaacattgcctatggcttgacacagaagccaactatggaggagattacagccgctgctgtcaagtccggggcgcattctttcattagtggcctaccacagggctatgacactgaggtggatgaggctggcagccagctgagcggaggccaacgccaggccgttgccctggcaagggcactgatccgaaaaccgtgtgtgctaatcctggatgatgccacttctgcactagatgctaactcccaactgcaagtggaacagctgctctatgagagtccagagcgatattcgaggagcgtgctgctcatcacccagcatttgtccttggtggagcaagcagatcacatcttgttccttgagggcggcgccatacgcgagggaggtacgcaccagcagttaatggaaaagaagggctgttactgggctatggtgcaggccccagcagatgccccggagtag

SEQ ID NO: 13196 - DNA, 2427 bp, Artificial Sequence
  derived and/or modified sequence
atggccgagctgctggccagcgccggcagcgcctgcagctgggacttccctagagctcctcctagctttcctcctcccgctgccagccggggtggactcggcggcactcggagttttagaccgcaccggggtgccgaatcccctaggccaggtagagatagggacggcgtgagagtgccaatggctagttccaggtgtcccgccccccgagggtgtcggtgcttaccaggggcaagtctcgcttggttggggactgtcctcctgctgttggcagattgggtgttgttaagaacagccctccctaggatcttcagcctcctggtgccaaccgcgctcccactcctaagagtatgggctgttgggctgtcgagatgggctgtgctgtggcttggggcctgcggtgtactgagagcgacagtgggttccaaaagcgagaacgctggcgcacaggggtggttggccgctctcaaaccactggctgccgcactggggctggcgcttcccgggctggcccttttcagggagctgatctcttggggcgccccaggtagcgcagattcaactcggcttctccactggggtagtcaccccaccgcctttgtggtgagctacgcggcagctctgccggccgctgcactgtggcacaagttgggctctctctgggttccgggaggtcagggcggttccggaaaccccgtcagaagattgctcggatgtctgggatctgagacaagacgcctgtcgctgtttctcgtcttagtggtgctgtcatctcttggggagatggccattccttttttcacagggcgcctgacagactggatcctccaggatgggtcagccgacactttcacgcgcaatttgaccttgatgagtatcctgactatcgcttccgcggttctagagttcgtgggagatggcatctataataacaccatgggtcacgtgcattcgcatctgcagggggaggtgttcggggcagttcttcgacaggagacagagttttttcagcagaatcagacaggtaacatcatgtctcgggtgaccgaagacacttctactctgagcgactccctgtccgagaatctctcactgttcttgtggtatctggtacgagggctatgcttacttgggataatgctgtggggatctgtttcactgactatggtcaccctgatcacattgcccctgctcttcctcctccccaaaaaggtgggaaagtggtatcaattgcttgaggtgcaggtgagggaatccttagccaagtcaagccaggttgctatagaggccctttctgccatgcccaccgttcggtcattcgcaaacgaagagggcgaagcacagaagtttcgggagaagcttcaggaaataaagaccctgaaccaaaaagaggccgtcgcttacgctgtgaattcctggacaacaagcatctccggaatgttactgaaagtggggatcctgtacattggaggccaactggttacatcgggagccgtcagctcaggcaatctcgtcacctttgtactgtatcagatgcaattcacacaagctgttgaagtgctcctgagcatataccctagggtgcagaaggctgttggttcttccgagaaaattttcgagtatctggacagaactccgaggtgtcccccttcaggcctgcttaccccactgcatctcgagggactggtgcaattccaagacgttagttttgcctaccccaaccggccagatgttctcgtgctgcagggactcacctttacgctccgtccaggcgaggtgactgcactggtagggcctaatgggtccggcaagtccactgttgccgcactgttgcagaacctctaccagcccaccggcgggcagctcctgctcgatggcaagcccctgccccaatacgaacatcggtatctgcaccgccaggtcgcagccgtaggacaggagccccaagtgtttggaagatcactgcaggagaatatcgcttatggactgacacagaaacctacgatggaggaaatcacggcagctgccgtgaagagcggggcgcatagtttcattagtgggctgccgcaggggtacgacaccgaggttgacgaggcaggctctcaattgtctgggggccagaggcaggccgtggcactcgcaagggccttaatcaggaaaccatgtgtcctcattctggacgatgccacttccgccctcgacgctaattcacagctccaggtggaacagctgttatacgagtctcctgaacgctattccagaagtgtactcctcatcacccaacatctttctttggtagagcaggctgaccatatcctcttcctggagggaggagcaatccgagagggtggtacacaccagcagctgatggaaaagaaggggtgctactgggcaatggttcaggcccccgctgacgccccagagtag

SEQ ID NO: 13197 - DNA, 2427 bp, Artificial Sequence
  derived and/or modified sequence
atggccgagctgctggccagcgccggcagcgcctgcagctgggactttcctagggctcccccaagctttccaccacccgccgctagcagaggaggtctgggtgggacaagaagctttcgtcctcatagaggggcagagagtccccggccaggtcgggatagagacggagtgcgagttccaatggcaagctcaaggtgtccggccccacgaggttgtcgctgtctgcccggcgctagtctggcgtggctcgggactgtgctgctgctccttgcagattgggttttgctgaggactgctcttccacgcatctttagtctcctggtcccgacagcccttccattgctacgcgtctgggccgtgggcctgtcgagatgggccgtgctctggttgggggcttgcggggtactacgcgctactgtcgggtccaaaagtgaaaacgccggggcccaggggtggctagccgctctaaagcccttggccgctgccctgggcctcgctctgcccggattggcactgttcagggagctgatctcatggggagccccagggagcgccgatagtactcgactcctgcattggggctcacatcccacagcattcgtggtttcttatgccgccgcccttccggctgccgccttgtggcacaagttaggttccctgtgggtgcctggtgggcagggaggctccggaaatcccgtgcgcagacttttgggctgtcttggctccgagacacgccgtctctccctgtttctcgttcttgttgtgctcagttccctgggcgagatggcgatacctttttttacgggtagactgacagattggatcctgcaagatggcagcgcggacactttcacccggaatctcaccctcatgtccatcctgaccatcgcgagtgccgtgctggagtttgtgggggacggcatatacaataacaccatgggccatgttcactctcatttgcaaggtgaggtgtttggcgcggtgctgagacaggaaaccgaatttttccagcagaaccagactgggaatatcatgtcgagagtgactgaggacacaagcaccctgtcagattcattaagtgaaaatctgagcctattcctgtggtatctcgtgcggggtctctgcctgttggggatcatgctttggggctccgtctctctgacaatggtaactttgattacactgccgcttctgttcctgcttcccaagaaggtgggcaagtggtaccagctgctggaggtccaagtgagagagagtttggctaagtctagccaggttgccatcgaggccctgtccgctatgcccacagtgcgcagcttcgccaatgaagaaggcgaagcgcaaaaatttcgtgagaaactccaggaaatcaagaccctgaaccagaaggaagctgttgcctacgccgttaacagctggaccacttctatcagtgggatgctgctgaaagttgggatcttgtacattgggggacaattggtgacatcaggagcagtgtcttctgggaatctggtgacttttgtgctgtaccagatgcagtttactcaggcagtggaggtactcttgagtatatatcctcgagtgcagaaggccgtgggatctagcgaaaaaatatttgagtatttggacaggactccacggtgccccccttctgggctgctgacgccgctgcatctggaggggcttgttcagttccaagacgtgtcctttgcttacccaaatcgacctgacgttctggtgttgcaggggctcactttcactctccgacctggggaggtgacggccttggttggaccaaacggaagcggaaagagcacagttgcggccctcctccagaacctgtaccaacccacaggagggcagttgctccttgacggaaaacctttgccccaatacgaacaccgctatcttcaccgtcaggtagccgctgtgggccaagaaccccaggtatttgggcgcagtttgcaggagaacatagcgtacgggctgacccagaagccgaccatggaagagatcacagccgccgccgtgaaatcaggcgcccattcttttatttctggattgccccagggctacgacaccgaagtggatgaggccggcagtcagctgagtggcggccagcgacaggctgtagctctggctcgtgctctgattcggaagccatgcgttttgattttggatgacgctacatctgctctggatgccaattctcagctccaggttgaacagcttctgtacgagagccccgaaaggtactctcgcagcgtattactgattacacagcatttgagcctcgtcgagcaagctgatcatattctgttcctcgagggcggcgcaataagggaaggggggactcatcaacagcttatggagaaaaagggttgttattgggccatggttcaggcacccgcagatgcacccgagtag

SEQ ID NO: 13198 - DNA, 1644 bp, Artificial Sequence
  derived and/or modified sequence
atggccatccccttcttcaccggccggctgaccgactggatcctgcaggacggaagtgcggatacgttcactaggaacctgaccctgatgtccattctcaccatagcaagcgccgtcctcgagtttgtgggagacggcatctataacaacaccatgggacacgtgcatagtcacctgcaaggcgaagtctttggtgctgtcctccgccaggagaccgagtttttccagcagaaccaaactgggaacattatgtctagggtgaccgaagatacaagtacactgtcagactcactgtccgagaacttatctttatttctctggtatctcgttaggggcctctgtctattgggtatcatgctgtgggggtcagtttctctcaccatggtaaccctgatcacactgcccctgctcttcctgctgcctaaaaaagttggcaaatggtatcaactgttggaagtgcaggttagagagtccctggctaaatcctctcaagtggccatcgaggccctcagcgccatgcctaccgttcgaagtttcgcaaatgaggagggcgaagcacagaagtttagggagaaactgcaggaaatcaagactctgaatcaaaaggaagccgtcgcatacgccgtgaattcgtggaccacgagtatcagcggaatgctgctgaaggtcgggatactgtatataggcggacagctggtgacatccggagccgtgtcttcagggaacctggtaacctttgtcctctaccagatgcagttcactcaggcggttgaggttctgctctcaatctatccccgcgtgcagaaagccgtgggatcaagtgagaaaatcttcgaatacctggacagaactcccagatgtcccccttccgggctcctgactccgctgcatttggagggactggttcagttccaggacgtgtcctttgcataccccaaccggcctgacgtgttagtgttacagggattgactttcacgctgaggccaggcgaagtcactgccctcgtaggccctaacggtagcggcaaatccaccgtggctgccctcctgcaaaacctataccagcccaccggtgggcagctgctgcttgacgggaaacctctccctcagtatgagcatagatatttgcaccgacaggttgctgcagtcggccaggagccacaggtattcggtagatctcttcaggagaacattgcctacggtctcacacagaagccaactatggaggagataaccgctgccgctgtaaagtctggggctcatagttttattagcggcctcccccagggctacgacaccgaggtggacgaagctggatctcagctcagtggcgggcagaggcaggctgtggcactggcaagggcccttattaggaagccttgcgtccttattctggacgacgcgacatctgccctggacgccaattcacagctccaagttgaacagctcctttacgagtcaccagagaggtattcgcggagtgtactgcttataacccagcacctttcattggtagaacaggcggaccacatccttttcttggaaggaggggcaattcgggagggaggcacacatcagcagctcatggaaaaaaagggttgctactgggccatggtgcaagctcccgctgacgcacctgaatag

SEQ ID NO: 13199 - DNA, 1644 bp, Artificial Sequence
  derived and/or modified sequence
atggccatccccttcttcaccggccggctgaccgactggatcctgcaggacgggagcgctgacaccttcactagaaatctcaccttgatgagcatcctcaccattgcttcagctgtcctggaatttgtgggcgatggaatttacaacaatacaatgggccatgtacattctcacctgcaaggagaggtgtttggcgctgtcctgcggcaggagactgagttcttccagcagaaccagactggaaacatcatgagcagggtgacggaagatacatcaaccctttctgactccctgtccgagaacctgtccttgttcctttggtacctcgttcgcggcctgtgcttattagggatcatgctgtggggctccgtcagtctcactatggtgaccctcatcacgctccctcttttatttctccttcccaaaaaagtgggtaaatggtatcagcttctcgaggttcaagtgagagagtccttggccaaatcctctcaagtggctattgaagcgctgtctgccatgccaacagtcaggtcattcgctaacgaagaaggtgaggcccaaaagttcagggagaaattgcaggaaatcaagacgctgaaccaaaaagaagccgttgcttatgctgttaattcttggactacctctatttctgggatgctcctaaaggtggggattctgtacatcggaggccagctagtgaccagtggagcagtgagcagtggaaatctggtgacctttgttttataccagatgcagttcacgcaggcagtcgaggtactgttgtcgatctatccaagggttcagaaagccgtgggcagtagcgaaaaaattttcgaatatctcgaccgcaccccgagatgcccccccagtgggctcttgacccccctccacctggagggactagttcaatttcaggacgtatccttcgcctacccaaaccggccggatgtgctggtattgcaaggcctcacattcaccttgagaccaggtgaggttaccgccctggtgggacctaacgggtctgggaagtccactgtggcagcattgctccagaatctttatcagcctactgggggccagctcctgctggatggcaagccactcccccagtacgagcataggtatttgcatagacaagtggccgccgtgggccaggaaccacaggtttttggtagatcactacaggaaaatattgcttacgggcttactcaaaagcctaccatggaggagatcactgctgccgccgtgaaatcaggcgcacattccttcatcagtggattaccacaaggctacgataccgaggtcgatgaggcggggagccagctttctgggggtcagaggcaggctgtggcattagcccgcgccctgatccgtaagccctgcgtccttatcctggatgacgcgacaagcgccctggacgctaactcacagctccaagtagagcagctgctttacgagtcgcctgagcggtattctaggtccgtccttctcattactcagcacttgagtctcgtggagcaggccgaccatatcctgtttcttgaaggcggcgctatccgggagggaggcacacaccagcagctgatggaaaaaaaggggtgctactgggccatggtgcaggctcccgctgacgcccccgaatag

SEQ ID NO: 13200 - DNA, 1644 bp, Artificial Sequence
  derived and/or modified sequence
atggccatccccttcttcaccggccggctgaccgactggatcctgcaggatggctccgctgatactttcacacgcaatctgactctgatgagtatactgacgatagcttcagctgtgcttgagttcgttggggacggaatttataacaacacaatggggcacgtgcactcacacttgcagggcgaggttttcggcgcggtcctccgtcaggaaacggaattctttcagcaaaatcagactggcaatattatgagcagagtgaccgaagacacaagcactctttcagatagtttgagcgagaatctgtccctttttttatggtatctggtcagggggttatgcctgctgggcataatgctgtgggggagtgtttccctcacgatggtgacactgattacactgcctctgctgtttctcctgccaaaaaaggtgggcaagtggtatcagcttcttgaggtgcaggtgcgagaatcactggctaagtcctctcaggtcgctattgaagctctctctgcaatgcccactgtgaggtcttttgccaacgaggagggcgaggctcagaagtttcgtgagaaactacaggagatcaagactctgaatcagaaggaagccgttgcctacgccgtgaatagctggaccacttctatttccggcatgttgttaaaagttggcattttgtatatcggcggccagctagtgacctctggggctgtgtcctcaggtaacctcgtgaccttcgtgctctatcaaatgcagtttacccaggccgtggaggttctgctatccatctaccccagggtgcagaaggcggtgggctcctcagaaaaaattttcgagtacctcgataggacccccagatgcccgcccagcgggcttctgacccctctccatctcgagggattagtccaatttcaggacgtgtcattcgcctatcctaaccgacccgacgttctagtattgcaggggctgacctttacacttcgacccggagaggtgacagccctcgtggggccaaacgggagtgggaaatccaccgtggctgcgctactacagaacctttaccaaccaacagggggccagcttctgctggatggcaaaccgctaccacagtacgagcaccgatatctgcatcgccaggtcgctgcggtggggcaggagccccaggtgttcggccgatccctgcaggaaaacatcgcttacggcctgacccagaaacccacaatggaagaaataacggctgctgctgtaaaatcgggggcccattctttcatatctggattgccacaagggtatgacaccgaagttgatgaggccggctctcagttaagtggcggccaacgccaggctgtggctctggccagagcacttatccggaagccatgcgtgcttatccttgacgatgccacctcagcccttgacgccaatagccagctgcaggtagaacagttgctctacgaatctccagagcggtactcccgtagcgtgctgctgatcacccaacacttgtcgttagtggagcaggctgaccacatcctgtttctggaaggcggcgccataagggagggcggtacacaccaacagcttatggagaagaagggatgttattgggccatggtgcaggctccagctgatgcccctgaatag

SEQ ID NO: 13201 - DNA, 1644 bp, Artificial Sequence
  derived and/or modified sequence
atggccatccccttcttcaccggccggctgaccgactggatcctgcaggatggaagtgccgatacatttactcggaatctcaccctcatgtcgatcctcactatcgcaagcgccgttctggaatttgtgggggacggtatttataataatacaatggggcacgttcattcccatttgcagggcgaggtattcggtgctgtcctccgtcaagagaccgagttcttccagcaaaatcagacagggaatattatgagtagggttacagaagacacaagcacattgtcagacagccttagcgagaacctgtccctctttctttggtacctggtaagaggcttgtgcctgctggggatcatgctctggggttcggtctcacttacaatggttactttgataactttgcccttgctgttcctcctaccaaaaaaagtcggcaagtggtaccagctactagaagttcaagtacgggagagtctggctaagagtagccaggtggcgattgaggcgttatctgctatgccgacagtaagatcatttgccaatgaagagggcgaagctcagaaatttagagagaagctccaggagattaagaccctgaaccagaaagaggcggtcgcatatgccgtgaattcctggactacatccatctcgggtatgttactaaaggtcgggattctgtacatcggcggccagctcgtcacgtctggagccgtgagctctgggaacctcgttacatttgtgctgtaccagatgcagttcacccaagcagtggaggtattgcttagcatttaccctcgggtgcaaaaggccgttggcagctccgagaagatatttgagtatctggatcggacgccaaggtgtccaccttcaggccttttaactccccttcaccttgagggcctcgtgcagttccaggatgtttcctttgcctatcccaaccgccccgacgtgctagtcctccagggattgacgtttacgctgcggcctggggaggttaccgctttagtgggccctaatggcagcggtaagagtacggtggccgccctgttgcagaacctctaccagccaaccggaggtcagttgctgttggacggcaaacccctgccacaatacgaacaccgttatttgcaccgccaggtggctgccgtgggacaggagccccaggtatttgggcgctctctgcaagagaatatcgcgtatgggctgacccagaaacccaccatggaagagattaccgccgccgccgttaagtccggagcccactcattcatctccggactgccgcagggatatgacacagaggtcgatgaggcaggatcacagctttcagggggtcagcgacaggctgtggctctagctagggctttgatccgtaagccgtgtgtgttgatcctcgatgacgctaccagtgccctggacgccaactctcagttgcaggttgaacagcttctttacgagtctcctgagagatatagtcggagcgtcttactcattacacagcatttgagcctagtggaacaggctgaccacatactgttcctggagggtggagctattagggaaggcggcacacaccagcaattgatggaaaagaagggctgctactgggcaatggtgcaggcacctgccgatgcccctgaatag

SEQ ID NO: 13202 - DNA, 1644 bp, Artificial Sequence
  derived and/or modified sequence
atggccatccccttcttcaccggccggctgaccgactggatcctgcaggacggctctgcagatacatttactaggaaccttacactgatgtccatcctgacgatagcgtctgctgttctggagtttgtgggggacgggatctacaataataccatggggcacgttcacagccacctccagggcgaggtctttggcgccgtgttgcggcaggaaaccgagttttttcagcagaatcagaccggcaacattatgtccagagttacagaggatacctctactctgtcagattcactgagtgagaatctttcacttttcctttggtacctggtcagaggcctgtgcctgctcgggatcatgctgtgggggagtgtgtcactcaccatggtgaccttgatcacattacctctcctgttcttattaccaaaaaaggtggggaagtggtaccagctcctcgaagtccaggttcgagaaagcctggctaagagctcacaggtggcaatagaggcactgagcgcgatgcccactgtgcgctccttcgcgaatgaagaaggtgaggcccagaagttccgcgagaaattgcaggaaattaagaccctcaaccaaaaggaagccgtggcctatgcagtgaattcgtggacaacatccatatccggcatgcttctgaaggtcggtatcctgtacatcggcggccagctggtgaccagcggcgcagttagtagcgggaatctcgttaccttcgttctgtatcagatgcagttcacccaagccgttgaagtgttgctttctatctacccccgggtgcagaaagccgtcggcagttcagagaaaatttttgagtacttggacagaaccccgcgatgccccccttctggcctgctgacccccctccatcttgaggggttggttcagttccaggacgtaagcttcgcatatcctaaccgaccggacgtgctggttttgcaaggacttactttcactctgaggcctggggaagtgacagccttagtaggacccaacggctctggcaagtccacagtggctgcccttctgcagaatctgtatcaacctactgggggccagcttctgctcgacggaaagcctctgccacaatacgagcaccgatacttacaccgtcaagtcgcagcggttgggcaggaacctcaggtttttgggcggtcactacaggaaaacatagcttatgggcttactcagaaacccactatggaagaaatcacagccgcggctgtgaagagtggagcacacagttttatctcaggactgccacaggggtatgatacagaagtggacgaggcaggaagtcagttgtccggcggccagcgacaggcagtagctttggcccgcgccctaataaggaagccttgtgttctgatcctagacgatgccaccagtgctttggatgccaatagccaactgcaggtcgagcagctcctctatgagagccctgagcggtatagtaggagcgtccttctgataacccagcatctgtccttagtagagcaggctgaccacatcctctttctggagggaggtgccatacgcgaaggcggaactcatcaacagctcatggagaagaagggatgttactgggcaatggtgcaggccccagccgacgccccagagtag

SEQ ID NO: 13203 - DNA, 1644 bp, Artificial Sequence
  derived and/or modified sequence
atggccatccccttcttcaccggccggctgaccgactggatcctgcaggacggatcagcagataccttcacaagaaacttaactctgatgagtatcctgaccatagcctccgctgttctggagttcgtcggtgacgggatttataataatacaatgggacacgtacattcccacctgcagggagaggtgttcggcgccgtgttaaggcaggagaccgagttttttcaacagaaccaaaccggcaacataatgtcccgggtaactgaagatacatccactctctcagacagtctcagcgagaatctgtcccttttcctttggtacctcgtgagagggctgtgtctgctcgggattatgttgtggggtagcgtgtcactaacgatggtgacgctcatcactttacccctcctgtttttgctccctaaaaaagttggaaaatggtaccaattattggaggtgcaagttcgtgagagcttggctaagagtagtcaggtggcaattgaggccctgtccgccatgcccacagtccgctccttcgctaacgaagagggtgaggcccagaaattccgagaaaagctgcaagagattaaaacactgaaccagaaggaggcagtagcctacgcggtgaactcatggactacatcaatcagcggcatgctgcttaaagtcggcattctatatatcggaggccagctcgtaacctccggggccgtttcgtcaggtaacctggtcacattcgttctctatcaaatgcagtttacccaagccgtagaggttcttctcagtatttatcctcgtgtgcaaaaggctgtgggaagctctgagaagatttttgagtacctggacagaactcctaggtgccctccgagcggcctgcttaccccgctccatctggaagggttggtgcagtttcaggacgtgtccttcgcctaccccaacagacccgacgttctcgtgttacaggggcttacattcacactgcgccccggcgaagtaaccgccctggtcggccccaacgggagcggaaaatcaactgttgccgctctgttacaaaacctgtatcagcccaccgggggccaactcctattggatgggaaacctctgccacagtacgaacaccgttatttgcacaggcaggtggctgccgtcggacaggaaccccaggtcttcggtcggagcctccaagagaacattgcttacgggctgacccagaagcccacaatggaagagattacagctgctgcagtgaagagcggagcgcattcctttattagtggtctgcctcagggctatgacacagaagtggatgaggccggatcccagctcagcggcggacagagacaggccgtcgccctcgcaagggccctcatccgtaagccatgcgtgctgattctggacgacgctacatcagccctcgatgccaactcccagctacaagtggagcagttgctgtacgaatctcctgagcgatatagcagaagcgtgctcctcatcactcagcatttgagcctggtggaacaggcggatcacatactgttcctcgagggcggcgcaatccgtgaaggcggcacccaccagcaactcatggagaaaaagggatgctactgggccatggtccaagcccctgccgacgcgcctgaatag

SEQ ID NO: 13204 - DNA, 1644 bp, Artificial Sequence
  derived and/or modified sequence
atggccatccccttcttcaccggccggctgaccgactggatcctgcaagatggaagcgcggatacatttacaaggaacctgaccctgatgagtattttgactatcgcctcagcggtgctggagttcgttggcgacggcatttataataatactatgggccacgtccattcacacctccagggcgaggtgttcggcgcggtcttgaggcaggagacagagttctttcagcagaatcagacaggcaatattatgagcagggtgacagaagatacctccactcttagcgactctttgtcagagaacttgagcctgttcctgtggtacctggttcgggggctgtgcctgctcggaataatgctctggggctctgtcagcctcaccatggtgacactgatcacactgcccctactttttctcttgccaaaaaaagtgggcaagtggtatcagctcctcgaggtgcaggtccgagagagtttggcgaaaagcagccaggtggccatcgaggccctgtctgctatgcccaccgtcaggagcttcgccaacgaggagggggaggcgcagaaattccgagaaaagctgcaggagattaaaacactgaaccaaaaagaagcagttgcctatgcagtgaattcttggacgacttccatcagcggcatgctgcttaaggtgggcattctctatatcggcgggcaactggtgaccagtggcgcagtgtctagcgggaatctggttactttcgtactctaccagatgcagttcacacaggccgtggaggtgctgctgtctatctatccccgcgtccagaaggcagtgggatcgtcagagaaaattttcgagtacctggaccgcaccccccggtgtcctccgtccgggctcttgactcccctccaccttgagggcctggtgcagttccaagacgtctctttcgcttatccaaatcgccctgatgtactggttttgcagggactcaccttcactctgcgacccggagaggtgaccgcgctggtcggtcccaacgggtctggaaagtcaacagtcgccgcacttctccagaatctttaccagccaacaggaggtcagctgctcttggatggaaaacctctgcctcaatacgagcaccgataccttcatcggcaggtagccgccgtcggacaagagccccaagtgtttggacgcagcttgcaggagaacatcgcttatgggctgacacagaagcctacgatggaagaaattactgccgctgcggtgaagagcggagcacacagcttcatctccgggttaccgcagggctatgataccgaggtggacgaggcggggagccagctgagcggtggccagcggcaggcggtcgctctcgctcgggccttaattaggaagccatgcgtccttatcctagacgacgcgacttccgccctggatgcgaactctcaactacaggtcgaacagttgttgtacgaatcaccggaacgttactctagatcagttcttctgatcacccaacatctatcattagtcgagcaagctgatcacatcttgtttcttgagggaggtgcgatacgtgagggaggaacccatcagcagctgatggagaagaaaggatgttattgggccatggtccaggctccggccgatgcccctgagtag

SEQ ID NO: 13205 - DNA, 2427 bp, Artificial Sequence
  derived and/or modified sequence
atggccgaattgctggcatcagcaggctccgcctgttcctgggacttcccaagggcacctcccagtttccctccacctgctgcttccagagggggattgggaggcaccaggagctttaggccccacagaggcgctgagagcccgagacccggaagagatcgcgatggggttcgcgtccccatggcctcatccaggtgtccagctccacgaggatgtcgctgcttgcccggagccagccttgcctggctgggaacagtcttgctgctgctcgcagactgggttctgctacggacggcactccctcgaatcttcagtcttctggttcctactgccctccctctgctgagagtctgggccgtgggcctttcgaggtgggccgtgctgtggctcggcgcttgtggagtattgcgcgctaccgtcggaagtaagtccgagaatgccggagcccagggatggctggccgcactcaagcctctggctgccgctctggggttagcacttcctggcctcgccctcttcagggagctgatatcctggggggctcccggatcagctgacagtaccaggctgttacactggggttcccaccccactgcattcgtggtgtcgtacgcggctgctctccctgcggctgccctctggcacaaactagggtctctgtgggtcccaggaggccaggggggatccggaaaccctgtgaggcggctcctcgggtgcctaggcagtgagaccaggcgactgtctctgtttttggttctcgttgtgctctcatctcttggcgagatggccatcccttttttcaccggacgcctgacggactggattctgcaggacggaagcgccgatacatttacccgcaatctgactctaatgtccatactgacaatcgcctcagccgtgcttgaatttgtgggtgatggcatatacaacaacacaatgggacacgtgcacagtcacctgcaaggagaggtgtttggcgctgtcctgcggcaggagactgagtttttccagcagaaccagactggcaatattatgtctagggtaaccgaagacactagcactctttccgattcactcagtgagaatctttccttgttcctttggtatttggtaaggggtctctgtctgctgggcattatgctatggggtagtgtgtccctcaccatggtgactcttatcactctccccctgctcttcttactccctaaaaaggtgggcaagtggtaccagctgttagaggtgcaggttagggagtcactcgctaagagctcccaggtggccattgaggccctctcagcaatgccaaccgtgcgctcttttgctaatgaggaaggtgaagcccagaagttccgtgagaagttacaggagatcaagaccctgaatcagaaggaggctgtggcttatgccgtgaatagttggactacttcgatatctggcatgttactgaaggtcgggatcttgtacatcgggggtcagttggtgacttccggggctgtaagctctgggaatcttgtcactttcgtactataccagatgcaattcacccaagcagtggaagtcctgttgagtatctaccctcgagtccagaaagccgttggctcctccgaaaagattttcgagtatctggataggacaccacgttgccccccatccgggctcctgacacctctgcacctcgagggacttgtgcaattccaggatgttagcttcgcgtacccaaatcgcccagacgtcctcgtattgcaaggcctcacgtttactcttcgccctggagaggttacagccctagttggcccaaacggatccggcaagtcaaccgtggccgcattactacagaatctgtaccagccaaccggcggtcaactgctgcttgatgggaaacctcttcctcagtatgaacatagatatctccatcgccaggtggcagcagtgggacaagagccacaagtgtttgggaggtccctgcaggagaatatagcctacgggctcacccagaagcccacaatggaggaaattacagcagctgcagttaagtctggcgcacattcttttatctcgggacttccccagggctacgataccgaagtggacgaggccggttcccagctgtccggcggtcaacgccaggcggtcgccctggcaagggcgctgattaggaagccttgcgtcctcatcctggatgatgcaacgtctgcactcgatgcaaactcccaacttcaggtggaacagttattgtacgagtctccagagcgatactcccgcagtgttctgctaattactcagcacctgagcttagtggaacaggctgaccatatcctgttcctggagggcggtgctattcgggaaggaggaactcatcagcaactcatggagaagaagggttgttactgggctatggtgcaggctccggcagatgcccctgagtag

SEQ ID NO: 13206 - DNA, 2427 bp, Artificial Sequence
  derived and/or modified sequence
atggctgagctactggcatccgctggttccgcctgcagctgggactttccccgagcaccaccctcctttccgcctcccgcagcttccagggggggactcggcggaaccaggagcttccgacctcataggggagccgaatcccccaggcctggcagggaccgtgacggagtgagggtgcccatggctagctctcgatgcccagcaccccgtggatgtcggtgcttaccgggagctagcttggcctggctgggcaccgtcctgctgcttttggccgattgggtgctgctccgtaccgccctgcctagaatcttttccctcctggttcccacggccttgcctttgctgagggtctgggcagtgggcctatcgcgctgggccgtcctgtggctcggcgcttgtggcgttctgagagcaaccgtgggctccaagtcggaaaacgccggtgcccagggttggctggccgctctcaagccgctggctgcggctctgggattggccctgccagggctggcactctttagagaactgatctcatggggagctcctggatctgccgacagcacgcgcctgctgcactggggcagtcatcctaccgcctttgtggtctcttacgccgcagccctcccggctgccgcactttggcacaagctagggagtctatgggtgcccggagggcaagggggatccggcaatcccgttcgccgactgttggggtgcctgggatcagaaacaagacgcttgtccctgtttcttgttttggtggtgctcagctcactgggggaaatggcaatcccttttttcactggccgtctgactgattggatcctccaggacggatccgctgacaccttcactaggaacctgacgctcatgtccatcttaacaattgcctctgccgtactcgaatttgtgggtgatgggatctacaataacactatgggccacgtccattctcaccttcaaggcgaagtgtttggcgctgtcctgaggcaggaaaccgagttcttccagcagaatcagaccggtaacattatgagccgggttacagaggataccagtactctaagcgattccctatcagaaaacctcagcctgtttctctggtacctggtgcgaggtttgtgcttactgggcatcatgctgtggggatcagttagcctgaccatggtaacgctgataactttgccactcttgtttctgctgcccaaaaaggtggggaagtggtaccagctgctagaagttcaggtgagggagtccctggcgaagtcctcgcaggtggccatcgaagctctgagcgctatgccaactgttcggagcttcgccaacgaggaaggcgaggcccagaagttccgcgagaagttgcaggaaataaaaacactcaaccagaaggaggctgtggcctatgctgtcaactcgtggacgaccagcatctctgggatgttgctcaaggtgggtattctctatattggcggacagctcgtgacttcaggcgctgtctcgtccggcaacctggtgacatttgtactgtaccagatgcagtttacacaggccgtcgaagtgttactcagtatataccctagagtgcaaaaagcagtggggagctccgaaaaaattttcgagtacctggataggaccccacggtgtcccccaagcggcttgttaacaccactccatcttgaaggcctggttcaattccaggacgtgagtttcgcctaccccaaccgccctgatgtcctggtgctccagggactcacgttcactctgagaccaggagaagtaactgctctggttggcccaaatggaagtggtaaatccaccgtcgccgctctactccagaatctctaccagcctactgggggacagttgcttttagatgggaagccattgccccagtacgagcaccgatatctccaccgacaggttgctgccgtgggccaggaaccacaggtcttcggacggagtctccaggagaatatagcatacggacttacccagaaacctacaatggaggagatcacagctgcggctgtgaagagcggagcacacagctttataagcgggcttcctcagggctatgataccgaggtggatgaggccggttcccaactttctgggggtcaacggcaagccgtcgccctcgctagggccctcattaggaaaccatgtgtattgatcctcgatgacgctacctctgcacttgacgcaaactctcagctgcaggtggagcagttgctttacgaaagcccagagcgatattcacggtccgttctcctgatcacccagcacctgagtctggtggagcaagcagaccatattctgttcttggaaggtggcgctatcagagagggagggactcaccagcagctcatggagaaaaagggctgctactgggccatggttcaggctcccgctgacgcacctgaatag

SEQ ID NO: 13207 - DNA, 2427 bp, Artificial Sequence
  derived and/or modified sequence
atggctgaactcctggcatctgcgggttcagcctgtagttgggacttccccagggctcctcccagcttcccaccccctgctgcttcacggggaggtctgggaggaaccaggtcattcaggccgcacagaggggcagagtcaccgagaccgggaagagacagggatggggtgagggtcccaatggcttcctcgagatgtcctgctcccaggggctgtcggtgtttgcccggagcctcactggcctggctggggacggtgctccttctactcgccgattgggtgcttctgcgaacagccttaccaaggatcttcagcctgcttgtccctaccgctctcccccttctccgggtttgggcagtgggcctgtctcgctgggccgtgctctggctgggagcctgtggagttctgcgagctacggttggaagcaagagtgagaacgccggagcccagggttggctggcggctctcaagcccctggctgctgccctgggccttgcactacccggtctggcgttgttccgggaactgatttcttggggcgctccaggctctgcagattcgacacgcctcctccattggggctctcacccaacggcctttgtagttagttatgctgcagcgctccccgcagccgctctgtggcataaattgggcagcctttgggtgcctgggggtcagggcggatcagggaaccccgtgcgccgtcttttggggtgtctcggatccgaaacacggaggctcagtctttttttggtgctggtggtgctctcctcgctgggagaaatggcgattccattcttcactggcaggttgacagattggatcctgcaagacggctccgccgatacgttcactcggaatctgaccctgatgtcgatcctaactatcgcttccgccgtcttagaattcgtcggcgatgggatctataataatacaatgggacatgtccactcccatttacagggggaagtgtttggcgcagtgcttaggcaggagactgagttctttcagcagaatcagacagggaatatcatgagcagagttacagaagacacgagcactctctccgactcgctttccgagaatctttccctgttcctctggtatctcgtgcggggtttgtgcctgctgggaattatgctctgggggagcgtgagtttgactatggtcactttaattaccctcccacttctgttcctcctcccgaagaaggtcggaaaatggtaccagttgcttgaagtccaggtgagggaaagtttggctaaatcatctcaggtcgccatagaagctctctccgccatgcctacagttcgttccttcgcaaatgaagagggtgaggcacagaaattcagagaaaagttgcaggagattaaaactcttaatcaaaaagaagctgtggcctatgccgtcaattcatggactacctctatctcggggatgttgctgaaagtcggcattttatacatcggcggacagctggtgacctccggcgcagtgtccagcggcaaccttgtgacctttgtgctataccagatgcagtttacgcaggctgtcgaggtactcctgtccatctatcctcgggttcagaaagccgtggggagctccgagaagatatttgagtacctggacagaacccctaggtgtcccccttctgggctattgaccccgctccatcttgaaggccttgtgcagttccaagacgtgagctttgcctaccccaaccggcctgatgtcctggtattacaaggcctcacctttacactacggcctggtgaggtgacagcattagtcgggcctaacggaagcggaaagagcacagttgccgctctgctgcaaaacctgtatcagccaactggagggcagctgctgttggatggtaaaccactgccacagtatgagcaccggtatctccatcgccaggtggcggctgtcggacaggaaccccaggtgtttggaaggtcactccaggaaaacatcgcatatggccttacacagaagcctacaatggaggaaattacagctgctgcggtgaagagcggcgctcactccttcatctccggcctgccgcaggggtacgataccgaagtcgatgaagccggttcacagctttctggtggtcagagacaggccgtggctctagctagggcgctcattcgtaaaccgtgcgtgttaattctggacgacgccacatccgcccttgacgcgaactcacagctccaagtggagcagcttctttatgaaagccctgaacggtattcaagatcggtcctccttatcactcaacacctctctttagtggagcaagcggaccacatactgttccttgagggaggagccattcgcgaaggtggcacccatcagcaactcatggagaaaaagggttgctattgggcgatggtgcaggcacctgccgatgcaccagagtag

SEQ ID NO: 13208 - DNA, 2427 bp, Artificial Sequence
  derived and/or modified sequence
atggctgagctcttagcgtccgcgggatccgcctgctcctgggattttcccagagctcccccatcgtttccaccccctgctgcatccagaggaggattgggcggtactagaagcttccgaccacacaggggcgcagagtcgccccgtccgggtagagatagggacggggtccgggtgcctatggcctcctcccgatgccccgcaccccgtggttgtcgctgtttgcctggagcctccctagcgtggctgggcactgtcctgctgctgctcgcggactgggtgctgctgcggacggcacttccgagaatctttagcctgctcgtacccacagctttgccgttgctgcgggtgtgggccgttgggctgagtcggtgggccgtcctttggctgggcgcatgcggagtcttgcgagcgactgtcggctccaaatccgaaaatgcaggggcacagggctggttggctgctctgaagcctctggccgctgcattgggactcgccctgcccggactagcactttttcgcgaactgatatcctggggcgctccgggaagcgcagatagtacgagactactgcactggggttcacacccaacggccttcgttgtttcatatgccgcagccctcccggcagccgcactgtggcacaagctcggcagcctgtgggttccgggtgggcaagggggttccgggaatcccgtacgacggctcctcggttgtctcggctcggagaccaggagactgagcctgttcctggtgttggtggtcctatcatctctgggagaaatggctatcccattcttcacaggcagattgaccgactggatcctgcaggacggatctgccgatactttcactcgtaacctgactctgatgagcattcttaccatagcttccgctgttctggaattcgtcggtgatgggatctataacaatactatgggccacgtgcacagtcacctgcagggggaggtctttggagccgtcctgagacaggaaacagaattcttccagcagaatcaaaccgggaatatcatgagcagagtgacagaagacacatctacactcagcgattcactctccgagaacctaagtctgttcttgtggtacctagtccgtgggctttgtcttctcggaatcatgctgtggggtagcgtgtcccttactatggtcacactcatcacactccctttgctctttcttctacccaaaaaggtgggcaagtggtaccagctgttagaagtgcaggtgcgcgaaagtctggcaaagtcttcccaggttgccattgaagctttgtccgccatgcctaccgtgcggtccttcgccaatgaggagggagaagcccagaaattccgagagaaattacaggaaattaaaacactgaatcaaaaagaggccgtggcatatgcggtgaactcttggaccactagtattagcggcatgttgttgaaagtagggattctatatatcgggggacagctagttacctcaggggcagttagcagcggtaatctggtcacattcgtcctttaccagatgcagtttacacaggccgtggaagttcttctcagtatctaccctcgcgttcaaaaggctgtgggctcttccgagaaaatttttgaatacctggatcgcactcccagatgtcccccatccggactgctcacgcccctccatctggagggcctagtacagttccaggatgtctctttcgcctatcctaatcggcctgacgtactggtcctgcagggactgacttttacactgcgcccaggagaagtgaccgctctagtgggcccaaacggttctgggaaatccaccgtggccgctctgcttcagaatctctatcaaccaactggcggacaactgcttctcgatggcaagcccctcccccagtatgagcacaggtacctgcaccgccaggtggctgcggtggggcaggagccgcaggtcttcggacgaagtctgcaggagaatattgcctatggattgactcagaaacctacgatggaagagatcaccgctgccgcagtgaaaagcggcgcacacagctttatcagtgggctaccccaaggctatgataccgaggtggacgaagccggatctcaattgtccggcggtcagcggcaagctgttgccctcgccagagctctcatccgcaaaccttgcgtacttatcctggacgacgcaacatctgcccttgacgctaatagccagttgcaggtggagcaattgctctatgagtctcccgaaaggtacagcagatcagtgcttctcataactcaacacctgtccttggttgaacaggctgatcatatcctgtttctggaaggtggagccattcgcgagggaggcacacatcagcagttgatggagaagaagggctgctactgggccatggtccaggcacctgctgatgcccctgaatag

SEQ ID NO: 13209 - DNA, 2427 bp, Artificial Sequence
  derived and/or modified sequence
atggccgagctgctggcttcagccggatccgcctgttcctgggattttccaagagcaccaccatcttttccacctcccgcagcatctcgcggaggcctgggcggaactcgcagctttcgaccccataggggggcagagtccccaagacctggcagagacagagatggggtgagagttccaatggcgagttcacggtgcccagccccacgcggatgtcgatgcctgcccggagctagcttggcctggctcggaactgtcctcctgctcctcgcggattgggtgcttctgcggacggctctgcccagaatcttttcgctgctcgtgccaacagccttaccgctattgcgggtgtgggccgtgggtctgagccgctgggctgttctgtggttgggtgcgtgcggggtgctcagagctaccgtcggatcaaaatctgaaaatgctggtgctcaaggctggctcgctgctctgaaaccgctggccgctgccttaggcctcgcactaccgggtctggctctctttagagaactgatcagttggggggctccaggatccgccgacagcacaagattgttacactggggctctcatccaaccgccttcgtcgtgagctacgcagcggcactgcccgctgctgccctgtggcacaaactgggtagtttatgggtccccggtggccagggcggatcgggtaatcccgtccgccgattgctgggatgtctaggttccgaaacaaggaggttgagcctgtttttagtcttagtggtgctcagcagcttgggggagatggctatccccttttttactggtagactgacagattggattctacaagatggttcagctgatactttcaccaggaatcttaccttaatgtcaatcctcactatcgcaagcgctgtactagaatttgtcggggacgggatatataacaataccatggggcatgtgcatagtcacctccaaggagaggtgtttggggcagtgctccgacaggaaacggaattttttcaacaaaatcagactggcaacataatgtcgcgagtgactgaggacacaagtaccctgagcgattccttgagcgaaaatctgtccctgttcctgtggtatctcgtccgcggattatgtctactggggatcatgctgtggggctctgtgtctctgactatggtgacattaatcacacttcccctccttttccttctgcctaaaaaagttgggaagtggtatcaactcctcgaagtgcaggtacgggagtccctcgccaagagttcccaggttgccatagaagccctttccgcaatgcccacggtgcgctcctttgccaatgaggagggcgaagcccagaaattccgagaaaaacttcaggagatcaaaaccctgaatcagaaagaagcagttgcatatgcggtgaatagctggaccacttcaatttcaggcatgctgctgaaagtggggatcctgtacattgggggtcagttggtaacgagcggagctgtaagcagcggtaatcttgtgacatttgtgctgtaccagatgcaattcacccaggccgtagaggtgttactatctatctatcctagggtccagaaggcagtcggcagctctgaaaagatttttgagtatctagatcgcacccctagatgccccccatcaggcctgctcacaccactgcatctcgaaggtctcgtccagtttcaggatgtgagctttgcctaccctaatagacctgatgtcctggtgctgcagggcctcacctttaccttgaggccaggagaagtcacagctctagtcgggccaaatgggagtggaaagtccactgttgcagccctgctgcaaaatctgtaccagcccacaggaggacagctcctgctcgacgggaaaccactgccacagtatgagcatcggtatctgcaccggcaggtggccgcagtggggcaggagccacaggtgttcggcagatcactgcaagagaatatagcttacgggctgacccaaaaaccaaccatggaggaaatcaccgccgctgccgtgaagtctggcgctcactcatttatctctgggcttcctcaaggctatgatacagaagtggacgaggccggatcacagctgtcagggggacagagacaggctgtcgccctggctcgtgccttaataagaaaaccctgcgtgctcatcctcgatgatgcaacctcggcacttgatgcaaactcgcagctccaagtggaacaattgctgtacgaaagcccggaacggtactcacggagtgttctgctgataacccagcatctgtccctcgtcgagcaggccgaccacatcctgttcttggagggaggcgcaatccgagaaggcggaacccatcagcaactcatggaaaaaaaaggctgctactgggctatggttcaggcccctgcggatgccccagagtag

SEQ ID NO: 13210 - DNA, 1644 bp, Artificial Sequence
  derived and/or modified sequence
atggcaattccctttttcacaggacgcctgacagattggatcctgcaggacggaagtgctgacactttcacgagaaaccttacccttatgtccattctaaccatagcttcagccgtgcttgaatttgtaggagatggtatctataacaacacaatggggcacgtccatagccatttacagggcgaggttttcggagctgtcctccgccaagaaactgagttttttcagcagaaccagacaggaaacatcatgagccgagtgaccgaggatacgtccaccctttccgattccctgagtgaaaatctgagtctctttctgtggtacctggtgcggggtttgtgtctgctgggcatcatgttatggggctctgttagcctcaccatggtgacgttgataaccctgcctctcctgtttttattgcctaagaaagtggggaagtggtatcaactgctggaggttcaagtcagagaaagtttggcaaaaagctcccaggtggcaatcgaagctcttagcgctatgccgaccgtgagatccttcgcaaacgaggagggggaagcccagaagttccgcgaaaagctccaggagatcaaaacccttaaccaaaaggaggcagtcgcatatgccgtgaattcttggacaacctcgatctccggcatgctcctaaaggtgggtattctgtatatcggcggacagctggtgacaagcggcgctgtgagctccggaaatttggtgacattcgtgttgtatcagatgcagttcacccaggcagtggaagtcctgcttagcatttaccccagagtccagaaagccgtcggctcatctgagaagattttcgaataccttgacaggaccccaaggtgcccccctagcggactcttgacacccttgcacctggaaggcctcgtgcagtttcaggacgtgtctttcgcttacccgaacaggccagacgtactcgtgctccagggcctcacctttactctgcgtccaggggaagtgacagcgctagtcggaccaaatggaagcggtaaatctacggtagcagcgctgctgcagaacttatatcagccgactggcggacaattattgcttgacggaaagcctttgccccagtatgagcacaggtacctacaccgacaggtagccgctgttggtcaagaaccccaggtttttggtcggagtttgcaagagaacattgcgtatggcttaacacaaaagcctactatggaggagatcaccgccgctgccgtaaaaagcggggcacattcctttatttcaggcttgccccaaggctacgatacagaggtggatgaagccggatcccagctgtcaggcggtcaacggcaggctgtcgctttagccagagcattgataagaaagccttgtgtcctcatcctcgacgacgccactagcgctttggatgctaacagtcaactgcaggtggagcagttactctacgagtcacccgagcggtattctcgcagcgtgctgctgataacacagcatctatccctcgtggagcaggctgaccacattctcttcctagaggggggagccattagggaagggggtacacatcagcagctgatggagaagaagggttgctactgggctatggtacaagctccagccgacgcacctgagtag

SEQ ID NO: 13211 - DNA, 2427 bp, Artificial Sequence
  derived and/or modified sequence
atggccgagcttctggcgagcgccggatctgcatgtagttgggatttccctcgggcacctccatccttccccccacccgctgcttcgcgcggtggcctcgggggaacgaggagtttccgtccccatagaggggctgaaagcccccgacccggtagagatcgggacggcgtacgcgtgcctatggccagcagcaggtgcccagctcctcggggatgccgatgcctgccaggtgcatccctcgcttggctggggaccgtgctactactcctggcggattgggtgctgttgagaactgcccttcccagaattttctctttactggtaccaaccgctttaccactgctgagagtttgggctgtgggcctgtcccgctgggccgtcctgtggttaggcgcatgcggtgtgctgagggcaacagggggaagtaagagcgagaacgcaggcgctcaaggctggctcgcagctctcaagcctctggctgcggctttaggacttgccctgccaggactcgcactgttccgggaacttattagttggggagcgcctggaagtgctgacagcactcggctgctacattgggggtcccacccaaccgcattcgtcgtgtcttatgccgctgctctgcctgcagccgcattatggcacaagctcgggtcactgtgggtgcccggaggacaagggggatcgggaaatcctgtgagacgtcttctgggctgtcttggatccgagaccagacgcctctccctgtttctggtgttagtggtgttgtcttctctgggggaaatggcgatccctttctttaccggcaggctgaccgattggatcctccaagacggaagcgctgatactttcacccggaatctgactttgatgtccatcctgaccatagccagtgcggttcttgagttcgttggggatggaatttacaacaatacaatggggcacgttcatagccacttgcagggcgaggtgtttggcgcagtgctacgccaggagaccgagttttttcagcaaaaccagacagggaacattatgagccgggtaaccgaggatacctcaacactgtccgactcactgagcgaaaacctatccctgtttctatggtatctcgtcagaggactgtgcctcctggggataatgctgtggggctccgtgtcattaactatggtgactctcataaccttgccattgttgttcctcctgcctaagaaggtaggaaaatggtatcaactattggaggtgcaggtcagggaatcactggcaaagtctagtcaggtggctattgaggctctctccgccatgcccaccgttaggagttttgcaaacgaggagggtgaggcccagaaatttcgcgagaagcttcaggaaatcaaaacactcaaccagaaggaagcggttgcttatgcagtcaactcatggaccacatccatcagcggaatgctgctgaaagtagggatcctgtatataggtggccaactggtcaccagtggtgccgtgtcaagcggtaacctagtcacttttgtgctgtatcagatgcaattcactcaagcagttgaagtgctattaagtatctaccctagggtccaaaaggctgttggatcttccgaaaagatctttgaatatctggacaggacacccagatgtcctccttctgggttgcttactcctctgcacttggaaggcctggtccaattccaagatgtgtcattcgcataccccaaccgccctgatgtgctggtgttgcagggcttaactttcaccctccgtcctggagaagtgactgccctggtaggccctaacgggagcggcaaatccactgtcgccgctttgctccagaatctctaccagccaactgggggtcagttactgctggacgggaaaccgcttccacagtacgagcaccgctatttgcataggcaagtggctgcagtcggacaggagccccaggtgtttggccgatccttgcaagaaaacatagcctacggactgacccagaagcctaccatggaggaaatcaccgcagccgcagtgaagagcggagcacactcctttatttcagggctcccccagggttacgataccgaggtcgatgaggccggatctcagttgtcaggcggacagagacaagctgtcgcgctggcccgagcattaatacgcaagccttgcgttttgatactggatgacgccacctccgcattggacgctaactcgcagctgcaggtcgaacagctgctgtacgaatctccagagcgctacagcaggagtgtgctcctgatcacacagcatctgtcactcgttgagcaggcagaccacattctgttccttgaaggcggagccatacgcgaggggggaacacaccaacagttaatggagaagaaaggctgctattgggctatggttcaggcccctgcagatgctccggagtag

SEQ ID NO: 13212 - DNA, 2427 bp, Artificial Sequence
  derived and/or modified sequence
atggcagagctcctggccagcgcaggaagcgcttgtagctgggatttccccagggcacccccaagtttcccacccccagccgctagtagagggggtctaggtggaacacggtcttttcgacctcataggggagctgaaagtccccgacctggcagagaccgcgacggggtccgagtcccaatggcctcctctaggtgcccggcacctcgcggatgcaggtgtctgccaggtgcctcgctggcgtggctcggcaccgtcctactgttgctcgcagattgggtgctgctcagaactgccctgcccaggatcttttcgcttcttgtgcccacggctttgcccctcctcagagtgtgggccgtgggcctgtccagatgggccgtgctgtggctcggggcttgcggcgtgctgagggccaccgtcggcagtaagtcggaaaacgcgggagcgcaaggctggctggcggcactgaaacctttggccgctgctctgggacttgccctgcccggactcgccctgtttagagagctgatcagttggggcgctccaggatctgccgattctacacggcttctgcactggggtagccatccgacagcctttgtggtttcttatgccgcagcacttccagcagccgcattgtggcataagctgggcagcctgtgggtccccggaggtcaggggggatctggaaaccctgtgaggcgcctcttgggatgcctcgggagcgaaacccggcgtctgtccctgttcttagtgctcgtcgtgctgagctccctcggtgagatggccattccattctttaccgggaggctgaccgactggatcctgcaggatgggagtgctgacacattcacaagaaacctgacattgatgtccatcctcactatcgcctccgcagtgctggaattcgtcggggatggtatctataacaacaccatgggacacgttcactcccacctgcagggggaggtgtttggcgctgtgctgaggcaggaaaccgaattttttcaacagaaccagactgggaacataatgagccgcgttacagaagatacctctaccctgtcagacagcctttctgagaacctatccctttttctctggtacctggtcagaggcctgtgcctcctcggtatcatgctgtggggaagcgtatcgctcactatggtaacgcttatcaccctgcctctgttatttctcctgcctaagaaagtgggaaaatggtatcagctcctggaagtgcaggtgagggagagcttggccaaaagttcccaggtggccattgaggcactttccgccatgcctactgtccgctctttcgctaatgaggagggggaggctcagaagttccgtgagaagctgcaggagataaagaccttaaaccagaaggaagccgtcgcttacgccgtcaattcctggactaccagcatttccgggatgctcctcaaggttggcatcctgtacatagggggacagttagtgaccagtggggctgtgagctccggcaatttggttaccttcgtcctctatcagatgcaatttacccaggctgtggaagtactgttatccatataccccagggtccagaaggccgtgggaagttccgagaagattttcgagtatctggaccgcactcccaggtgccccccttccggccttcttacccccttgcatctggagggcctggtgcagttccaagatgtgagttttgcgtaccctaaccgaccagatgtcctggttcttcaagggctgacatttactctccggccaggcgaagtgactgccctggttggccctaacggatctggtaaatcaactgtggccgcacttctccagaacctatatcaacccactggaggccaactccttcttgacggaaagccactaccccaatacgaacaccgctacctgcaccgccaggtggccgctgtgggtcaggagcctcaagtgttcggaagatccctgcaggaaaacattgcatacggcttaactcagaaacccacgatggaagagatcaccgctgctgctgtcaaaagcggagctcattcattcatctccggcctcccccaggggtatgacactgaggtggacgaggcaggatcccaactgtctgggggacaacggcaggctgttgccctcgccagagcccttattagaaagccgtgcgttctcatcttggatgacgccacctcagctttggacgcaaactctcaattgcaggtcgagcagcttttgtacgaaagtcctgaacgctactcccgctccgtcctcctgatcactcaacacctgtcacttgttgagcaagctgatcatattttgttcctagagggaggagcaattcgagagggcggaacccatcagcagctcatggagaaaaagggttgttattgggccatggttcaggctcctgccgacgccccagagtag

SEQ ID NO: 13213 - DNA, 2427 bp, Artificial Sequence
  derived and/or modified sequence
atggctgaactgctggcctcagccggttctgcctgttcttgggacttccccagagccccaccatcgtttccccctcctgccgcatcccgcggaggcttgggtggaacacgaagttttaggccccacaggggtgccgagtccccgaggcccggacgagaccgagatggcgtcagggtgcccatggccagtagtcgctgtccagccccacgcggatgcagatgtttacctggtgcctcgctggcctggctgggtacggtgctgttactactcgcggattgggtgcttcttcgtacagctctgcctcggatcttcagcttgctcgtgccgaccgcgctgccattactacgcgtttgggcagttggcctctctcgctgggctgttctgtggctgggcgcttgtggagtcctccgcgctacagtgggctcaaaaagcgagaacgccggagctcaaggctggcttgccgctctgaagccgctcgctgcggctctcggtctggcgcttccaggcttagctctctttcgggagctgattagctggggcgcacccggaagcgctgattcaacgcgcctgttgcattgggggtcacatcccactgctttcgtggtgtcatacgctgcagcgttgccggcagcagccttgtggcataaactgggatctctgtgggtgccaggtggccaaggcggtagcggaaacccagtgaggcgcctcttgggctgtttggggagcgagacgcgacggttgagcctgtttctcgtactggtggttttgtcttcacttggtgagatggccatccccttctttaccggacggctgaccgattggattttgcaggacggctcggctgatacattcacacgaaacttgaccctgatgtccatcctaaccatcgcaagtgctgtgttggagtttgtgggcgatgggatctacaataatactatgggtcatgtacactcacacctccagggagaggtcttcggagctgtcctgcgtcaagagactgagttcttccaacagaatcaaactggaaatatcatgtccagagtcactgaggacacatctactctgagcgattcgctctctgagaatctgtccctgttcctgtggtatctggtccgcggtttgtgtcttttgggaattatgctctggggatcagtgtccctgactatggttacccttattacactcccgctccttttcttactcccaaagaaggtgggtaagtggtaccaactccttgaggtgcaggtgagggagtcactggccaaatcctcacaggtcgctatcgaagccttgagcgccatgccaactgtacgctccttcgctaatgaagaaggcgaggcccagaagtttagagaaaagctccaggaaattaagactttgaaccagaaggaggccgtggcctatgccgtcaatagctggacaactagcatttctgggatgctgctcaaggtggggattctctacatcggcggacagcttgtgacgtccggggcagtcagcagcggcaaccttgtgacttttgtgctgtaccagatgcagttcacccaggctgtggaagtgctcctctctatctatcctagagtccagaaagctgtcggttcctctgaaaagatcttcgaatatctggaccgtactcccagatgccctccttccgggctcctaaccccactccatctagagggactggtacaattccaggatgtttcctttgcatatcctaaccgacctgacgtcttagtgttgcagggcttaaccttcaccctgcggccaggcgaggttaccgccttagtggggcctaatggaagcggcaagtctacggtagcagcactcctccagaacttgtaccagccaacaggcggtcaattattgctggatgggaagccactgccccaatacgagcatcgctacttacatagacaggtcgccgctgtcggacaggagccccaggtttttgggcgatctcttcaggaaaatattgcgtacgggctcactcaaaagccaaccatggaggagattacagcggctgccgttaagagcggtgcccacagcttcatcagcggactgccccagggatacgacacggaagtggatgaggccggaagtcagctttcgggaggccagcggcaagcagtggctctggctcgggctttgatcagaaagccctgtgtattgatcctggacgatgccacatcagcccttgacgcaaatagccagttgcaagttgagcaattgctctatgagtcaccagagcgttatagtcgctcagtcctgcttataactcagcacctgtcgctggtggagcaggcggaccacattctctttcttgagggcggagcaatccgggagggcggaacccaccagcagctcatggagaagaagggatgttactgggccatggtccaagcccctgctgatgccccagagtag

SEQ ID NO: 13214 - DNA, 1644 bp, Artificial Sequence
  derived and/or modified sequence
atggctatcccctttttcacagggagattaacagactggattctccaggacggctctgcagacacttttacccggaacctcacattaatgagcatcctgactattgctagcgcggttcttgagtttgttggggatgggatctacaacaacactatgggccatgtgcactcgcacctgcagggagaagttttcggggctgtgctgcgtcaggaaacagagttctttcagcagaaccaaacagggaacatcatgtctagagtaactgaagatacatctaccctgtcggacagcctcagcgagaacctaagcttgtttctgtggtacttggtgaggggtctatgcttactggggatcatgctatggggtagcgtcagcctgacaatggtgacgctgatcacgttgcctctgttgttcctgcttccaaagaaggttggaaagtggtaccagctcctggaagtccaggtgagagagagcttggccaaaagctcacaggtcgctatcgaagcgttatctgctatgccgaccgttcgatcattcgctaatgaggaaggcgaagcacagaagtttcgcgaaaaactgcaggagattaagaccctgaaccagaaggaagctgttgcctacgcagttaattcctggaccacatcaatttcaggaatgttactcaaggttgggatcctatacatcggcggacagctcgtgaccagcggagccgtctcctccgggaacctggtgacctttgtgttgtatcagatgcaattcacacaggccgtcgaggtcttgctgtcgatttacccacgggtgcagaaagcagttgggtcttccgagaagatcttcgaatatctggataggacaccacggtgcccaccttctgggttgctgacccctttgcacctggaaggattggtgcaatttcaggacgtgagctttgcatatcccaaccggcctgacgttctcgtactccagggccttacatttactctcagaccaggtgaggtcactgctctcgtcggacctaacggatctggcaaaagcactgtagcagcactcctgcagaatctttaccagcccactggaggccagcttctgctcgacggcaaacctctgccacagtacgagcatcgctacctgcatcgccaagtggctgccgtaggccaagagccccaggtgttcggtaggagccttcaggagaatatcgcttacggcctgacacagaagcccacaatggaggagatcacagcggctgctgtcaagtcaggggctcactccttcatttccgggctgccccagggctatgacacggaggtggatgaagctggcagccagctaagcggagggcagcgccaggccgtcgcactggcccgagccctgattcgaaaaccgtgtgtcctgatattagatgatgcaacatccgctctggacgcaaattcccagctgcaggtggagcagctcctgtacgaatccccggagcgctattcccgtagtgtcctgttgatcactcagcacctgtcgctagtggaacaggctgatcatatcctatttttggagggaggggcaatccgggaaggagggacccaccagcagctcatggagaaaaaaggttgttattgggctatggtgcaggcacctgccgacgcacctgaatag

SEQ ID NO: 13215 - DNA, 1644 bp, Artificial Sequence
  derived and/or modified sequence
atggctatcccttttttcaccggaagactcaccgactggattctacaggacggcagtgcggatacattcaccaggaaccttacccttatgtcaattctgacaatcgcctcggccgtcctggaatttgtgggagacggaatctacaataataccatggggcatgtgcactcccacttacagggggaagtgtttggtgctgtgctgaggcaggagacagaattttttcagcagaaccagaccggaaatatcatgtccagagtcacggaggacacgagcacactgtccgattcattgtcagaaaacctgtccctttttctgtggtacctcgttagaggcctgtgcctgttgggaattatgctgtgggggtccgtgtcacttactatggtcacgcttatcactctccccctgctgttcctactgccgaagaaggtgggcaaatggtatcaactcctcgaagtccaggttcgggagtcactcgctaaaagttcgcaggtggctatcgaggctctgagcgccatgcccaccgttaggtccttcgccaacgaggagggcgaagcacagaagtttagggaaaagctgcaggagatcaaaactctgaatcagaaagaggccgtggcatatgctgtgaattcctggaccacctctattagtggcatgcttctgaaagttggcattctgtatatcggcggacagctggtgacctctggggctgtctcgtcgggcaatctcgtgaccttcgtgctataccagatgcagtttacacaggctgtggaggtgctcctgagcatctatcccagagtacagaaagccgtgggatctagtgaaaagattttcgagtacctggacaggacaccgcgatgccctccctctgggctcctgacccccctgcatctggaggggctcgtacagtttcaggacgtgtcatttgcatacccaaatcggcctgacgtcttggtattgcaaggccttacgtttaccctgcgccctggtgaagtaaccgccttagtaggaccgaatggatccggtaaatcgacagtcgcagccctcctacaaaacctgtatcaaccgactggcggacagttgctcctggatggaaaaccccttccccagtacgagcataggtacttgcaccggcaggtcgcagccgtggggcaggagccccaagtgttcggaagatcgttacaggaaaatattgcttacgggctaacccagaaaccgacgatggaagagatcacagccgcagcagtaaagtcaggagcccattctttcatcagtggcctgccgcagggctatgacaccgaggtggacgaggccggaagccagctttctggcggacagagacaggctgtcgcattggccagagcactgatccggaaaccctgcgttctgatactggacgatgcaacctctgcactagacgccaactctcaactccaggttgagcagctcctgtatgagtcccccgaacgctattcccgttcggttctcttgatcacacagcatttgtccctcgtggaacaagccgaccacattctgtttctggagggaggtgccattcgcgagggaggcacccaccagcaactgatggagaaaaaagggtgttactgggcaatggtgcaggccccagcagacgcaccagaatag

SEQ ID NO: 13216 - DNA, 1644 bp, Artificial Sequence
  derived and/or modified sequence
atggccattcctttcttcactggccgactgacagactggatcctgcaggacggcagcgcagatactttcacgcgcaacctcacattaatgagtatcctgactatagcaagcgccgtgttagaattcgtgggggatggtatctacaataacaccatgggacatgtccacagccacttgcagggcgaagtgttcggcgcagtcctgaggcaggagactgagttcttccagcaaaatcagacaggcaatattatgagtcgagtaacagaggatacgtctactctgagcgattctctctcagaaaaccttagtctctttctctggtatctagtcagaggcttatgcttactgggcatcatgctgtggggttctgtttctttgactatggtgacactgatcactctgcctctgctgttcctcctgcctaaaaaggtggggaaatggtatcagctcctagaggtccaggtgagggaaagtctggctaagtcgagtcaggtggctatagaggcattaagtgcaatgcccaccgtgcggtctttcgcaaacgaggaaggcgaggcccaaaagtttagagagaagctgcaggagataaagacgttgaatcagaaggaagcagtcgcgtacgccgtcaatagctggacaaccagtattagcggaatgctgctgaaagtgggaattctgtatatcgggggacagttagtcacctccggtgccgtgagctctggcaacttggtgacattcgtgctgtatcagatgcaattcacccaggcagtcgaggtcttgctgtccatatatcctagagtgcagaaggccgtgggctcctccgagaagatatttgagtacctggaccggacccccagatgtccgccatctggcctgttgactccccttcatctggagggcctggttcagttccaggacgtctctttcgcgtacccgaaccggcctgacgtgctggtcttacagggcttgacgtttacgctacgacccggtgaagtgacagctctcgtaggcccaaacgggtcaggaaagagcacagtcgctgcattgctgcagaatctttatcaacccaccgggggacagctcttgttagacggcaagccactcccacagtacgagcaccgctacttacacagacaggtcgccgcagttgggcaggagccacaggttttcgggcgttcattgcaagaaaatattgcatatggtttgactcagaaacctaccatggaagaaatcacagccgctgccgtcaaaagcggcgctcattccttcatatctggcctgccccagggatacgacacagaagtcgacgaggccggaagccagctgagcgggggtcagagacaggccgtggcgctcgcccgagcccttatcaggaagccctgcgttctcatcctggatgatgctacatccgctctggatgctaattctcaactccaggtcgaacagctgctctatgagtctcctgagagatattccagatctgtgctgctcataactcagcatctgtctctggtggagcaggccgatcacatactgtttctggagggaggggctataagagaagggggtacccaccagcagctcatggagaagaagggctgttattgggcaatggtgcaggccccagccgacgcacccgaatag

SEQ ID NO: 13217 - DNA, 1644 bp, Artificial Sequence
  derived and/or modified sequence
atggcaatcccattcttcaccggcaggctgaccgactggattctgcaggatggttctgccgacaccttcactcgcaaccttacactgatgagcattttaaccatcgcctccgctgtgctggagttcgtgggcgatggtatctataataacacaatggggcacgtccattcacatcttcaaggggaggtgttcggcgctgtgctacggcaggagacagagttctttcagcagaatcagaccggcaacatcatgagcagggtcaccgaagatactagcaccctgagcgacagcctaagtgagaatctgagtctttttctgtggtatctcgtcagaggcctgtgcctgcttggaatcatgctttggggcagtgtgtccctcaccatggtgactctgatcacactccccctcctcttcctgctccccaaaaaagttggcaagtggtatcaactattggaggtccaggtccgggaatcgctggctaagagcagccaagttgccatagaggcacttagtgcaatgcctactgtgcgctcgtttgccaatgaggagggggaggcccaaaaattcagggaaaaattgcaggagattaagaccctgaatcagaaagaggcagtggcctacgcagtcaattcttggacaaccagtatctccggcatgctgcttaaagtaggcatactgtatatcggagggcagctcgtgacttcaggtgccgtatctagcggtaacctagtgacatttgtgctgtatcaaatgcaatttacacaggctgtggaggtgttgctatccatatacccacgggtccagaaagcagtcgggtccagtgaaaaaatcttcgagtaccttgacaggacaccccgttgccctccaagtggcctgctgacccccttgcacctcgaaggacttgtacagtttcaggacgtgagctttgcctatcctaacagaccagatgtcctggtgctgcaaggactcacattcaccctgcgacctggagaagttactgccctggtgggcccaaacggtagtgggaaatctaccgttgctgctctcttgcagaatctatatcagccgactggtggccagcttctccttgatggcaagcccctgccgcagtacgaacatcgctacctgcaccggcaggtggccgctgtgggtcaggagccccaggtgtttggccgatcgctgcaagagaacatagcttatggtctcacccagaaacctacgatggaagaaattactgccgctgctgtgaagagcggggcacactcattcatctctggattaccccaggggtatgatacggaggtagacgaagctggttctcaactctcggggggacagagacaggcagtggcactggcaagggccttgatcagaaagccgtgtgtgctcatcctcgatgacgcgacctccgcccttgacgccaactctcagcttcaagtggaacagctcttgtatgaatcccccgaaaggtacagcagaagcgtactgttgattacccagcacctgagtcttgtcgagcaggcggatcacatcttgttcttggaagggggagctatccgcgaaggcggaacccatcaacagctgatggagaagaaaggctgttactgggcaatggtgcaggccccagcagatgccccagaatag

SEQ ID NO: 13218 - DNA, 1644 bp, Artificial Sequence
  derived and/or modified sequence
atggccattccattttttacagggagactcactgactggatactacaggacggctccgccgacaccttcacgcggaatcttacattaatgtcaattctgactatcgcatccgccgtattggaattcgttggagacgggatttacaataatacaatgggacacgtacatagccacctgcagggcgaggtcttcggtgccgttctgcgacaggagacagagttctttcagcagaatcagacaggaaatatcatgtctagggtgacagaggacacttctacgctgagtgacagcctctctgagaatctcagtctgttcctgtggtaccttgtgagaggtctgtgcttacttggcatcatgctgtggggatccgtgtctctgacaatggtgaccctcatcacactgcctctactttttcttctcccaaaaaaggttggcaagtggtatcagctcctcgaagtccaagtgagagagagtctggctaagtcctcccaggtcgcgatagaggcattgagcgcaatgcccacggttagatccttcgcgaacgaggaaggcgaggcccagaagttccgggagaagctgcaagagataaaaacactgaaccagaaagaagctgtggcctatgcagtgaactcttggacaacttcaatatccgggatgctgctgaaagtggggatcctctacataggagggcagctcgtaacatccggggcagtgagctcaggaaatcttgtcacttttgtcttgtaccagatgcagtttactcaggcagtggaggtgctgctgtctatctaccctcgcgtccagaaggccgttggctcctctgaaaagatttttgaatatcttgaccgcacacccagatgcccaccatcaggcttgcttactcctctgcatctcgaaggcctggtgcaatttcaagacgtgtcgtttgcataccccaaccggcctgatgtgttggtcctccaagggctcactttcaccctgcggcctggggaggtcacagccctggtgggcccaaacggaagtggaaagtctacagtcgcggcactgctccagaatttgtaccaacctacgggaggacagctgctgcttgacgggaaacctctgccccagtacgaacacaggtatctgcaccgacaagtcgccgctgtcgggcaggagccacaagtgtttggacgatctttgcaggagaatatcgcttatgggctcacacaaaaacccaccatggaggagataactgccgcagctgtgaagagtggagcgcattccttcatcagcgggctaccgcagggctacgatacggaagtggatgaagcagggagtcagttgtccggcggtcagagacaggccgtggccttagctcgtgctctcatccgaaaaccatgtgtcttaattttggacgatgctacgtctgctctcgacgccaacagccaattgcaagtcgagcaactgttatacgagagcccggagcgatattccagatccgtccttctgattacccagcatctgtcactagttgagcaggcagatcatatactgttcttggaaggcggagccataagagaagggggtactcaccagcagctaatggagaagaaaggctgctactgggccatggtgcaggccccagccgatgccccagaatag

SEQ ID NO: 13219 - DNA, 1644 bp, Artificial Sequence
  derived and/or modified sequence
atggccatccctttctttactggcaggttgactgactggatcctccaggatggctctgctgataccttcacacgaaacttgacccttatgagtatcttgaccattgcgtcagcagtgttggaatttgttggagacggaatctacaataacactatgggccacgtccatagccacttacagggagaagtgttcggggctgtcctgaggcaagaaacagaattctttcagcaaaaccaaactggcaacatcatgtctagagttaccgaagatacatctacactgtccgatagcctgtctgaaaacctgtccttgtttctgtggtacctggtgcgcggtttatgcctgctcggaattatgttgtggggatccgtatctctgactatggtgacactgattacgttgccactcctgtttctgctacctaagaaagtcggaaaatggtaccaattgctcgaggtacaggtgcgggagtccctcgctaaaagcagtcaagtggctatagaggcgttgtctgctatgccaacagtacgttcatttgccaacgaagaaggggaggcacaaaagttcagagaaaagcttcaggagattaaaactctgaaccagaaagaggccgtggcatatgcagtcaattcatggaccaccagcatatccgggatgctgctcaaggttggcatcctgtatatcggtggtcaactggtgacctctggcgcagtatcttccggcaacttagtgacctttgtattgtatcaaatgcagtttacgcaggcagttgaggtcttgttgagcatttatccgagagtgcagaaggcagtaggctccagtgaaaaaattttcgagtatttggatcggaccccccgatgccctccatcagggttattgacccctctgcatctggaaggcctcgtgcagtttcaagatgtttctttcgcctatccaaaccgcccagacgtgcttgtattacaagggcttacctttacattgaggccaggggaggtgacagcgctggttggccctaatggtagcggcaagtccaccgtggctgcactgctgcaaaatctgtaccagcctacggggggtcagctgctcctggatggcaaaccgttgccccagtatgaacaccggtatttgcatcgacaggtcgctgcggtgggccaggagccacaggtctttggccgatcattacaagaaaacattgcctatgggctgacccaaaaacctacaatggaagaaatcaccgctgctgccgtgaagagtggagcccactcgttcatctcaggactgcctcagggatatgatacagaggtggacgaagcaggatcacaactgagcggtggccaaaggcaggccgtggccctcgcccgagcgctcattagaaaaccctgtgtcctgatcttggacgatgccacttcagccttagatgctaacagccagctgcaagtggaacagctgctgtacgagtcgccagagcgctacagccgatccgtgctgctgattacccagcatctgtcccttgtggaacaggctgatcatatactgttccttgagggcggagctatacgggagggtgggacacatcagcagttaatggaaaagaagggttgctattgggctatggttcaggctcccgcagacgccccagaatag

SEQ ID NO: 13220 - DNA, 1644 bp, Artificial Sequence
  derived and/or modified sequence
atggctatcccatttttcacgggtcggctcacagactggattcttcaggatggctctgctgacactttcactcgcaacctgacactgatgtcaattctcactatcgcttccgcagttcttgaattcgttggagatggaatttacaataacacgatgggccatgttcacagtcaccttcaaggcgaggtctttggtgccgtcctgcgtcaggaaacggagttctttcaacagaatcagaccggcaatattatgtctagggtgacggaggatacctccacattaagcgacagcctgagcgagaatctgagtttattcttgtggtacttagtgcgcggactctgcctactcgggatcatgctgtggggatctgtttctctgacaatggtaaccctaattactctccctcttctgttcctgctgcctaagaaggtgggcaaatggtatcagttgctggaggtgcaggtgcgcgagagcctagcaaagagttcccaggtcgccatcgaggccctcagcgccatgccaactgtcagatctttcgcaaatgaggagggagaagcacagaaattcagggaaaaacttcaggagatcaaaacactgaaccaaaaggaggctgtggcctacgctgttaatagctggacgacttcaatcagcgggatgttgctaaaagtcgggatcctctatatcggaggacagctcgtgacgtctggagccgtgtcatcaggcaatcttgtgaccttcgtgctctatcaaatgcagttcacacaggccgtggaggtgcttctttctatttacccccgagtacagaaagcagttggatcttctgagaaaatctttgagtaccttgatcggactccacgctgtcctccatcgggccttctcacacccttacaccttgaaggtttagtccaattccaggatgtaagttttgcctaccccaataggccagatgtcctcgttttgcaagggctgacttttaccctgaggccaggtgaagtgactgccttggtcggacctaacggttccggcaaatccacagttgccgcattgctgcaaaatctctatcagcctaccggcggacagctcctactggatggtaaacctctgccccaatacgagcataggtacctgcaccgacaggtggctgccgtgggccaggagcctcaggtttttggccgaagtcttcaggaaaacatcgcatatgggctgacacagaaacccacaatggaggagatcactgcagctgcagtgaagtccggagcccactcttttatcagcggactgcctcagggatatgacactgaagttgacgaggcaggcagccaactctcagggggtcaaagacaggccgtcgccctggcaagagctctgattcgcaagccttgcgtgctcatcctggatgacgccacctccgcacttgacgctaactcccagctgcaagtcgagcaattactctacgaatcccccgagagatattcacggtccgtactcctcatcacacagcacctcagcttagtggagcaggctgatcacatcctgttccttgagggcggagctattagagaaggaggtacccaccagcagcttatggaaaaaaaaggatgctactgggcaatggtgcaggctcccgctgatgccccagaatag

SEQ ID NO: 13221 - DNA, 2959 bp, Artificial Sequence
  derived and/or modified sequence
gagaagggtgtgcgtgatggagaaaattgggcaccagggctgctcccgagattctcagatctgatttccacgcttgctaccaaaatagtctgggcaggccacttttggaagtaggcgttatctagtgagcaggcggccgctttcgatttcgctttcccctaaatggctgagcttctcgccagcgcaggatcagcctgttcctgggactttccgagagccccgccctcgttccctcccccagccgccagtaggggaggactcggcggtacccggagcttcaggccccaccggggcgcggagagtcccaggcccggccgggaccgggacggcgtccgagtgccaatggctagctctaggtgtcccgctccccgcgggtgccgctgcctccccggagcttctctcgcatggctggggacagtactgctacttctcgccgactgggtgctgctccggaccgcgctgccccgcatattctccctgctggtgcccaccgcgctgccactgctccgggtctgggcggtgggcctgagccgctgggccgtgctctggctgggggcctgcggggtcctcagggcaacggttggctccaagagcgaaaacgcaggtgcccagggctggctggctgctttgaagccattagctgcggcactgggcttggccctgccgggacttgccttgttccgagagctgatctcatggggagcccccgggtccgcggatagcaccaggctactgcactggggaagtcaccctaccgccttcgttgtcagttatgcagcggcactgcccgcagcagccctgtggcacaaactcgggagcctctgggtgcccggcggtcagggcggctctggaaaccctgtgcgtcggcttctaggctgcctgggctcggagacgcgccgcctctcgctgttcctggtcctggtggtcctctcctctcttggggagatggccattccattctttacgggccgcctcactgactggattctacaagatggctcagccgataccttcactcgaaacttaactctcatgtccattctcaccatagccagtgcagtgctggagttcgtgggtgacgggatctataacaacaccatgggccacgtgcacagccacttgcagggagaggtgtttggggctgtcctgcgccaggagacggagtttttccaacagaaccagacaggtaacatcatgtctcgggtaacagaggacacgtccaccctgagtgattctctgagtgagaatctgagcttatttctgtggtacctggtgcgaggcctatgtctcttggggatcatgctctggggatcagtgtccctcaccatggtcaccctgatcaccctgcctctgcttttccttctgcccaagaaggtgggaaaatggtaccagttgctggaagtgcaggtgcgggaatctctggcaaagtccagccaggtggccattgaggctctgtcggccatgcctacagttcgaagctttgccaacgaggagggcgaagcccagaagtttagggaaaagctgcaagaaataaagacactcaaccagaaggaggctgtggcctatgcagtcaactcctggaccactagtatttcaggtatgctgctgaaagtgggaatcctctacattggtgggcagctggtgaccagtggggctgtaagcagtgggaaccttgtcacatttgttctctaccagatgcagttcacccaggctgtggaggtactgctctccatctaccccagagtacagaaggctgtgggctcctcagagaaaatatttgagtacctggaccgcacccctcgctgcccacccagtggtctgttgactcccttacacttggagggccttgtccagttccaagatgtctcctttgcctacccaaaccgcccagatgtcttagtgctacaggggctgacattcaccctacgccctggcgaggtgacggcgctggtgggacccaatgggtctgggaagagcacagtggctgccctgctgcagaatctgtaccagcccaccgggggacagctgctgttggatgggaagccccttccccaatatgagcaccgctacctgcacaggcaggtggctgcagtgggacaagagccacaggtatttggaagaagtcttcaagaaaatattgcctatggcctgacccagaagccaactatggaggaaatcacagctgctgcagtaaagtctggggcccatagtttcatctctggactccctcagggctatgacacagaggtagacgaggctgggagccagctgtcagggggtcagcgacaggcagtggcgttggcccgagcattgatccggaaaccgtgtgtacttatcctggatgatgccaccagtgccctggatgcaaacagccagttacaggtggagcagctcctgtacgaaagccctgagcggtactcccgctcagtgcttctcatcacccagcacctcagcctggtggagcaggctgaccacatcctctttctggaaggaggcgctatccgggaggggggaacccaccagcagctcatggagaaaaaggggtgctactgggccatggtgcaggctcctgcagatgctccagaatgaaagccttctcagacctgcgcactccatctccctcccttttcttctctctgtggtggagaaccacagctgcagagtaggcagctgcctccaggatgagttacttgaaatttgccttgagtgtgttacctcctttccaagctcctcgtgataatgcagacttcctggagtacaaacacaggatttgtaattccttactgtaacggagtttagagccagggctgatgctttggtgtggccagcactctgaaactgagaaatgttcagaatgtacggaaagatgatcagctattttcaacataactgaaggcatatgctggcccataaacaccctgtaggttcttgatatttataataaaattggtgttttgta

SEQ ID NO: 13222 - DNA, 2182 bp, Artificial Sequence
  derived and/or modified sequence
atctctaacaggaggcttttctacttcatgatctccagccttcctaataaaatcctgaaagttctggtagagcaaccacagggtagtgagttccagggcagcctatttaggttcgggattgagacgtcagtgtttcctttctgctgatgccctccaggataatggggagatggccattccattctttacgggccgcctcactgactggattctacaagatggctcagccgataccttcactcgaaacttaactctcatgtccattctcaccatagccagtgcagtgctggagttcgtgggtgacgggatctataacaacaccatgggccacgtgcacagccacttgcagggagaggtgtttggggctgtcctgcgccaggagacggagtttttccaacagaaccagacaggtaacatcatgtctcgggtaacagaggacacgtccaccctgagtgattctctgagtgagaatctgagcttatttctgtggtacctggtgcgaggcctatgtctcttggggatcatgctctggggatcagtgtccctcaccatggtcaccctgatcaccctgcctctgcttttccttctgcccaagaaggtgggaaaatggtaccagttgctggaagtgcaggtgcgggaatctctggcaaagtccagccaggtggccattgaggctctgtcggccatgcctacagttcgaagctttgccaacgaggagggcgaagcccagaagtttagggaaaagctgcaagaaataaagacactcaaccagaaggaggctgtggcctatgcagtcaactcctggaccactagtatttcaggtatgctgctgaaagtgggaatcctctacattggtgggcagctggtgaccagtggggctgtaagcagtgggaaccttgtcacatttgttctctaccagatgcagttcacccaggctgtggaggtactgctctccatctaccccagagtacagaaggctgtgggctcctcagagaaaatatttgagtacctggaccgcacccctcgctgcccacccagtggtctgttgactcccttacacttggagggccttgtccagttccaagatgtctcctttgcctacccaaaccgcccagatgtcttagtgctacaggggctgacattcaccctacgccctggcgaggtgacggcgctggtgggacccaatgggtctgggaagagcacagtggctgccctgctgcagaatctgtaccagcccaccgggggacagctgctgttggatgggaagccccttccccaatatgagcaccgctacctgcacaggcaggtggctgcagtgggacaagagccacaggtatttggaagaagtcttcaagaaaatattgcctatggcctgacccagaagccaactatggaggaaatcacagctgctgcagtaaagtctggggcccatagtttcatctctggactccctcagggctatgacacagaggtagacgaggctgggagccagctgtcagggggtcagcgacaggcagtggcgttggcccgagcattgatccggaaaccgtgtgtacttatcctggatgatgccaccagtgccctggatgcaaacagccagttacaggtggagcagctcctgtacgaaagccctgagcggtactcccgctcagtgcttctcatcacccagcacctcagcctggtggagcaggctgaccacatcctctttctggaaggaggcgctatccgggaggggggaacccaccagcagctcatggagaaaaaggggtgctactgggccatggtgcaggctcctgcagatgctccagaatgaaagccttctcagacctgcgcactccatctccctcccttttcttctctctgtggtggagaaccacagctgcagagtaggcagctgcctccaggatgagttacttgaaatttgccttgagtgtgttacctcctttccaagctcctcgtgataatgcagacttcctggagtacaaacacaggatttgtaattccttactgtaacggagtttagagccagggctgatgctttggtgtggccagcactctgaaactgagaaatgttcagaatgtacggaaagatgatcagctattttcaacataactgaaggcatatgctggcccataaacaccctgtaggttcttgatatttataataaaattggtgttttgt

SEQ ID NO: 13223 - DNA, 2959 bp, Artificial Sequence
  derived and/or modified sequence
gagaagggtgtgcgtgatggagaaaattgggcaccagggctgctcccgagattctcagatctgatttccacgcttgctaccaaaatagtctgggcaggccacttttggaagtaggcgttatctagtgagcaggcggccgctttcgatttcgctttcccctaaatggctgagcttctcgccagcgcaggatcagcctgttcctgggactttccgagagccccgccctcgttccctcccccagccgccagtaggggaggactcggcggtacccggagcttcaggccccaccggggcgcggagagtcccaggcccggccgggaccgggacggcgtccgagtgccaatggctagctctaggtgtcccgctccccgcgggtgccgctgcctccccggagcttctctcgcatggctggggacagtactgctacttctcgccgactgggtgctgctccggaccgcgctgccccgcatattctccctgctggtgcccaccgcgctgccactgctccgggtctgggcggtgggcctgagccgctgggccgtgctctggctgggggcctgcggggtcctcagggcaacgggtggctccaagagcgaaaacgcaggtgcccagggctggctggctgctttgaagccattagctgcggcactgggcttggccctgccgggacttgccttgttccgagagctgatctcatggggagcccccgggtccgcggatagcaccaggctactgcactggggaagtcaccctaccgccttcgttgtcagttatgcagcggcactgcccgcagcagccctgtggcacaaactcgggagcctctgggtgcccggcggtcagggcggctctggaaaccctgtgcgtcggcttctaggctgcctgggctcggagacgcgccgcctctcgctgttcctggtcctggtggtcctctcctctcttggggagatggccattccattctttacgggccgcctcactgactggattctacaagatggctcagccgataccttcactcgaaacttaactctcatgtccattctcaccatagccagtgcagtgctggagttcgtgggtgacgggatctataacaacaccatgggccacgtgcacagccacttgcagggagaggtgtttggggctgtcctgcgccaggagacggagtttttccaacagaaccagacaggtaacatcatgtctcgggtaacagaggacacgtccaccctgagtgattctctgagtgagaatctgagcttatttctgtggtacctggtgcgaggcctatgtctcttggggatcatgctctggggatcagtgtccctcaccatggtcaccctgatcaccctgcctctgcttttccttctgcccaagaaggtgggaaaatggtaccagttgctggaagtgcaggtgcgggaatctctggcaaagtccagccaggtggccattgaggctctgtcggccatgcctacagttcgaagctttgccaacgaggagggcgaagcccagaagtttagggaaaagctgcaagaaataaagacactcaaccagaaggaggctgtggcctatgcagtcaactcctggaccactagtatttcaggtatgctgctgaaagtgggaatcctctacattggtgggcagctggtgaccagtggggctgtaagcagtgggaaccttgtcacatttgttctctaccagatgcagttcacccaggctgtggaggtactgctctccatctaccccagagtacagaaggctgtgggctcctcagagaaaatatttgagtacctggaccgcacccctcgctgcccacccagtggtctgttgactcccttacacttggagggccttgtccagttccaagatgtctcctttgcctacccaaaccgcccagatgtcttagtgctacaggggctgacattcaccctacgccctggcgaggtgacggcgctggtgggacccaatgggtctgggaagagcacagtggctgccctgctgcagaatctgtaccagcccaccgggggacagctgctgttggatgggaagccccttccccaatatgagcaccgctacctgcacaggcaggtggctgcagtgggacaagagccacaggtatttggaagaagtcttcaagaaaatattgcctatggcctgacccagaagccaactatggaggaaatcacagctgctgcagtaaagtctggggcccatagtttcatctctggactccctcagggctatgacacagaggtagacgaggctgggagccagctgtcagggggtcagcgacaggcagtggcgttggcccgagcattgatccggaaaccgtgtgtacttatcctggatgatgccaccagtgccctggatgcaaacagccagttacaggtggagcagctcctgtacgaaagccctgagcggtactcccgctcagtgcttctcatcacccagcacctcagcctggtggagcaggctgaccacatcctctttctggaaggaggcgctatccgggaggggggaacccaccagcagctcatggagaaaaaggggtgctactgggccatggtgcaggctcctgcagatgctccagaatgaaagccttctcagacctgcgcactccatctccctcccttttcttctctctgtggtggagaaccacagctgcagagtaggcagctgcctccaggatgagttacttgaaatttgccttgagtgtgttacctcctttccaagctcctcgtgataatgcagacttcctggagtacaaacacaggatttgtaattccttactgtaacggagtttagagccagggctgatgctttggtgtggccagcactctgaaactgagaaatgttcagaatgtacggaaagatgatcagctattttcaacataactgaaggcatatgctggcccataaacaccctgtaggttcttgatatttataataaaattggtgttttgta

SEQ ID NO: 13224 - DNA, 2959 bp, Artificial Sequence
  derived and/or modified sequence
gagaagggtgtgcgtgatggagaaaattgggcaccagggctgctcccgagattctcagatctgatttccacgcttgctaccaaaatagtctgggcaggccacttttggaagtaggcgttatctagtgagcaggcggccgctttcgatttcgctttcccctaaatggctgagcttctcgccagcgcaggatcagcctgttcctgggactttccgagagccccgccctcgttccctcccccagccgccagtaggggaggactcggcggtacccggagcttcaggccccaccggggcgcggagagtcccagacccggccgggaccgggacggcgtccgagtgccaatggctagctctaggtgtcccgctccccgcgggtgccgctgcctccccggagcttctctcgcatggctggggacagtactgctacttctcgccgactgggtgctgctccggaccgcgctgccccgcatattctccctgctggtgcccaccgcgctgccactgctccgggtctgggcggtgggcctgagccgctgggccgtgctctggctgggggcctgcggggtcctcagggcaacggttggctccaagagcgaaaacgcaggtgcccagggctggctggctgctttgaagccattagctgcggcactgggcttggccctgccgggacttgccttgttccgagagctgatctcatggggagcccccgggtccgcggatagcaccaggctactgcactggggaagtcaccctaccgccttcgttgtcagttatgcagcggcactgcccgcagcagccctgtggcacaaactcgggagcctctgggtgcccggcggtcagggcggctctggaaaccctgtgcgtcggcttctaggctgcctgggctcggagacgcgccgcctctcgctgttcctggtcctggtggtcctctcctctcttggggagatggccattccattctttacgggccgcctcactgactggattctacaagatggctcagccgataccttcactcgaaacttaactctcatgtccattctcaccatagccagtgcagtgctggagttcgtgggtgacgggatctataacaacaccatgggccacgtgcacagccacttgcagggagaggtgtttggggctgtcctgcgccaggagacggagtttttccaacagaaccagacaggtaacatcatgtctcgggtaacagaggacacgtccaccctgagtgattctctgagtgagaatctgagcttatttctgtggtacctggtgcgaggcctatgtctcttggggatcatgctctggggatcagtgtccctcaccatggtcaccctgatcaccctgcctctgcttttccttctgcccaagaaggtgggaaaatggtaccagttgctggaagtgcaggtgcgggaatctctggcaaagtccagccaggtggccattgaggctctgtcggccatgcctacagttcgaagctttgccaacgaggagggcgaagcccagaagtttagggaaaagctgcaagaaataaagacactcaaccagaaggaggctgtggcctatgcagtcaactcctggaccactagtatttcaggtatgctgctgaaagtgggaatcctctacattggtgggcagctggtgaccagtggggctgtaagcagtgggaaccttgtcacatttgttctctaccagatgcagttcacccaggctgtggaggtactgctctccatctaccccagagtacagaaggctgtgggctcctcagagaaaatatttgagtacctggaccgcacccctcgctgcccacccagtggtctgttgactcccttacacttggagggccttgtccagttccaagatgtctcctttgcctacccaaaccgcccagatgtcttagtgctacaggggctgacattcaccctacgccctggcgaggtgacggcgctggtgggacccaatgggtctgggaagagcacagtggctgccctgctgcagaatctgtaccagcccaccgggggacagctgctgttggatgggaagccccttccccaatatgagcaccgctacctgcacaggcaggtggctgcagtgggacaagagccacaggtatttggaagaagtcttcaagaaaatattgcctatggcctgacccagaagccaactatggaggaaatcacagctgctgcagtaaagtctggggcccatagtttcatctctggactccctcagggctatgacacagaggtagacgaggctgggagccagctgtcagggggtcagcgacaggcagtggcgttggcccgagcattgatccggaaaccgtgtgtacttatcctggatgatgccaccagtgccctggatgcaaacagccagttacaggtggagcagctcctgtacgaaagccctgagcggtactcccgctcagtgcttctcatcacccagcacctcagcctggtggagcaggctgaccacatcctctttctggaaggaggcgctatccgggaggggggaacccaccagcagctcatggagaaaaaggggtgctactgggccatggtgcaggctcctgcagatgctccagaatgaaagccttctcagacctgcgcactccatctccctcccttttcttctctctgtggtggagaaccacagctgcagagtaggcagctgcctccaggatgagttacttgaaatttgccttgagtgtgttacctcctttccaagctcctcgtgataatgcagacttcctggagtacaaacacaggatttgtaattccttactgtaacggagtttagagccagggctgatgctttggtgtggccagcactctgaaactgagaaatgttcagaatgtacggaaagatgatcagctattttcaacataactgaaggcatatgctggcccataaacaccctgtaggttcttgatatttataataaaattggtgttttgta

SEQ ID NO: 13225 - protein, 171 aa, Artificial Sequence
  derived and/or modified sequence
FPRDLSLISPLAQAVRSSSRTPSDKPVAHVVANPQAEGQLQWLNRRANALLANGVELRDNQLVVPSEGLYLIYSQVLFKGQGCPSTHVLLTHTISRIAVSYQTKVNLLSAIKSPCQRETPEGAEAKPWYEPIYLGGVFQLEKGDRLSAEINRPDYLDFAESGQVYFGIIAL

SEQ ID NO: 13226 - protein, 233 aa, Artificial Sequence
  derived and/or modified sequence
MSTESMIRDVELAEEALPKKTGGPQGSRRCLFLSLFSFLIVAGATTLFCLLHFGVIGPQREEFPRDLSLISPLAQAVRSSSRTPSDKPVAHVVANPQAEGQLQWLNRRANALLANGVELRDNQLVVPSEGLYLIYSQVLFKGQGCPSTHVLLTHTISRIAVSYQTKVNLLSAIKSPCQRETPEGAEAKPWYEPIYLGGVFQLEKGDRLSAEINRPDYLDFAESGQVYFGIIAL

SEQ ID NO: 13227 - DNA, 516 bp, Artificial Sequence
  derived and/or modified sequence
ttccccagagacctgagcctgatcagccccctggcccaggccgtgagaagcagcagcagaacccccagcgacaagcccgtggcccacgtggtggccaacccccaggccgagggccagctgcagtggctgaacagaagagccaacgccctgctggccaacggcgtggagctgagagacaaccagctggtggtgcccagcgagggcctgtacctgatctacagccaggtgctgttcaagggccagggctgccccagcacccacgtgctgctgacccacaccatcagcagaatcgccgtgagctaccagaccaaggtgaacctgctgagcgccatcaagagcccctgccagagagagacccccgagggcgccgaggccaagccctggtacgagcccatctacctgggcggcgtgttccagctggagaagggcgacagactgagcgccgagatcaacagacccgactacctggacttcgccgagagcggccaggtgtacttcggcatcatcgccctgtag

SEQ ID NO: 13228 - DNA, 516 bp, Artificial Sequence
  derived and/or modified sequence
ttccctagagacttgtcgctgataagtcctcttgcacaagctgttcggagttcatccaggactccctctgataagcctgtagctcatgttgtggcaaatccacaggccgagggccagctgcaatggctgaacaggagagcgaatgcgttgttggccaatggagtggagcttcgcgacaaccaactggtcgtgccttctgagggcctgtacctgatctattcacaggtgctcttcaagggccaaggatgtccttccactcatgtccttctgacccacaccatatctaggattgcggtgagctaccagaccaaggtgaatttattgtctgccattaagtctccttgccagagagagacacctgaaggtgccgaggcgaaaccctggtacgaacctatatacttgggaggtgtattccagcttgagaagggcgaccgcttgtccgccgaaatcaacaggcctgattacctggactttgctgaatccggtcaggtttacttcgggattatagccctctag

SEQ ID NO: 13229 - DNA, 516 bp, Artificial Sequence
  derived and/or modified sequence
ttcccccgggacctgagcctcatcagccccctggcccaggccgtgcgcagcagcagcaggacccccagcgacaagcctgtggcccacgtggtggccaacccccaggccgagggccagctgcagtggctgaacagaagagccaatgccctgctggccaatggagtggagctgcgggacaaccagctggtggtgcccagcgagggcctgtacctgatctacagccaggtgctcttcaagggccagggctgccccagcacccacgtgctgctgacccacaccatcagcagaattgctgtgtcctaccagaccaaggtgaacctgctgagcgccatcaagagcccctgccagcgggagaccccagagggcgctgaggccaagccctggtatgagcccatctacctgggcggcgtcttccagctggagaagggggaccggctgtctgctgagatcaacagaccagactacctggactttgctgagagcggccaggtgtacttcggcatcatcgccctgtag

SEQ ID NO: 13230 - DNA, 516 bp, Artificial Sequence
  derived and/or modified sequence
ttcccccgggacctgagcctgatcagccccctggcccaggccgtgagaagctcctcccgcacgcccagcgacaagccagtggcacatgtggttgcaaacccacaggctgagggtcagctccagtggttgaatcgcagggctaacgctttattggcgaatggcgtcgagctgagagacaaccaacttgttgtcccttcagaagggttgtaccttatttatagccaggttctgttcaaaggacagggatgcccaagtacgcacgtgttactcactcacaccatctcgaggatcgccgtaagttatcagactaaagtaaaccttctgtctgctatcaaaagtccatgccagagagagacaccggagggagcggaagctaaaccatggtacgaaccaatttacctggggggcgtttttcaactggagaaaggagatcggctaagtgccgagatcaatcggcctgattatctggacttcgcagaaagcgggcaggtgtatttcgggatcatcgcactctag

SEQ ID NO: 13231 - DNA, 516 bp, Artificial Sequence
  derived and/or modified sequence
ttcccaagggatctcagccttatcagtcccttggcccaggccgtcaggtcctctagtcgcacaccctcagataaaccagttgcccatgtggtggccaatccccaggccgaggggcaactgcagtggctcaataggcgggcaaatgccctgctcgctaacggggttgaattgcgggataatcaactcgttgtgcctagcgaaggtctctacctgatatactctcaagtgctgtttaaaggtcaagggtgtccatctacacacgtgctcctcacccacactatttctcgaatcgccgtgagctatcaaactaaggtcaaccttctgagtgccattaaaagtccatgtcagcgggaaacccccgaaggtgcagaggcgaaaccgtggtatgagccaatttacctgggcggtgtgtttcagttggagaaaggagaccgactatccgccgagataaacaggcccgattacctagactttgccgaatctggccaggtgtacttcggtattatcgccctgtag

SEQ ID NO: 13232 - DNA, 1315 bp, Artificial Sequence
  derived and/or modified sequence
ttccccagggacctctctctaatcagccctctggcccaggcagtcagatcatcttctcgaaccccgagtgacaagcctgtagcccatgttgtagcaaaccctcaagctgaggggcagctccagtggctgaaccgccgggccaatgccctcctggccaatggcgtggagctgagagataaccagctggtggtgccatcagagggcctgtacctcatctactcccaggtcctcttcaagggccaaggctgcccctccacccatgtgctcctcacccacaccatcagccgcatcgccgtctcctaccagaccaaggtcaacctcctctctgccatcaagagcccctgccagagggagaccccagagggggctgaggccaagccctggtatgagcccatctatctgggaggggtcttccagctggagaagggtgaccgactcagcgctgagatcaatcggcccgactatctcgactttgccgagtctgggcaggtctactttgggatcattgccctgtgaggaggacgaacatccaaccttcccaaacgcctcccctgccccaatccctttattaccccctccttcagacaccctcaacctcttctggctcaaaaagagaattgggggcttagggtcggaacccaagcttagaactttaagcaacaagaccaccacttcgaaacctgggattcaggaatgtgtggcctgcacagtgaagtgctggcaaccactaagaattcaaactggggcctccagaactcactggggcctacagctttgatccctgacatctggaatctggagaccagggagcctttggttctggccagaatgctgcaggacttgagaagacctcacctagaaattgacacaagtggaccttaggccttcctctctccagatgtttccagacttccttgagacacggagcccagccctccccatggagccagctccctctatttatgtttgcacttgtgattatttattatttatttattatttatttatttacagatgaatgtatttatttgggagaccggggtatcctgggggacccaatgtaggagctgccttggctcagacatgttttccgtgaaaacggagctgaacaataggctgttcccatgtagccccctggcctctgtgccttcttttgattatgttttttaaaatatttatctgattaagttgtctaaacaatgctgatttggtgaccaactgtcactcattgctgagcctctgctccccaggggagttgtgtctgtaatcgccctactattcagtggcgagaaataaagtttgcttagaaaagaaa

SEQ ID NO: 13233 - DNA, 702 bp, Artificial Sequence
  derived and/or modified sequence
atgagcaccgagagcatgatcagagacgtggagctggccgaggaggccctgcccaagaagaccggcggcccccagggcagcagaagatgcctgttcctgagcctgttcagcttcctgatcgtggccggcgccaccaccctgttctgcctgctgcacttcggcgtgatcggcccccagagagaggagttccccagagacctgagcctgatcagccccctggcccaggccgtgagaagcagcagcagaacccccagcgacaagcccgtggcccacgtggtggccaacccccaggccgagggccagctgcagtggctgaacagaagagccaacgccctgctggccaacggcgtggagctgagagacaaccagctggtggtgcccagcgagggcctgtacctgatctacagccaggtgctgttcaagggccagggctgccccagcacccacgtgctgctgacccacaccatcagcagaatcgccgtgagctaccagaccaaggtgaacctgctgagcgccatcaagagcccctgccagagagagacccccgagggcgccgaggccaagccctggtacgagcccatctacctgggcggcgtgttccagctggagaagggcgacagactgagcgccgagatcaacagacccgactacctggacttcgccgagagcggccaggtgtacttcggcatcatcgccctgtag

SEQ ID NO: 13234 - DNA, 702 bp, Artificial Sequence
  derived and/or modified sequence
atgtccaccgaaagtatgatcagggatgttgagctcgcagaagaggccctcccgaaaaagacaggcggcccacagggctctcgtcgctgtctgttcctgagcctcttctcctttctcattgtcgccggcgctaccaccctgttttgtctcttacacttcggcgttatcggtccacagagggaggagttccctagagacctgagcttgatctctcctctggcccaagccgttcgaagctcttcgaggacacccagcgacaaacccgtggctcatgtcgtcgctaacccacaggccgagggccaactacagtggctgaatcgccgggctaatgcactgctggccaatggcgtagagctgcgggataatcaactcgtggtgccgtcggaggggctctacctgatctattctcaggtcctgttcaaaggtcaaggctgtccatcaacccacgttttgctaacacacacaatcagtagaatcgcggtgagctatcagacaaaagtcaacctcctgagtgctattaagagcccatgccaacgcgagacgccagagggcgccgaggctaaaccgtggtatgaacctatttatctggggggtgtatttcagctggaaaaaggcgaccgcttatctgcagaaatcaatcggcctgactatctcgacttcgctgagtccggccaagtctactttggcatcatcgcgttatag

SEQ ID NO: 13235 - DNA, 702 bp, Artificial Sequence
  derived and/or modified sequence
atgtctaccgagtcaatgattagagacgttgaactggccgaggaggcacttccaaagaagaccggtggccctcagggctctcgcaggtgcctgtttctcagcttgttctccttcctgatcgtggcaggcgccaccacactcttctgccttctccacttcggcgttattggaccccagagggaggagtttcctcgtgacctgagtctgatctcaccgctcgcccaggctgtgagatcttcgtctagaaccccaagcgataagccagttgcacacgtggtagctaacccacaggcagagggccagctgcaatggctgaatcgtcgggccaacgccctgctcgcgaatggtgtggaacttcgggacaaccagcttgtcgtccccagtgaaggcctgtacttaatctatagccaggtactgtttaagggacaaggctgcccaagcacccatgtgctgttgactcatacaattagcaggatcgcagtaagctatcagactaaagtcaacctcctctcagccatcaagtcgccttgccagagagagactcctgaaggggccgaggcaaaaccgtggtatgaacccatttatctcggaggtgtgtttcagctggagaaaggtgataggttatccgctgaaatcaaccggcctgattacttagatttcgccgagtccggacaagtgtactttggcatcatcgctttatag

SEQ ID NO: 13236 - DNA, 702 bp, Artificial Sequence
  derived and/or modified sequence
atgtccaccgagtccatgatccgagatgtcgaattggcagaggaggctttgccaaagaagacaggggggccacaagggtccagacgatgcctcttcctatctctcttttcgttcctgatcgtggcaggagccactacacttttttgtctcctccactttggagtgatcggacctcagcgcgaagagttccctcgcgatctgagtctgattagtcctctggctcaggcggtgcgctcaagtagtcgaacaccctctgataaaccagttgctcacgtagtcgccaacccgcaggccgagggtcagctgcagtggttgaataggcgggcaaacgcactgcttgccaatggggttgagctgcgggataaccagctggtcgtgccttcagaaggcttgtatcttatctattcacaggtgctgtttaagggccagggatgtccgagtacacacgtcttattgactcacactatatcccggatcgctgtgtcttaccagaccaaggtcaatttacttagcgcgattaagtcaccttgccagagagagacccctgagggtgccgaagctaaaccctggtacgaaccaatttacctcggaggcgtgttccaactggagaagggggatcgactgagcgctgagatcaatcgacctgattacctcgactttgccgagtcaggtcaagtctattttggaatcatagccttgtag

SEQ ID NO: 13237 - DNA, 702 bp, Artificial Sequence
  derived and/or modified sequence
atgtcaactgaatctatgatcagagacgtggagctcgcagaagaagctttgcccaagaagactggtggcccccaaggatcccgaaggtgcctttttctgagcttgttcagtttcctaatagtagcgggcgccacaacactgttctgtctgttgcattttggcgttatcggacctcagagagaggagtttccacgggacctaagcctgatttcccccctggcgcaggctgtcagatcctcatccaggactccttccgataaacctgtggcccatgtggtagctaatccacaggctgaaggccagctgcaatggttgaaccgccgtgccaatgctctcctggctaatggtgttgagcttcgtgacaatcaactggtggtcccttctgaggggctctacctcatatattcacaggtgctctttaagggacaaggatgcccttcaactcacgtgctgctcactcacacaatctcacgcatcgcagtttcataccagaccaaagtgaacctgttatctgcgatcaagtcaccgtgtcagcgggagactcctgaaggggctgaagcaaagccttggtatgagcccatctacctgggtggggtcttccagcttgaaaaaggggaccgcctgagcgcggagattaacagacccgattacctcgacttcgcagaaagtggccaggtttactttggaatcatagccctttag

SEQ ID NO: 13238 - DNA, 702 bp, Artificial Sequence
  derived and/or modified sequence
atgtcaacggaaagcatgattagagatgttgaactggccgaagaagccctgccaaagaaaaccggcggcccgcaaggcagccgacggtgcttatttctcagtctgttcagcttcctgatcgtggccggtgccacgaccctgttctgcttactgcactttggagtgattggtccgcagagagaggagtttccacgcgatttgagcctgatttcgcctctggcgcaggccgtcagaagtagtagtagaacacccagcgacaaacccgtggcgcacgtggtagccaacccccaggctgaaggacaattgcagtggctgaatcggagagcaaatgcactcctagcaaacggtgtggaactgagggacaatcagctcgtcgtaccctcagaaggattatatctcatctacagccaggtgctatttaagggccaggggtgcccaagtacacacgtgctccttacacacaccattagccgcattgctgtgtcataccagaccaaggtgaaccttctgagcgccattaagtcaccttgtcaaagagagactccagagggagcggaggctaagccttggtacgagcccatttacctcgggggagtgtttcagctagagaagggtgatcggctttcagcagagattaatcgaccggattacctggactttgcagaaagcggccaggtgtattttggtatcatcgccctgtag

SEQ ID NO: 13239 - DNA, 702 bp, Artificial Sequence
  derived and/or modified sequence
atgagcacggaatccatgatccgagacgtggagctagcagaagaggcccttcctaaaaaaacaggcggaccccagggaagtcgtaggtgcctcttcctctcactgttcagttttcttatagtcgccggcgctactaccctgttttgcttactgcatttcggcgtaattgggccacagcgagaagaattcccccgtgacttatcactaatcagcccgctagctcaggcagtgcggagctctagtcgtacgccatctgacaagcccgtggcccacgtggtggccaatccccaggccgaaggacaacttcagtggcttaaccggcgggccaatgccctgttagcaaatggagttgaactgagggataaccagcttgttgtccctagcgaaggactttatctcatctacagccaagtcctgttcaagggtcagggctgtccctctactcatgtgctgttgacacataccatctcccggatagccgtgtcttatcagactaaagtcaatctcttatccgccataaagtccccttgtcagagggagaccccagaaggggccgaggccaaaccctggtacgaaccgatttatctggggggcgtgttccagcttgagaaaggcgatagactgagcgccgagataaatcggcccgactatctggactttgccgaaagcggacaggtgtacttcggtatcattgcgctgtag

SEQ ID NO: 13240 - DNA, 702 bp, Artificial Sequence
  derived and/or modified sequence
atgagtacagaaagcatgattcgcgatgttgagctggccgaggaagctctgcccaagaaaaccggtgggccacagggctcaaggcgctgcttattcctgtccctgttctcgtttctgatcgtggccggagcaacaaccctcttctgcttattacactttggcgtgatcggaccccagagagaggagtttccacgcgatctctctctcatctcaccactggctcaagccgtgcggtcctcatccaggacgccctccgacaagccagtggcacatgtcgtggccaacccccaagccgagggacagctccagtggctgaaccggcgggcaaacgctttgctcgctaatggcgtggagctgagagataaccagctggtggtcccttcggagggtctctacctcatttactcgcaggttctgtttaagggtcaggggtgtccctccactcatgtgctgctaactcacaccatctcccgaatcgccgtatcttaccaaacaaaggtgaacctcctgtcagctataaagagtccttgccaaagagaaaccccggaaggcgcagaggccaagccttggtacgagccaatctacctcggtggcgtgttccagcttgaaaagggggatagattatctgctgagattaatcggccagactacctggactttgccgagagtggacaagtgtattttggcattatcgcgctgtag

SEQ ID NO: 13241 - DNA, 702 bp, Artificial Sequence
  derived and/or modified sequence
atgagcacagagagcatgatcagagatgtggagctggccgaggaggccctgcccaagaagacaggaggcccccagggcagccgccgctgcctcttcctgagcctcttctccttcctgattgtggccggggccaccaccctcttctgcctgctgcactttggagtcatcggcccccagcgggaggagttcccccgggacctgagcctcatcagccccctggcccaggccgtgcgcagcagcagcaggacccccagcgacaagcctgtggcccacgtggtggccaacccccaggccgagggccagctgcagtggctgaacagaagagccaatgccctgctggccaatggagtggagctgcgggacaaccagctggtggtgcccagcgagggcctgtacctgatctacagccaggtgctcttcaagggccagggctgccccagcacccacgtgctgctgacccacaccatcagcagaattgctgtgtcctaccagaccaaggtgaacctgctgagcgccatcaagagcccctgccagcgggagaccccagagggcgctgaggccaagccctggtatgagcccatctacctgggcggcgtcttccagctggagaagggggaccggctgtctgctgagatcaacagaccagactacctggactttgctgagagcggccaggtgtacttcggcatcatcgccctgtag

SEQ ID NO: 13242 - DNA, 702 bp, Artificial Sequence
  derived and/or modified sequence
atgagcaccgagagcatgatccgggacgtggagctggccgaggaggctctgcccaaaaaaaccggaggaccccagggctcacgtcgttgtttatttctgtcactttttagttttctgatcgtggcgggcgctaccactctcttctgcctgttgcacttcggagtaattggaccccagagagaggagtttccacgcgacctgtctctgatttcccccctggcacaagctgtgagatcctcctcacgaactccctctgataagcctgttgcccatgtggttgcaaatccacaggctgaaggccaactgcagtggctgaaccgtagagccaatgctctcctcgctaatggggtggaactgcgcgacaatcagttggtcgtgccatcggaagggctgtacttgatctactcacaagtgctgtttaagggccagggctgtcctagtacccacgtccttctgacacacaccatcagcagaattgctgtgtcgtaccagacgaaggtcaacctcctgagtgcaatcaagagcccgtgtcaacgggaaacccctgaaggagctgaggctaaaccttggtacgaacctatttacctcggcggagtgttccagttagagaagggtgatagactgagcgccgaaattaatcgccccgactatcttgattttgctgaatccggtcaggtctacttcggaatcatcgccctgtag

SEQ ID NO: 13243 - DNA, 702 bp, Artificial Sequence
  derived and/or modified sequence
atgagcaccgagagcatgatccgggacgtggagctggccgaggaggcactgcctaaaaaaaccgggggcccacagggatcccggagatgcctcttcctctcccttttctcatttctgatcgtggcaggtgccacaacactattttgcctcctgcattttggtgtaataggccctcagagagaagaattcccaagagatctaagcctgatctcaccactggcgcaggctgtaagatcctcttccagaaccccgtccgacaaacctgtggcccacgtagtagctaaccctcaagctgaaggacagctgcagtggcttaacagaagagccaatgccctcttggcaaacggggtcgaactccgggataaccaactggttgtccccagtgaaggcttgtacctgatttatagccaagttctgttcaaagggcaaggatgcccgagtactcatgttctgttgacacacacgatctctaggattgcggtttcataccagactaaggtcaacctcctgagcgccataaagtccccgtgtcagagggaaactccggagggggccgaagctaaaccttggtacgagcccatttacctgggtggtgtgttccaactagaaaagggcgatcgtctcagcgccgaaataaaccgccccgactatctggatttcgccgagtccggtcaggtgtattttgggattatcgctctgtag

SEQ ID NO: 13244 - DNA, 702 bp, Artificial Sequence
  derived and/or modified sequence
atgagcaccgagagcatgatccgggacgtggagctggccgaggaggctctgcccaaaaaaacaggcggaccccagggaagcaggcggtgtctctttctatctctcttttccttcctgattgtggctggagccacaacattgttctgcctgctgcatttcggcgtcattgggcctcagagggaggaattcccccgggatctctccctcattagccccctggcccaggccgtccggtcttcatccaggacaccgtcagacaaacctgttgcccatgtggtggcaaatccgcaggcagagggtcagctccagtggttgaataggagagccaacgctctgttagcaaatggcgtggagttgagggacaatcagttggtggtgccctctgaaggcttgtatttgatatactctcaggttttgttcaagggccagggttgcccatcaacgcacgttttgctgacacatacgatctcccggattgcagtgtcatatcagaccaaagtaaaccttttatctgcaattaaatctccatgccagcgcgaaactcctgaaggcgccgaggccaagccctggtacgagccaatttatttgggcggtgtctttcagctcgagaagggcgaccggctgagcgccgagataaataggccagattacctggatttcgctgagagtgggcaggtttactttgggatcattgccttatag

SEQ ID NO: 13245 - DNA, 702 bp, Artificial Sequence
  derived and/or modified sequence
atgagcaccgagagcatgatccgggacgtggagctggccgaggaggcgctgcctaaaaagaccggggggccccagggaagccggcgctgtttgtttttgtccctgttttccttcctcattgtagcaggtgctaccacgctgttttgcctgctacatttcggcgtgataggcccgcaacgggaagaatttcccagggatttgagcttgatctctccactggcacaggccgttcggagcagctctcggacgcctagcgacaaacccgtggcccacgtagtcgccaatcctcaggccgaaggccagctgcaatggttgaatagacgggccaacgctttgttggctaatggggtggagctccgagacaatcagctggtcgtgccttcggagggtctgtatctcatctatagccaggttctgttcaagggccaggggtgtccttcaactcacgtcttgcttacacatacaatctcccgcatcgcagtaagttaccaaacaaaggtcaatctgttgagcgccatcaagtcaccttgccagagggagacccccgagggagcagaagccaaaccctggtacgaaccgatttacttgggaggtgtgtttcagctggaaaaaggagatagactgtctgccgagatcaacagaccagactacctggattttgccgagtctggtcaagtgtacttcggcatcatcgcactgtag

SEQ ID NO: 13246 - DNA, 702 bp, Artificial Sequence
  derived and/or modified sequence
atgagcaccgagagcatgatccgggacgtggagctggccgaggaggcgttgcccaaaaagaccggcggcccacaggggagccgccggtgcctgtttttaagcttattttccttccttattgtcgccggtgccacaacacttttttgtttgctgcactttggcgtaattgggccacaacgcgaggagtttcccagagatcttagtcttatctcccccctggcccaggccgtgagaagtagctctcggacaccttcagacaagcctgttgctcacgtggtggccaacccacaggcggaaggtcagctgcaatggctaaatagacgtgcaaacgcgcttctagccaatggggtcgaactgagagataatcaactggtcgtcccctctgaagggctgtacctcatatacagccaggttctgtttaaaggccaggggtgcccatctacacatgtcctcttgacgcacactatttcccgtattgctgttagctatcagacaaaggtgaacctcctgtcagcaatcaagtccccgtgccagagggaaacccccgagggggccgaggcaaagccttggtacgaacctatttatctgggcggcgtgtttcaattagagaaaggggaccgattaagcgctgagatcaacaggcctgactatttggacttcgccgaaagtgggcaggtgtactttgggatcatcgctttgtag

SEQ ID NO: 13247 - DNA, 702 bp, Artificial Sequence
  derived and/or modified sequence
atgagcaccgagagcatgatccgggacgtggagctggccgaggaggctttacctaaaaagaccggcggcccccaaggctcaagacggtgcctttttctgtcactcttttcatttctgatagtggctggcgccacgactctcttctgtttgctacacttcggagttattggacctcagcgagaggaatttccccgcgacttgtctctgatctccccactggcccaggccgtacgctccagtagccgaaccccctctgataagcccgttgcccacgtagtggctaacccccaggctgaaggacaactgcagtggctgaatcggagggccaatgcactgctggcaaatggcgtcgaacttcgggacaaccagttggtggtccctagcgaggggctctatttgatatatagtcaggtgcttttcaagggacagggttgtccatccactcacgtcttacttacacacacaatttcccggatcgcagtgtcttaccagacaaaagtgaacttactaagcgcaatcaagagcccatgccagagggagacacctgaaggagccgaggccaagccttggtacgaaccaatctatctcgggggtgtattccagctcgagaaaggcgatcggctgtctgcggagattaataggcctgactacttggactttgctgagtccggtcaggtctacttcgggatcattgctctgtag

SEQ ID NO: 13248 - DNA, 702 bp, Artificial Sequence
  derived and/or modified sequence
atgagcaccgagagcatgatccgggacgtggagctggccgaggaggctctgccgaagaagaccggcggacctcaggggagtaggcgctgtctctttcttagcctgttttccttccttatcgtggccggggctaccactctgttctgcctactgcactttggagttattggaccccagcgggaggaattcccaagagatctatccctgatttcccctctcgcccaggcagtgaggagctcttcccggaccccctctgataagcctgtggcccacgtggtagccaacccgcaagcggaaggtcagctgcagtggttgaatagaagagcaaacgctctcttagctaacggagttgaactgagggacaatcaacttgtagtcccatccgaagggttatatctgatctattcgcaggtcctgttcaaggggcagggttgcccttcaacccacgtgctgttaacccacacaatcagtagaatagcagtgagctaccagactaaagtgaatcttctaagcgccatcaaatccccgtgtcagcgggaaactccggagggcgctgaagctaaaccttggtacgagcctatttatctggggggcgtttttcaactggagaagggagatcggctctcagctgagatcaacaggcccgattatctggacttcgccgagagcggtcaggtttactttggtatcattgctctctag

SEQ ID NO: 13249 - DNA, 702 bp, Artificial Sequence
  derived and/or modified sequence
atgagcacagagagcatgatcagagatgtggaacttgcggaagaagcactgccaaagaaaactggtggccctcagggctctcgcagatgtctattcctatctctgttcagcttcttgatcgttgctggagctaccactctcttctgtctgctccacttcggggttattggaccccagcgggaggagttcccaagagacctgagcttaatcagccccctcgcacaggcggtgcgctccagctcccgcacgccttctgacaaacccgtcgctcatgtggttgccaacccacaggctgagggacaactgcagtggctcaacaggcgggctaatgccctgttggccaatggagtcgagctcagggacaaccagttggtcgtccctagtgaggggctctatctcatctacagccaagtcctgttcaagggtcagggctgcccatcgactcacgtgctcctgacacatacgattagcagaattgccgtctcctaccagaccaaagtcaatctgcttagcgcaatcaagagcccttgccagagagagacgccagagggtgcggaggctaagccctggtacgaacctatttatctgggtggggtcttccagctcgagaagggcgatcggctgtcagctgaaatcaaccggcctgactatctcgatttcgctgaatccgggcaggtctactttgggatcatcgcactgtag

SEQ ID NO: 13250 - DNA, 702 bp, Artificial Sequence
  derived and/or modified sequence
atgtcaacagaatctatgataagagatgtggaactcgcggaggaggctctgccaaagaagaccggcggtcctcaaggatcccgtcggtgtctgttcctctctctgttttctttcttaatcgtcgcaggggcaactacactcttctgcctcctgcactttggggtcataggtccccaaagggaagagtttccaagggacctctccttgatttctcccctcgcacaagctgttcggtccagctctagaaccccaagtgataagccggtggcgcacgtcgtagccaatccgcaagccgaagggcagctgcagtggctgaacagaagggccaatgcgcttctggctaatggagtggaactcagggacaaccagttagtcgtaccgtccgaaggcctgtatttgatttacagccaagtgttattcaaaggacagggttgcccatcaacccacgtcctcctgacccacaccatttcccgtatcgccgtgtcgtaccagactaaggttaatcttctgagcgcaattaaaagcccatgtcagagagagacccctgaaggcgctgaagcaaaaccctggtacgaaccgatttaccttggtggggtgttccagctggaaaaaggcgaccgtctttccgccgagattaaccggcctgactacctcgattttgccgagagcggtcaagtgtattttggaatcatagccctttag

SEQ ID NO: 13251 - DNA, 702 bp, Artificial Sequence
  derived and/or modified sequence
atgtcgacagagtctatgattagagacgtggaactggctgaagaagcccttccgaagaaaacagggggtccccaggggtctaggaggtgtctctttctctctttattcagttttctgattgtcgctggagcaactactctcttctgtctgttgcactttggcgttatcggcccacagagggaggagtttcccagggatctgtctctgatatctccgctagcccaagcagtccgttcatcttccagaaccccaagtgacaaaccggtcgcccacgtagtcgctaatcctcaagcagaaggacagctccagtggctaaatcgcagagcgaatgccctgcttgctaatggagtggaactgcgggataaccaactagttgtacccagtgaggggctatatctcatatactcacaggtgttgttcaagggtcaggggtgcccctccacccacgtccttctgacgcatacaatctcaagaatagcagtatcataccaaacgaaggtgaacctgctgagtgccattaagagtccgtgccaacgggaaactccggagggagctgaggcaaaaccatggtatgagcctatatacttagggggagtgtttcagcttgaaaagggggatcgactgtcggccgagatcaatcgcccagactacctggattttgccgagagtggccaagtctattttggcataatcgctctatag

SEQ ID NO: 13252 - DNA, 702 bp, Artificial Sequence
  derived and/or modified sequence
atgtcaaccgaaagcatgatccgggacgttgaattggctgaggaggccttgcccaaaaagactggcggaccacagggatccagacgttgtttattcttgagcttattcagctttcttattgtggccggtgctacaacactcttctgcctccttcacttcggggtgatcggcccacagcgagaagaattcccccgagacctgtccctaattagccccctggcccaggccgttaggagctcgtctagaacccctagtgacaagccagttgcccacgtggtggccaaccctcaggcagaaggacagctgcaatggcttaatagaagagccaacgcattgcttgcaaacggcgtggaacttcgggataaccagttggtcgtgccctccgaagggctgtatctaatctactcccaggtgctctttaaagggcagggctgcccctccacccatgtcctattgacccacaccatctctcgtatagcggtgtcctatcagaccaaggtcaatttgctctctgcaatcaagtcaccatgtcaaagagagaccccagagggcgcagaggccaagccatggtatgaacccatctatttgggaggcgtcttccagctggagaaaggagaccggctcagcgccgagattaataggcccgactatctggacttcgctgagtccggtcaggtgtattttggcatcattgcattatag

SEQ ID NO: 13253 - DNA, 702 bp, Artificial Sequence
  derived and/or modified sequence
atgagtactgagtccatgattcgcgatgtagaactggccgaggaagccttgcctaagaaaacgggcggaccccaggggagtagaagatgcctgttcctgtcattattctcctttcttattgtggctggcgctacaaccttgttttgtctgctacattttggcgtgattggccctcagagagaggaatttcccagagacttatcactcatcagtccgctggctcaggcagtccgctctagctcaaggacacccagcgacaagcctgtggctcacgttgtggccaatcctcaagccgaaggacagctgcagtggttgaaccgtcgtgcgaatgccttgctcgccaatggtgtggaactccgagacaaccaacttgtggtgccatcagaaggcttatatcttatctactcgcaggtgctctttaagggccaaggatgtcccagtactcatgtgctcttaactcataccatctcaagaatcgccgtaagctaccagaccaaggtaaatttactgagtgctatcaaatcaccctgtcagcgggaaacccccgaaggagctgaggctaaaccgtggtatgagccaatctacctaggtggtgtttttcaactggagaaaggtgacagactcagcgcggaaatcaacaggcctgactatctcgatttcgccgagtctgggcaggtgtattttggaataatcgcactgtag

SEQ ID NO: 13254 - DNA, 702 bp, Artificial Sequence
  derived and/or modified sequence
atgtccactgagtctatgataagggacgtggagctcgctgaagaggcactacccaagaaaaccggtgggccacaggggagtcgcaggtgtttatttctatccctgttctcttttcttatcgtcgctggggctaccaccctattttgcttgctgcacttcggggtgatcggcccacagcgcgaagaattcccaagagacctttccttgatctctccacttgcacaggccgtgaggtcttcttccaggaccccctctgacaagcccgtggctcatgtggttgccaatccacaagctgaaggccagcttcagtggctgaaccgccgagcaaacgccctgctcgctaacggggtggaactgagagataaccaacttgtcgtgcccagtgaaggcctgtacctgatctactcccaggtcctgtttaagggtcaaggctgcccatccacccacgtgctgttgacccacaccatctctagaattgctgttagctatcagacaaaagttaatttgcttagtgccatcaaaagtccctgccaacgcgagacccccgagggagccgaggcgaaaccgtggtatgaacctatttaccttgggggtgtctttcagctcgaaaagggagataggctctctgccgagatcaaccggccagattatcttgattttgccgagtctgggcaggtctacttcggtatcattgcgctttag

SEQ ID NO: 13255 - DNA, 702 bp, Artificial Sequence
  derived and/or modified sequence
atgagcaccgagtccatgattcgagatgtggaattggcggaggaggccctgcctaagaagaccggcggtccccaggggtcccggaggtgtctcttcctctccctcttctccttcctaattgttgccggtgcaacaacactgttttgtttgctgcactttggagtgatcggccctcagagagaagagtttcctcgggatctgtcccttatatctccattggcccaggctgtgcggagttcttctaggacaccgtccgacaaacccgttgcacatgtagtggctaacccacaggccgagggacaactgcagtggcttaaccgccgtgctaatgcccttcttgcaaatggcgtcgagctgcgggacaaccagctggtcgtgccatcggaaggtctctatctcatttactcccaggtgttgtttaagggtcagggatgcccgtccactcatgtgctgctaacccataccatatctcgaatagcagtgtcatatcagaccaaagtcaatttgctgtccgcgattaagagcccctgccagcgggaaacgcccgagggggcagaagccaagccttggtacgagccgatttatctcgggggagtgttccagttggagaaaggcgacagactcagcgcagagatcaatagacccgattatctagacttcgccgagtctggccaggtgtattttgggattattgccctgtag

SEQ ID NO: 13256 - DNA, 1676 bp, Artificial Sequence
  derived and/or modified sequence
cagacgctccctcagcaaggacagcagaggaccagctaagagggagagaagcaactacagaccccccctgaaaacaaccctcagacgccacatcccctgacaagctgccaggcaggttctcttcctctcacatactgacccacggctccaccctctctcccctggaaaggacaccatgagcactgaaagcatgatccgggacgtggagctggccgaggaggcgctccccaagaagacaggggggccccagggctccaggcggtgcttgttcctcagcctcttctccttcctgatcgtggcaggcgccaccacgctcttctgcctgctgcactttggagtgatcggcccccagagggaagagttccccagggacctctctctaatcagccctctggcccaggcagtcagatcatcttctcgaaccccgagtgacaagcctgtagcccatgttgtagcaaaccctcaagctgaggggcagctccagtggctgaaccgccgggccaatgccctcctggccaatggcgtggagctgagagataaccagctggtggtgccatcagagggcctgtacctcatctactcccaggtcctcttcaagggccaaggctgcccctccacccatgtgctcctcacccacaccatcagccgcatcgccgtctcctaccagaccaaggtcaacctcctctctgccatcaagagcccctgccagagggagaccccagagggggctgaggccaagccctggtatgagcccatctatctgggaggggtcttccagctggagaagggtgaccgactcagcgctgagatcaatcggcccgactatctcgactttgccgagtctgggcaggtctactttgggatcattgccctgtgaggaggacgaacatccaaccttcccaaacgcctcccctgccccaatccctttattaccccctccttcagacaccctcaacctcttctggctcaaaaagagaattgggggcttagggtcggaacccaagcttagaactttaagcaacaagaccaccacttcgaaacctgggattcaggaatgtgtggcctgcacagtgaagtgctggcaaccactaagaattcaaactggggcctccagaactcactggggcctacagctttgatccctgacatctggaatctggagaccagggagcctttggttctggccagaatgctgcaggacttgagaagacctcacctagaaattgacacaagtggaccttaggccttcctctctccagatgtttccagacttccttgagacacggagcccagccctccccatggagccagctccctctatttatgtttgcacttgtgattatttattatttatttattatttatttatttacagatgaatgtatttatttgggagaccggggtatcctgggggacccaatgtaggagctgccttggctcagacatgttttccgtgaaaacggagctgaacaataggctgttcccatgtagccccctggcctctgtgccttcttttgattatgttttttaaaatatttatctgattaagttgtctaaacaatgctgatttggtgaccaactgtcactcattgctgagcctctgctccccaggggagttgtgtctgtaatcgccctactattcagtggcgagaaataaagtttgcttagaaaagaaa

SEQ ID NO: 13257 - protein, 259 aa, Artificial Sequence
  derived and/or modified sequence
MSEVPVARVWLVLLLLTVQVGVTAGAPWQCAPCSAEKLALCPPVSASCSEVTRSAGCGCCPMCALPLGAACGVATARCARGLSCRALPGEQQPLHALTRGQGACVQESDASAPHAAEAGSPESPESTEITEEELLDNFHLMAPSEEDHSILWDAISTYDGSKALHVTNIKKWKEPCRIELYRVVESLAKAQETSGEEISKFYLPNCNKNGFYHSRQCETSMDGEAGLCWCVYPWNGKRIPGSPEIRGDPNCQIYFNVQN

SEQ ID NO: 13258 - DNA, 780 bp, Artificial Sequence
  derived and/or modified sequence
atgagcgaggtgccggtggcccgcgtgtggcttgtactccttctgctcactgttcaagtgggggttactgccggggctccctggcagtgtgccccatgttcagccgagaaactcgccctatgtccaccggtgtccgcaagttgctcggaggtgacaagaagcgcggggtgcggatgctgtcctatgtgcgcccttcctcttggcgccgcctgcggggtggccactgctagatgcgctcgggggctctcatgccgggctctgccaggtgaacagcagccactgcacgccctgactcggggacaaggcgcctgtgtccaggagtccgacgcaagcgccccccacgccgccgaagccggatcgcccgagagtcccgaaagcacggagattaccgaggaagagttattggacaatttccacttgatggccccctcagaggaggatcacagtatcctgtgggatgccatcagcacttacgatggctccaaggccctccatgtcaccaatattaaaaagtggaaagagccatgtagaatcgagttgtacagggtcgtagaaagtctggccaaagcgcaggaaacgtcaggagaggagattagtaaattctatctaccaaattgtaacaagaacggattctatcactctcgccagtgtgagacatccatggatggcgaggccggtctgtgttggtgcgtgtacccctggaatggcaagcgaattcccggaagcccagaaatccgaggcgaccctaattgtcagatttatttcaacgtccagaactag

SEQ ID NO: 13259 - DNA, 1653 bp, Artificial Sequence
  derived and/or modified sequence
ttgggtgcactagcaaaacaaacttattttgaacactcagctcctagcgtgcggcgctgccaatcattaacctcctggtgcaagtggcgcggcctgtgccctttataaggtgcgcgctgtgtccagcgagcatcggccaccgccatcccatccagcgagcatctgccgccgcgccgccgccaccctcccagagagcactggccaccgctccaccatcacttgcccagagtttgggccaccgcccgccgccaccagcccagagagcatcggcccctgtctgctgctcgcgcctggagatgtcagaggtccccgttgctcgcgtctggctggtactgctcctgctgactgtccaggtcggcgtgacagccggcgctccgtggcagtgcgcgccctgctccgccgagaagctcgcgctctgcccgccggtgtccgcctcgtgctcggaggtcacccggtccgccggctgcggctgttgcccgatgtgcgccctgcctctgggcgccgcgtgcggcgtggcgactgcacgctgcgcccggggactcagttgccgcgcgctgccgggggagcagcaacctctgcacgccctcacccgcggccaaggcgcctgcgtgcaggagtctgacgcctccgctccccatgctgcagaggcagggagccctgaaagcccagagagcacggagataactgaggaggagctcctggataatttccatctgatggccccttctgaagaggatcattccatcctttgggacgccatcagtacctatgatggctcgaaggctctccatgtcaccaacatcaaaaaatggaaggagccctgccgaatagaactctacagagtcgtagagagtttagccaaggcacaggagacatcaggagaagaaatttccaaattttacctgccaaactgcaacaagaatggattttatcacagcagacagtgtgagacatccatggatggagaggcgggactctgctggtgcgtctacccttggaatgggaagaggatccctgggtctccagagatcaggggagaccccaactgccagatatattttaatgtacaaaactgaaaccagatgaaataatgttctgtcacgtgaaatatttaagtatatagtatatttatactctagaacatgcacatttatatatatatgtatatgtatatatatatagtaactactttttatactccatacataacttgatatagaaagctgtttatttattcactgtaagtttattttttctacacagtaaaaacttgtactatgttaataacttgtcctatgtcaatttgtatatcatgaaacacttctcatcatattgtatgtaagtaattgcatttctgctcttccaaagctcctgcgtctgtttttaaagagcatggaaaaatactgcctagaaaatgcaaaatgaaataagagagagtagtttttcagctagtttgaaggaggacggttaacttgtatattccaccattcacatttgatgtacatgtgtagggaaagttaaaagtgttgattacataatcaaagctacctgtggtgatgttgccacctgttaaaatgtacactggatatgttgttaaacacgtgtctataatggaaacatttacaataaatattctgcatggaaatactgtta

SEQ ID NO: 13260 - DNA, 780 bp, Artificial Sequence
  derived and/or modified sequence
atgtctgaggtgcctgtggcccgggtgtggctggtgctgctgctgctgactgtgcaggtgggcgtgacagctggggccccctggcagtgtgccccctgcagcgctgagaagctggccctgtgcccccctgtgtctgccagctgcagcgaggtgaccaggtctgctggctgcggctgctgccccatgtgtgccctgcccctgggcgccgcctgtggggtggccacagcccgctgtgcccggggcctgagctgccgggccctgcccggggagcagcagcccctgcacgccctgacccggggccagggcgcctgtgtgcaggagagtgatgccagcgcccctcatgctgctgaggccggcagccctgagagccctgagagcacagagatcacagaggaggagctgctggacaacttccacctgatggcccccagcgaggaggaccacagcatcctgtgggatgccatcagcacctatgatggcagcaaggccctgcacgtgaccaacatcaagaagtggaaggagccctgccgcatcgagctgtacagagtggtggagagcctggccaaggcccaggagaccagcggggaggagatcagcaagttctacctgcccaactgcaacaagaatggcttctaccacagccggcagtgtgagacctccatggatggagaggccggcctgtgctggtgtgtgtacccctggaatggcaagagaattcctggcagccctgagatccggggggaccccaactgccagatctacttcaacgtgcagaactag

SEQ ID NO: 13261 - DNA, 780 bp, Artificial Sequence
  derived and/or modified sequence
atgagcgaggtgcccgtggcccgggtgtggctggtgctgctgctgctgacagttcaggttggcgtcacggccggagcgccttggcagtgtgcgccttgtagcgccgaaaagctggccttgtgcccccccgtgagcgcctcatgtagcgaggtcacgcgttcagctggttgtggatgctgtcctatgtgcgccttgcctttgggcgctgcatgtggtgttgcaacggcaagatgcgccagaggcctgtcctgcagggcacttcccggggagcaacagccccttcacgctcttacaagaggtcagggggcttgtgtgcaggaatcagacgccagtgcaccgcacgcggccgaggctggatcacccgaaagcccagagagcacggagataaccgaagaggaactgttggacaatttccacctgatggcgccttcagaagaggatcactccatcctctgggatgctatcagcacttacgatgggtctaaagccctgcatgttacaaatatcaagaagtggaaagagccatgtaggatagagttgtatagggtagttgagtccctggcaaaagcccaggaaacaagcggggaagagatttccaaattttatctcccaaactgcaataagaacggcttctaccacagtcggcagtgtgagacaagcatggacggagaggcaggactctgctggtgtgtctatccatggaacgggaaacgcatccctggtagtcctgaaatccggggtgatccaaactgccaaatctacttcaacgtgcagaactag

SEQ ID NO: 13262 - DNA, 780 bp, Artificial Sequence
  derived and/or modified sequence
atgagtgaagtgcctgtggcaagagtatggctggtcttgttattgctaacagtccaggtcggagtcaccgctggagccccatggcagtgcgctccatgttcggccgaaaagttggccttatgcccacccgtgagcgcttcgtgcagcgaggtgacacgtagtgccggttgcgggtgctgccccatgtgcgccctgcctctgggtgccgcatgcggtgtggctacagcaaggtgcgctagaggactctcttgtagggccctgcccggtgaacagcaaccactgcacgctctgactcggggacagggcgcttgtgtacaggagtctgatgcgtccgccccacacgccgctgaagccggaagccccgagtctcccgagagcactgagattacagaggaggagttgctggataactttcacctcatggccccatcagaggaggatcattcaatactttgggacgcaatatcgacatacgacggttcaaaggccctgcacgttaccaatatcaagaagtggaaggaaccctgccgcattgaactttacagagtggtagaatcacttgcaaaggctcaggagacaagtggggaggaaattagcaagttttacttgcctaattgtaataagaatggattctatcattcccgccagtgcgaaacaagcatggacggcgaagccggtctgtgctggtgcgtctatccgtggaatgggaaacgaatcccaggatctccagaaattcggggtgatccaaactgccagatatatttcaacgttcaaaattag

SEQ ID NO: 13263 - DNA, 780 bp, Artificial Sequence
  derived and/or modified sequence
atgagcgaggtgcccgtggccagagtgtggctggtgctgctgctgctgaccgtgcaggtgggcgtgaccgccggcgccccctggcagtgcgccccctgcagcgccgagaagctggccctgtgcccccccgtgagcgccagctgcagcgaggtgaccagaagcgccggctgcggctgctgccccatgtgcgccctgcccctgggcgccgcctgcggcgtggccaccgccagatgcgccagaggcctgagctgcagagccctgcccggcgagcagcagcccctgcacgccctgaccagaggccagggcgcctgcgtgcaggagagcgacgccagcgccccccacgccgccgaggccggcagccccgagagccccgagagcaccgagatcaccgaggaggagctgctggacaacttccacctgatggcccccagcgaggaggaccacagcatcctgtgggacgccatcagcacctacgacggcagcaaggccctgcacgtgaccaacatcaagaagtggaaggagccctgcagaatcgagctgtacagagtggtggagagcctggccaaggcccaggagaccagcggcgaggagatcagcaagttctacctgcccaactgcaacaagaacggcttctaccacagcagacagtgcgagaccagcatggacggcgaggccggcctgtgctggtgcgtgtacccctggaacggcaagagaatccccggcagccccgagatcagaggcgaccccaactgccagatctacttcaacgtgcagaactag

SEQ ID NO: 13264 - protein, 325 aa, Artificial Sequence
  derived and/or modified sequence
MLPRVGCPALPLPPPPLLPLLLLLLGASGGGGGARAEVLFRCPPCTPERLAACGPPPVAPPAAVAAVAGGARMPCAELVREPGCGCCSVCARLEGEACGVYTPRCGQGLRCYPHPGSELPLQALVMGEGTCEKRRDAEYGASPEQVADNGDDHSEGGLVENHVDSTMNMLGGGGSAGRKPLKSGMKELAVFREKVTEQHRQMGKGGKHHLGLEEPKKLRPPPARTPCQQELDQVLERISTMRLPDERGPLEHLYSLHIPNCDKHGLYNLKQCKMSLNGQRGECWCVNPNTGKLIQGAPTIRGDPECHLFYNEQQEARGVHTQRMQ

SEQ ID NO: 13265 - DNA, 978 bp, Artificial Sequence
  derived and/or modified sequence
atgctgcccagagtgggctgccccgccctgcccctgccccccccccccctgctgcccctgctgctgctgctgctgggcgccagcggcggcggcggcggcgccagagccgaggtgctgttcagatgccccccctgcacccccgagagactggccgcctgcggccccccccccgtggccccccccgccgccgtggccgccgtggccggcggcgccagaatgccctgcgccgagctggtgagagagcccggctgcggctgctgcagcgtgtgcgccagactggagggcgaggcctgcggcgtgtacacccccagatgcggccagggcctgagatgctacccccaccccggcagcgagctgcccctgcaggccctggtgatgggcgagggcacctgcgagaagagaagagacgccgagtacggcgccagccccgagcaggtggccgacaacggcgacgaccacagcgagggcggcctggtggagaaccacgtggacagcaccatgaacatgctgggcggcggcggcagcgccggcagaaagcccctgaagagcggcatgaaggagctggccgtgttcagagagaaggtgaccgagcagcacagacagatgggcaagggcggcaagcaccacctgggcctggaggagcccaagaagctgagacccccccccgccagaaccccctgccagcaggagctggaccaggtgctggagagaatcagcaccatgagactgcccgacgagagaggccccctggagcacctgtacagcctgcacatccccaactgcgacaagcacggcctgtacaacctgaagcagtgcaagatgagcctgaacggccagagaggcgagtgctggtgcgtgaaccccaacaccggcaagctgatccagggcgcccccaccatcagaggcgaccccgagtgccacctgttctacaacgagcagcaggaggccagaggcgtgcacacccagagaatgcagtag

SEQ ID NO: 13266 - DNA, 978 bp, Artificial Sequence
  derived and/or modified sequence
atgcttcctcgagtcggctgtcccgccctgcccctgcctccccccccacttcttcccctgctattgctgctgctcggagctagcggagggggaggtggcgcacgcgcggaagtcctgtttaggtgtccaccctgtacacctgaaaggctggccgcctgtggcccgcctcctgtggctccgccagccgccgtagcagccgtggcgggtggcgctaggatgccttgtgcagaactggtgcgggagccaggctgtgggtgctgttctgtgtgcgcccggctggaaggagaggcgtgtggcgtgtataccccacgctgtggccaaggcctgcgatgctacccgcaccccggctccgagcttccactgcaggcactggtgatgggagagggaacttgcgagaagcgacgagacgctgagtacggtgcatctcccgaacaagtggccgataatggggatgatcattcggaaggagggctggtggagaatcatgttgacagtactatgaacatgctcgggggaggtggaagcgcaggtcggaaaccactgaagagcggaatgaaggagctcgccgtctttagggaaaaagtcacagagcagcaccgccagatgggcaaaggaggcaaacatcacctggggctagaagaacccaaaaaactaaggcctccccctgcccgcactccttgccagcaggaactggaccaggtcctcgagcggatatccaccatgcggctcccagacgagagaggacccctagaacacctgtattctctgcacatccctaactgtgataaacatggcctgtacaatctgaaacagtgcaaaatgagcctgaacggacagaggggggaatgctggtgcgtcaaccccaacactggcaagttgattcagggagcccctaccattcgtggcgatcctgagtgtcacctcttttataatgaacaacaggaagccagaggcgtgcacacacaacgaatgcaatag

SEQ ID NO: 13267 - DNA, 978 bp, Artificial Sequence
  derived and/or modified sequence
atgctgccccgggtgggctgcccagccctgcccctgcccccaccacccctgctgcccctgctgctgctgctgctgggcgccagcggcggcggcggcggggcccgggcagaggtgctcttccgctgccccccctgcaccccagagcggctggccgcctgtggccccccacctgtggcccccccagctgctgtggccgctgtggccggcggggccaggatgccctgtgccgagctggtgcgggagcccggctgcggctgctgcagcgtgtgtgcccggctggagggggaggcctgtggggtgtacaccccccgctgtggccagggcctgcgctgctacccccaccctggcagcgagctgcccctgcaggccctggtgatgggagagggcacctgtgagaagagaagagatgctgaatatggagccagccctgagcaggtggccgacaatggagatgaccacagcgagggcggcctggtggagaaccacgtggacagcaccatgaacatgctgggcggcggcggcagcgctggcaggaagcccctgaagagcggcatgaaggagctggccgtgttccgggagaaggtgacagagcagcaccggcagatgggcaagggcggcaagcaccacctgggcctggaggagcccaagaagctgcggcccccaccagcccggaccccctgccagcaggagctggaccaggtgctggagcgcatcagcaccatgaggctgcctgatgagcggggccccctggagcacctgtacagcctgcacatccccaactgtgacaagcacggcctgtacaacctgaagcagtgcaagatgagcctgaatggccagagaggagagtgctggtgtgtgaaccccaacacaggcaagctgatccagggcgcccccaccatccggggggaccctgagtgccacctgttctacaatgagcagcaggaggcccggggcgtgcacacccagaggatgcagtag

SEQ ID NO: 13268 - DNA, 978 bp, Artificial Sequence
  derived and/or modified sequence
atgctgccccgggtgggctgccccgccctgcccctgcccccccccccccttctgcctctgctgctcctgttactgggggcatctggcgggggagggggggctcgggcggaagtgctgttccgctgtcccccatgtacacccgagagactcgctgcatgtgggcctccccccgtcgccccgcctgcagctgttgccgccgtggccggcggagctaggatgccctgcgctgagctagtgcgagagcccggttgtggttgttgctcagtatgtgcccgcctagagggtgaggcctgcggagtctacactccacgctgcggccaagggttgaggtgttatccccacccagggtctgaactgccgcttcaggctctggtcatgggtgaaggaacctgtgagaagagaagagacgcagagtacggcgcttctcccgagcaggtggctgacaatggggacgaccacagcgaaggaggtctggtggagaaccacgtggactctacaatgaacatgctcggtggtgggggtagcgctggacggaaaccactgaaatccggcatgaaagagctggccgtgtttcgagagaaagttactgagcaacataggcagatggggaagggcgggaagcatcatcttggcttggaagaacctaaaaagctgaggccaccaccagctcgtacaccatgccagcaggagctggaccaggtgttggaacgtattagcaccatgagactcccagacgagaggggcccactggagcacttatactcactacacattccaaactgcgataaacacggcctgtacaatctgaagcagtgcaaaatgagtctgaacggccagcgcggggagtgctggtgtgtgaatcctaataccggaaaactcatccaaggggcacccaccatccggggagatcctgagtgccatctgttttacaatgaacagcaggaggcccgcggcgtccatacacagagaatgcagtag

SEQ ID NO: 13269 - DNA, 978 bp, Artificial Sequence
  derived and/or modified sequence
atgcttccccgtgtgggttgtcctgcgctgcctctcccaccacctccgctcctgcccctcctgctgctattgttgggagcctcaggcggaggcggaggagcgagggcagaggtcctgttccggtgtcccccatgcaccccagagcggctggcggcatgtggaccacctcctgtcgctccccctgccgcagtggccgcagtagctgggggtgctcgaatgccttgcgcagagctggtcagggagcctgggtgtgggtgctgttccgtttgcgctaggttagagggggaggcttgcggtgtatatactcccagatgcggtcagggactaaggtgctaccctcatcccggttcggagttgccgctgcaagctctcgttatgggagagggaacatgtgagaagcggagagatgctgagtatggggcaagccccgaacaggtggccgacaatggcgatgatcactccgaagggggtctagttgagaaccacgtggacagcaccatgaacatgctgggcggtggcggtagtgccggtcggaaacccctcaaaagcggcatgaaagaattagcagtgtttagggagaaggtcacagaacagcatcggcagatgggcaaaggcggtaagcaccacctgggactggaagagcccaaaaagcttaggccgcctccggctaggactccttgccagcaagagctggatcaagtcctcgaacgaatatcaactatgagactgcccgacgagagaggcccactggaacacctgtacagcctgcacattcccaattgtgataaacatggtctgtataatctcaaacagtgtaagatgtccctgaatggacagcggggtgagtgctggtgcgtgaacccaaataccggaaagctcatacaaggcgctcccacaatccgcggtgatcccgaatgccacctgttttacaatgagcaacaagaagctaggggcgtgcacactcagagaatgcaatag

SEQ ID NO: 13270 - DNA, 1439 bp, Artificial Sequence
  derived and/or modified sequence
ggacccggctgcggcggcgagggaggaggaagaagcggaggaggcggctcccgcgctcgcagggccgtgccacctgcccgcccgcccgctcgctcgctcgcccgccgcgccgcgctgccgaccgccagcatgctgccgagagtgggctgccccgcgctgccgctgccgccgccgccgctgctgccgctgctgctgctgctactgggcgcgagtggcggcggcggcggggcgcgcgcggaggtgctgttccgctgcccgccctgcacacccgagcgcctggccgcctgcgggcccccgccggttgcgccgcccgccgcggtggccgcagtggccggaggcgcccgcatgccatgcgcggagctcgtccgggagccgggctgcggctgctgctcggtgtgcgcccggctggagggcgaggcgtgcggcgtctacaccccgcgctgcggccaggggctgcgctgctatccccacccgggctccgagctgcccctgcaggcgctggtcatgggcgagggcacttgtgagaagcgccgggacgccgagtatggcgccagcccggagcaggttgcagacaatggcgatgaccactcagaaggaggcctggtggagaaccacgtggacagcaccatgaacatgttgggcgggggaggcagtgctggccggaagcccctcaagtcgggtatgaaggagctggccgtgttccgggagaaggtcactgagcagcaccggcagatgggcaagggtggcaagcatcaccttggcctggaggagcccaagaagctgcgaccaccccctgccaggactccctgccaacaggaactggaccaggtcctggagcggatctccaccatgcgccttccggatgagcggggccctctggagcacctctactccctgcacatccccaactgtgacaagcatggcctgtacaacctcaaacagtgcaagatgtctctgaacgggcagcgtggggagtgctggtgtgtgaaccccaacaccgggaagctgatccagggagcccccaccatccggggggaccccgagtgtcatctcttctacaatgagcagcaggaggctcgcggggtgcacacccagcggatgcagtagaccgcagccagccggtgcctggcgcccctgccccccgcccctctccaaacaccggcagaaaacggagagtgcttgggtggtgggtgctggaggattttccagttctgacacacgtatttatatttggaaagagaccagcaccgagctcggcacctccccggcctctctcttcccagctgcagatgccacacctgctccttcttgctttccccgggggaggaagggggttgtggtcggggagctggggtacaggtttggggagggggaagagaaatttttatttttgaacccctgtgtcccttttgcataagattaaaggaaggaaaagtaaa

SEQ ID NO: 13271 - protein, 291 aa, Artificial Sequence
  derived and/or modified sequence
MQRARPTLWAAALTLLVLLRGPPVARAGASSAGLGPVVRCEPCDARALAQCAPPPAVCAELVREPGCGCCLTCALSEGQPCGIYTERCGSGLRCQPSPDEARPLQALLDGRGLCVNASAVSRLRAYLLPAPPAPGNASESEEDRSAGSVESPSVSSTHRVSDPKFHPLHSKIIIIKKGHAKDSQRYKVDYESQSTDTQNFSSESKRETEYGPCRREMEDTLNHLKFLNVLSPRGVHIPNCDKKGFYKKKQCRPSKGRKRGFCWCVDKYGQPLPGYTTKGKEDVHCYSMQSK

SEQ ID NO: 13272 - protein, 194 aa, Artificial Sequence
  derived and/or modified sequence
MQRARPLQALLDGRGLCVNASAVSRLRAYLLPAPPAPGNASESEEDRSAGSVESPSVSSTHRVSDPKFHPLHSKIIIIKKGHAKDSQRYKVDYESQSTDTQNFSSESKRETEYGPCRREMEDTLNHLKFLNVLSPRGVHIPNCDKKGFYKKKQCRPSKGRKRGFCWCVDKYGQPLPGYTTKGKEDVHCYSMQSK

SEQ ID NO: 13273 - protein, 153 aa, Artificial Sequence
  derived and/or modified sequence
  misc_feature (1)..(1): Xaa can be any naturally occurring amino acid
XSEEDRSAGSVESPSVSSTHRVSDPKFHPLHSKIIIIKKGHAKDSQRYKVDYESQSTDTQNFSSESKRETEYGPCRREMEDTLNHLKFLNVLSPRGVHIPNCDKKGFYKKKQCRPSKGRKRGFCWCVDKYGQPLPGYTTKGKEDVHCYSMQSK

SEQ ID NO: 13274 - protein, 143 aa, Artificial Sequence
  derived and/or modified sequence
  misc_feature (1)..(1): Xaa can be any naturally occurring amino acid
XESPSVSSTHRVSDPKFHPLHSKIIIIKKGHAKDSQRYKVDYESQSTDTQNFSSESKRETEYGPCRREMEDTLNHLKFLNVLSPRGVHIPNCDKKGFYKKKQCRPSKGRKRGFCWCVDKYGQPLPGYTTKGKEDVHCYSMQSK

SEQ ID NO: 13275 - protein, 263 aa, Artificial Sequence
  derived and/or modified sequence
MQRARPTLWAACEPCDARALAQCAPPPAVCAELVREPGCGCCLTCALSEGQPCGIYTERCGSGLRCQPSPDEARPLQALLDGRGLCVNASAVSRLRAYLLPAPPAPGNASESEEDRSAGSVESPSVSSTHRVSDPKFHPLHSKIIIIKKGHAKDSQRYKVDYESQSTDTQNFSSESKRETEYGPCRREMEDTLNHLKFLNVLSPRGVHIPNCDKKGFYKKKQCRPSKGRKRGFCWCVDKYGQPLPGYTTKGKEDVHCYSMQSK

SEQ ID NO: 13276 - protein, 277 aa, Artificial Sequence [sequence omitted]

SEQ ID NO: 13277 - protein, 189 aa, Artificial Sequence [sequence omitted]

SEQ ID NO: 13278 - protein, 268 aa, Artificial Sequence
  derived and/or modified sequence
MQRARPTLWAAALTLLVLLRGPPVARAGASSAGLGPVVRREPGCGCCLTCALSEGQPCGIYTERCGSGLRCQPSPDEARPLQALLDGRGLCVNASAVSRLRAYLLPAPPAPGNASESEEDRSAGSVESPSVSSTHRVSDPKFHPLHSKIIIIKKGHAKDSQRYKVDYESQSTDTQNFSSESKRETEYGPCRREMEDTLNHLKFLNVLSPRGVHIPNCDKKGFYKKKQCRPSKGRKRGFCWCVDKYGQPLPGYTTKGKEDVHCYSMQSK

SEQ ID NO: 13279 - DNA, 876 bp, Artificial Sequence
  derived and/or modified sequence
atgcagagagccagacccaccctgtgggccgccgccctgaccctgctggtgctgctgagaggcccccccgtggccagagccggcgccagcagcgccggcctgggccccgtggtgagatgcgagccctgcgacgccagagccctggcccagtgcgcccccccccccgccgtgtgcgccgagctggtgagagagcccggctgcggctgctgcctgacctgcgccctgagcgagggccagccctgcggcatctacaccgagagatgcggcagcggcctgagatgccagcccagccccgacgaggccagacccctgcaggccctgctggacggcagaggcctgtgcgtgaacgccagcgccgtgagcagactgagagcctacctgctgcccgccccccccgcccccggcaacgccagcgagagcgaggaggacagaagcgccggcagcgtggagagccccagcgtgagcagcacccacagagtgagcgaccccaagttccaccccctgcacagcaagatcatcatcatcaagaagggccacgccaaggacagccagagatacaaggtggactacgagagccagagcaccgacacccagaacttcagcagcgagagcaagagagagaccgagtacggcccctgcagaagagagatggaggacaccctgaaccacctgaagttcctgaacgtgctgagccccagaggcgtgcacatccccaactgcgacaagaagggcttctacaagaagaagcagtgcagacccagcaagggcagaaagagaggcttctgctggtgcgtggacaagtacggccagcccctgcccggctacaccaccaagggcaaggaggacgtgcactgctacagcatgcagagcaagtag

SEQ ID NO: 13280 - DNA, 585 bp, Artificial Sequence
  derived and/or modified sequence
atgcagagagccagacccctgcaggccctgctggacggcagaggcctgtgcgtgaacgccagcgccgtgagcagactgagagcctacctgctgcccgccccccccgcccccggcaacgccagcgagagcgaggaggacagaagcgccggcagcgtggagagccccagcgtgagcagcacccacagagtgagcgaccccaagttccaccccctgcacagcaagatcatcatcatcaagaagggccacgccaaggacagccagagatacaaggtggactacgagagccagagcaccgacacccagaacttcagcagcgagagcaagagagagaccgagtacggcccctgcagaagagagatggaggacaccctgaaccacctgaagttcctgaacgtgctgagccccagaggcgtgcacatccccaactgcgacaagaagggcttctacaagaagaagcagtgcagacccagcaagggcagaaagagaggcttctgctggtgcgtggacaagtacggccagcccctgcccggctacaccaccaagggcaaggaggacgtgcactgctacagcatgcagagcaagtag

SEQ ID NO: 13281 - DNA, 462 bp, Artificial Sequence
  derived and/or modified sequence
tgaagcgaggaggacagaagcgccggcagcgtggagagccccagcgtgagcagcacccacagagtgagcgaccccaagttccaccccctgcacagcaagatcatcatcatcaagaagggccacgccaaggacagccagagatacaaggtggactacgagagccagagcaccgacacccagaacttcagcagcgagagcaagagagagaccgagtacggcccctgcagaagagagatggaggacaccctgaaccacctgaagttcctgaacgtgctgagccccagaggcgtgcacatccccaactgcgacaagaagggcttctacaagaagaagcagtgcagacccagcaagggcagaaagagaggcttctgctggtgcgtggacaagtacggccagcccctgcccggctacaccaccaagggcaaggaggacgtgcactgctacagcatgcagagcaagtag

SEQ ID NO: 13282 - DNA, 432 bp, Artificial Sequence
  derived and/or modified sequence
tgagagagccccagcgtgagcagcacccacagagtgagcgaccccaagttccaccccctgcacagcaagatcatcatcatcaagaagggccacgccaaggacagccagagatacaaggtggactacgagagccagagcaccgacacccagaacttcagcagcgagagcaagagagagaccgagtacggcccctgcagaagagagatggaggacaccctgaaccacctgaagttcctgaacgtgctgagccccagaggcgtgcacatccccaactgcgacaagaagggcttctacaagaagaagcagtgcagacccagcaagggcagaaagagaggcttctgctggtgcgtggacaagtacggccagcccctgcccggctacaccaccaagggcaaggaggacgtgcactgctacagcatgcagagcaagtag

SEQ ID NO: 13283 - DNA, 792 bp, Artificial Sequence
  derived and/or modified sequence
atgcagagagccagacccaccctgtgggccgcctgcgagccctgcgacgccagagccctggcccagtgcgcccccccccccgccgtgtgcgccgagctggtgagagagcccggctgcggctgctgcctgacctgcgccctgagcgagggccagccctgcggcatctacaccgagagatgcggcagcggcctgagatgccagcccagccccgacgaggccagacccctgcaggccctgctggacggcagaggcctgtgcgtgaacgccagcgccgtgagcagactgagagcctacctgctgcccgccccccccgcccccggcaacgccagcgagagcgaggaggacagaagcgccggcagcgtggagagccccagcgtgagcagcacccacagagtgagcgaccccaagttccaccccctgcacagcaagatcatcatcatcaagaagggccacgccaaggacagccagagatacaaggtggactacgagagccagagcaccgacacccagaacttcagcagcgagagcaagagagagaccgagtacggcccctgcagaagagagatggaggacaccctgaaccacctgaagttcctgaacgtgctgagccccagaggcgtgcacatccccaactgcgacaagaagggcttctacaagaagaagcagtgcagacccagcaagggcagaaagagaggcttctgctggtgcgtggacaagtacggccagcccctgcccggctacaccaccaagggcaaggaggacgtgcactgctacagcatgcagagcaagtag

SEQ ID NO: 13284 - DNA, 834 bp, Artificial Sequence
  derived and/or modified sequence
atgagagccctgagactgggcgccgaggaccagcccctgcccgcctggatcccccagctgagagccgtgtactgcagacccatccccgccagacccgcctgccaggccgcctgccccggctgcagaagacacgccgccggcgccacccacgccctgggcagatgcgccgacagcgccggcgccgcccccagagccgccggcggcgccggctggagagagctgggcggcctgggcagcagaggcgccctgagagccgtgagacacctgcacagagccctgctggacggcagaggcctgtgcgtgaacgccagcgccgtgagcagactgagagcctacctgctgcccgccccccccgcccccggcaacgccagcgagagcgaggaggacagaagcgccggcagcgtggagagccccagcgtgagcagcacccacagagtgagcgaccccaagttccaccccctgcacagcaagatcatcatcatcaagaagggccacgccaaggacagccagagatacaaggtggactacgagagccagagcaccgacacccagaacttcagcagcgagagcaagagagagaccgagtacggcccctgcagaagagagatggaggacaccctgaaccacctgaagttcctgaacgtgctgagccccagaggcgtgcacatccccaactgcgacaagaagggcttctacaagaagaagcagtgcagacccagcaagggcagaaagagaggcttctgctggtgcgtggacaagtacggccagcccctgcccggctacaccaccaagggcaaggaggacgtgcactgctacagcatgcagagcaagtag

SEQ ID NO: 13285 - DNA, 570 bp, Artificial Sequence
  derived and/or modified sequence
atgcagagagccagacccaccctgtgggccgccgccctgaccctgctggacggcagaggcctgtgcgcctacctgctgcccgccccccccgcccccggcaacgccagcgagagcgaggaggacagaagcgccggcagcgtggagagccccagcgtgagcagcacccacagagtgagcgaccccaagttccaccccctgcacagcaagatcatcatcatcaagaagggccacgccaaggacagccagagatacaaggtggactacgagagccagagcaccgacacccagaacttcagcagcgagagcaagagagagaccgagtacggcccctgcagaagagagatggaggacaccctgaaccacctgaagttcctgaacgtgctgagccccagaggcgtgcacatccccaactgcgacaagaagggcttctacaagaagaagcagtgcagacccagcaagggcagaaagagaggcttctgctggtgcgtggacaagtacggccagcccctgcccggctacaccaccaagggcaaggaggacgtgcactgctacagcatgcagagcaagtag

SEQ ID NO: 13286 - DNA, 807 bp, Artificial Sequence
  derived and/or modified sequence
atgcagagagccagacccaccctgtgggccgccgccctgaccctgctggtgctgctgagaggcccccccgtggccagagccggcgccagcagcgccggcctgggccccgtggtgagaagagagcccggctgcggctgctgcctgacctgcgccctgagcgagggccagccctgcggcatctacaccgagagatgcggcagcggcctgagatgccagcccagccccgacgaggccagacccctgcaggccctgctggacggcagaggcctgtgcgtgaacgccagcgccgtgagcagactgagagcctacctgctgcccgccccccccgcccccggcaacgccagcgagagcgaggaggacagaagcgccggcagcgtggagagccccagcgtgagcagcacccacagagtgagcgaccccaagttccaccccctgcacagcaagatcatcatcatcaagaagggccacgccaaggacagccagagatacaaggtggactacgagagccagagcaccgacacccagaacttcagcagcgagagcaagagagagaccgagtacggcccctgcagaagagagatggaggacaccctgaaccacctgaagttcctgaacgtgctgagccccagaggcgtgcacatccccaactgcgacaagaagggcttctacaagaagaagcagtgcagacccagcaagggcagaaagagaggcttctgctggtgcgtggacaagtacggccagcccctgcccggctacaccaccaagggcaaggaggacgtgcactgctacagcatgcagagcaagtag

SEQ ID NO: 13287 - DNA, 876 bp, Artificial Sequence
  derived and/or modified sequence
atgcagagagctcgtcccactctgtgggctgctgcccttacgttgttggtcctgctaaggggaccccccgttgcaagagctggcgcgagcagcgccggcctcggaccagtcgtcagatgtgaaccttgcgacgcacgggccctggcccagtgtgctccaccgcctgccgtgtgcgcagaactggtcagggagcccggttgtggctgttgtcttacttgcgctctgtccgaagggcagccctgtggcatttacacagagagatgtggtagtggcctgagatgccagccctccccagatgaggctcgccctctgcaagcccttttggatgggcgtggactgtgcgtcaatgcctctgccgtgtcgagactgagagcatatctgctgcctgctccccccgcgccagggaatgccagcgaatccgaagaggataggtccgcgggttctgtggaatcaccttcggtgtcttctacccaccgggtgtccgaccccaagttccaccctcttcattccaagataattatcattaagaagggccacgccaaggacagtcaaagatataaggtggactacgagtcccagtcgacagatacacagaacttctcttctgagagcaagcgcgagactgagtatggaccatgcagaagagagatggaggataccctgaaccatctgaaatttctgaacgtgttgtcccctcgaggagtacatattccaaactgcgacaagaagggcttctataagaagaagcagtgtcggccaagcaaaggccgaaagcggggattttgctggtgcgttgacaaatatgggcaacccctccctggatacaccaccaaaggaaaggaggacgttcactgctatagcatgcagtctaaatag

SEQ ID NO: 13288 - DNA, 585 bp, Artificial Sequence
  derived and/or modified sequence
atgcagcgcgccagacccttgcaggcactattggatggaagaggactttgcgtcaatgctagtgctgtgagtagactgcgggcctacttactgccggccccccccgcgcccggtaatgctagtgaatctgaggaagaccgcagtgcgggctccgtagagagtccttccgtaagttctacacaccgggtgtcagatcccaagtttcatcctctgcacagtaaaattatcattattaagaaaggccacgcgaaagactcccagagatataaagtcgattacgagtcccagagcactgatacccagaactttagctctgagtccaaacgagagaccgagtatggcccatgcaggcgggagatggaggacactctgaatcatctgaaattcctaaatgtgctgtcaccgcgcggcgtgcacatacctaactgtgataaaaaaggattctacaagaagaagcagtgtagaccttccaaaggccgaaagaggggattctgctggtgtgtagataagtatggccagccgctgcctggatatacaactaaaggaaaagaggacgtgcattgttactcaatgcagagcaagtag

SEQ ID NO: 13289 - DNA, 462 bp, Artificial Sequence
  derived and/or modified sequence
taaagcgaggaggatagatctgcaggaagcgttgagagtccttctgtgtcctcaacgcacagagtgagcgacccaaagtttcaccccttgcactccaagattattattattaagaaagggcatgctaaagactcacaacgttataaggttgactacgaatcccagtcaactgacactcagaatttttcaagcgagtcaaaacgtgagaccgaatatggcccttgcaggcgtgaaatggaagacacacttaatcacctgaaatttttaaacgtcttgagtcccagaggagtgcatatccccaactgcgataagaagggcttctataagaagaagcagtgtcgtcccagtaagggcagaaagcggggattctgctggtgcgttgataagtacggacagccgttacccgggtacactaccaagggaaaagaggatgtccattgctactccatgcagtccaaatag

SEQ ID NO: 13290 - DNA, 432 bp, Artificial Sequence
  derived and/or modified sequence
tgagagtcccctagcgtgtcctccactcaccgggtgtcagaccccaagttccatcctttgcactccaaaattataatcataaagaaaggacatgccaaagatagccagagatataaagtggattatgagtctcagtcgaccgacacacaaaatttttctagcgaaagtaagagggagactgaatatggaccatgtaggagagaaatggaagatacactgaaccacctcaagttcctgaatgtgctctcacccaggggggtccacattccaaactgcgacaagaagggcttctataaaaagaaacagtgcaggccgtccaaaggcaggaagagagggttttgttggtgtgtggataagtatggccagcctctgccggggtacaccactaagggcaaagaggatgtgcattgctatagtatgcaatccaaatag

SEQ ID NO: 13291 - DNA, 792 bp, Artificial Sequence
  derived and/or modified sequence
atgcagagggcacgtcccaccctctgggcagcctgtgagccatgtgacgcacgggcacttgcacagtgcgcaccgcccccggccgtttgcgccgaacttgtgagagaaccgggatgtggctgctgcctgacctgcgccctgtccgaaggacagccatgcgggatctatacggaacgttgtgggtcaggacttcggtgtcagccgtctcccgacgaagccagaccgctacaagcattattggatggaagggggttgtgcgtgaacgcctccgcagtgtctcgcttaagggcatacttgcttcctgccccccccgctccggggaacgccagtgagtccgaagaggacaggtctgccgggtctgtcgaatcaccatctgtgtccagcactcacagggtaagtgatcctaagttccacccccttcactctaagatcattattattaagaagggacacgctaaggattcacagaggtacaaggtagattatgagagccaaagtacggatacacagaacttctcctcggagagtaagcgtgagacggagtacggtccctgtcgccgggaaatggaggacaccttaaatcatctcaaattccttaatgtcctgtctcccagaggagtgcatatccccaactgcgataagaagggcttttataaaaagaaacaatgccgtccaagcaaaggacgtaagcgaggcttttgctggtgtgtggacaaatacggccagcctctccccgggtacaccacaaaaggtaaggaagatgttcattgctatagcatgcagagcaaatag

SEQ ID NO: 13292 - DNA, 834 bp, Artificial Sequence
  derived and/or modified sequence
atgagagccctgcgacttggggcggaagatcaacctctcccagcttggattccccagctgcgtgccgtctattgccgtcctatccccgccaggcctgcatgtcaggccgcgtgtcctggctgtagacggcatgccgccggggccacccatgccctgggccggtgcgccgacagcgccggggctgcgccgagggctgccggcggggccggttggagggagctggggggactcggcagccgaggtgctctgcgggccgtacgccatcttcaccgggcacttctggacgggcgaggcctctgtgtgaatgcctcagccgtgtcacgcctccgcgcctacctgctgccagctcccccggcgcccgggaacgcatcagagagtgaagaggatcgtagcgctggttctgtggaaagtccctctgtctcatccacccatcgagtttctgacccaaagtttcatcctctacatagtaagataatcatcatcaagaaaggccacgccaaagactcacagcgctataaagtcgattacgagagtcagtctactgatacacagaactttagctcagagagtaagcgggagacagaatatggaccctgccggagagagatggaagatacattaaaccatctgaaatttcttaatgtcctatctcctcgaggggtccacattcctaactgtgataagaaaggattttacaagaagaagcagtgtaggccttcgaaagggcgcaagcgcggtttctgttggtgcgttgataagtacggacagcccctgcctgggtacacgacaaagggtaaagaggatgtacattgttattcaatgcagagcaagtag

SEQ ID NO: 13293 - DNA, 570 bp, Artificial Sequence
  derived and/or modified sequence
atgcaacgcgcccgccccactctgtgggccgctgcattgacattattagacggcagaggcctgtgcgcctaccttctgcctgcaccacccgcccccgggaatgccagcgaatccgaggaagatcgatcagcagggagcgtggagtctcccagtgtctcctccacccatagggtgtccgaccccaagttccatccattgcattcaaagatcattattattaagaagggacacgccaaggattcacagaggtataaggtcgattacgaatcacaatccacggatacccagaacttcagtagcgaaagcaaacgggaaactgaatacggaccttgtcggcgggagatggaggataccctgaatcacctcaaattcctaaacgtactaagtcccaggggagtccacatccctaactgcgacaaaaagggattttacaaaaagaagcagtgccgaccttccaaaggaaggaagagaggcttttgttggtgtgttgacaagtacgggcaaccgctgcctggttataccacgaaggggaaagaggatgtacactgttacagcatgcagtcaaagtag

SEQ ID NO: 13294 - DNA, 807 bp, Artificial Sequence
  derived and/or modified sequence
atgcagcgcgcaagaccaaccctttgggcggccgccctgactctcctcgtgctgctcagaggacctcctgttgctcgggcaggggcttcatcagccggactgggtcccgtagtgcgtcgcgaacccgggtgcggatgctgcctgacatgcgccttgagcgaaggacagccctgcgggatctataccgaacgctgtggtagcggtctgagatgccagccttcacctgacgaagcccggcccctccaggccctgcttgacgggaggggactgtgtgtgaacgcctcggctgtttctcgcctgcgcgcttacctcctgccggctcccccggcgcctggaaacgctagcgagtcagaggaggacagatccgccggctccgtggaatctccttccgtcagcagcacccatcgggtatccgatcctaagttccacccccttcactccaagattatcattattaaaaaggggcacgccaaggactcacagagatataaggtggactatgaatcccaatctaccgacacacagaatttctcttccgagagtaaaagggagactgagtatggcccctgccgtagagagatggaggacacactgaatcacctcaagttcctcaacgtcctcagcccacggggagtgcatatcccgaactgcgacaaaaaaggtttctacaagaagaagcagtgcagaccaagcaagggcagaaagcgcgggttttgctggtgcgtagataaatacggacagcctctcccgggatatacaaccaaagggaaggaagacgtgcactgctactccatgcagagtaaatag

SEQ ID NO: 13295 - DNA, 876 bp, Artificial Sequence
  derived and/or modified sequence
atgcagagggcccggcccaccctgtgggccgccgccctgaccctgctggtgctgctgcggggcccccctgtggcccgggccggggccagcagcgctggcctgggccctgtggtgcgctgtgagccctgtgatgcccgggccctggcccagtgtgcccctcctcctgctgtgtgtgccgagctggtgcgggagcccggctgcggctgctgcctgacctgtgccctgtctgagggccagccctgtggcatctacacagagcgctgtggcagcggcctgcgctgccagcccagcccagatgaggcccggcccctgcaggccctgctggatggccggggcctgtgtgtgaatgccagcgctgtgtcccggctgcgggcctacctgctgcctgcccccccagcccctggaaatgccagcgagagcgaggaggacagatctgctggctctgtggagagccccagcgtgagcagcacccaccgggtgtctgaccccaagttccaccccctgcacagcaagatcatcatcatcaagaagggccacgccaaggacagccagcgctacaaggtggactatgagagccagagcacagacacccagaacttcagcagcgagagcaagcgggagacagaatatggcccctgccggcgggagatggaggacaccctgaaccacctgaagttcctgaatgtgctgagcccccggggcgtgcacatccccaactgtgacaagaagggcttctacaagaagaagcagtgccggcccagcaaaggaaggaagaggggcttctgctggtgtgtggacaagtatggccagcccctgcccggctacaccaccaagggcaaggaggatgtgcactgctacagcatgcagagcaagtag

SEQ ID NO: 13296 - DNA, 585 bp, Artificial Sequence
  derived and/or modified sequence
atgcagagggcccggcccctgcaggccctgctggatggccggggcctgtgtgtgaatgccagcgctgtgtcccggctgcgggcctacctgctgcctgcccccccagcccctggaaatgccagcgagagtgaagaagatagatctgctggctctgtggagagccccagcgtgagcagcacccaccgggtgtctgaccccaagttccaccccctgcacagcaagatcatcatcatcaagaagggccacgccaaggacagccagcgctacaaggtggactatgagagccagagcacagacacccagaacttcagcagcgagagcaagcgggagacagaatatggcccctgcagaagagagatggaggacaccctgaaccacctgaagttcctgaatgtgctgagcccccggggcgtgcacatccccaactgtgacaagaagggcttctacaagaagaagcagtgccggcccagcaagggcaggaagaggggcttctgctggtgtgtggacaagtatggccagcccctgcccggctacaccaccaagggcaaggaggatgtgcactgctacagcatgcagagcaagtag

SEQ ID NO: 13297 - DNA, 462 bp, Artificial Sequence
  derived and/or modified sequence
tgaagtgaggaggacagatctgctggctctgtggagagccccagcgtgagcagcacccaccgggtgtctgaccccaagttccaccccctgcacagcaagatcatcatcatcaagaagggccacgccaaggacagccagcgctacaaggtggactatgagagccagagcacagacacccagaacttcagcagcgagagcaagcgggagacagaatatggcccctgccggcgggagatggaggacaccctgaaccacctgaagttcctgaatgtgctgagcccccggggcgtgcacatccccaactgtgacaagaagggcttctacaagaagaagcagtgccggcccagcaaaggaaggaagaggggcttctgctggtgtgtggacaagtatggccagcccctgcccggctacaccaccaagggcaaggaggatgtgcactgctacagcatgcagagcaagtag

SEQ ID NO: 13298 - DNA, 432 bp, Artificial Sequence
  derived and/or modified sequence
tgagaaagccccagcgtgagcagcacccaccgggtgtctgaccccaagttccaccccctgcacagcaagatcatcatcatcaagaagggccacgccaaggacagccagcgctacaaggtggactatgagagccagagcacagacacccagaacttcagcagcgagagcaagcgggagacagaatatggcccctgccggcgggagatggaggacaccctgaaccacctgaagttcctgaatgtgctgagcccccggggcgtgcacatccccaactgtgacaagaagggcttctacaagaagaagcagtgccggcccagcaaaggaaggaagaggggcttctgctggtgtgtggacaagtatggccagcccctgcccggctacaccaccaagggcaaggaggatgtgcactgctacagcatgcagagcaagtag

SEQ ID NO: 13299 - DNA, 792 bp, Artificial Sequence
  derived and/or modified sequence
atgcagagggcccggcccaccctgtgggccgcctgtgagccctgtgatgcccgggccctggcccagtgtgcccctcctcctgctgtgtgtgccgagctggtgcgggagcccggctgcggctgctgcctgacctgtgccctgtctgagggccagccctgtggcatctacacagagcgctgtggcagcggcctgcgctgccagcccagcccagatgaggcccggcccctgcaggccctgctggatggccggggcctgtgtgtgaatgccagcgctgtgtcccggctgcgggcctacctgctgcctgcccccccagcccctggaaatgccagcgagagcgaggaggacagatctgctggctctgtggagagccccagcgtgagcagcacccaccgggtgtctgaccccaagttccaccccctgcacagcaagatcatcatcatcaagaagggccacgccaaggacagccagcgctacaaggtggactatgagagccagagcacagacacccagaacttcagcagcgagagcaagcgggagacagaatatggcccctgccggcgggagatggaggacaccctgaaccacctgaagttcctgaatgtgctgagcccccggggcgtgcacatccccaactgtgacaagaagggcttctacaagaagaagcagtgccggcccagcaaaggaaggaagaggggcttctgctggtgtgtggacaagtatggccagcccctgcccggctacaccaccaagggcaaggaggatgtgcactgctacagcatgcagagcaagtag

SEQ ID NO: 13300 - DNA, 834 bp, Artificial Sequence
  derived and/or modified sequence
atgagggccctgcggctgggcgctgaggaccagcccctgcctgcctggatcccccagctgcgggctgtgtactgccggcccatcccagcccggcctgcctgccaggccgcctgccccggctgcagaagacatgctgctggggccacccacgccctgggccgctgtgccgacagcgctggagctgcccccagggctgctgggggcgccggctggagggagctgggcggcctgggcagcagaggagccctgcgggctgtgcgccacctgcaccgggccctgctggatggccggggcctgtgtgtgaatgccagcgctgtgtcccggctgcgggcctacctgctgcctgcccccccagcccctggaaatgccagcgagagcgaggaggacagatctgctggctctgtggagagccccagcgtgagcagcacccaccgggtgtctgaccccaagttccaccccctgcacagcaagatcatcatcatcaagaagggccacgccaaggacagccagcgctacaaggtggactatgagagccagagcacagacacccagaacttcagcagcgagagcaagcgggagacagaatatggcccctgccggcgggagatggaggacaccctgaaccacctgaagttcctgaatgtgctgagcccccggggcgtgcacatccccaactgtgacaagaagggcttctacaagaagaagcagtgccggcccagcaaaggaaggaagaggggcttctgctggtgtgtggacaagtatggccagcccctgcccggctacaccaccaagggcaaggaggatgtgcactgctacagcatgcagagcaagtag

SEQ ID NO: 13301 - DNA, 570 bp, Artificial Sequence
  derived and/or modified sequence
atgcagagggcccggcccaccctgtgggccgccgccctgaccctgctggatggccggggcctgtgtgcctacctgctgcctgcccccccagcccctggaaatgccagcgagagcgaggaggacagatctgctggctctgtggagagccccagcgtgagcagcacccaccgggtgtctgaccccaagttccaccccctgcacagcaagatcatcatcatcaagaagggccacgccaaggacagccagcgctacaaggtggactatgagagccagagcacagacacccagaacttcagcagcgagagcaagcgggagacagaatatggcccctgccggcgggagatggaggacaccctgaaccacctgaagttcctgaatgtgctgagcccccggggcgtgcacatccccaactgtgacaagaagggcttctacaagaagaagcagtgccggcccagcaaaggaaggaagaggggcttctgctggtgtgtggacaagtatggccagcccctgcccggctacaccaccaagggcaaggaggatgtgcactgctacagcatgcagagcaagtag

SEQ ID NO: 13302 - DNA, 807 bp, Artificial Sequence
  derived and/or modified sequence
atgcagagggcccggcccaccctgtgggccgccgccctgaccctgctggtgctgctgcggggcccccctgtggcccgggccggggccagcagcgctggcctgggccctgtggtgagaagagagcccggctgcggctgctgcctgacctgtgccctgtctgagggccagccctgtggcatctacacagagcgctgtggcagcggcctgcgctgccagcccagcccagatgaggcccggcccctgcaggccctgctggatggccggggcctgtgtgtgaatgccagcgctgtgtcccggctgcgggcctacctgctgcctgcccccccagcccctggaaatgccagcgagagtgaagaagatagatctgctggctctgtggagagccccagcgtgagcagcacccaccgggtgtctgaccccaagttccaccccctgcacagcaagatcatcatcatcaagaagggccacgccaaggacagccagcgctacaaggtggactatgagagccagagcacagacacccagaacttcagcagcgagagcaagcgggagacagaatatggcccctgcagaagagagatggaggacaccctgaaccacctgaagttcctgaatgtgctgagcccccggggcgtgcacatccccaactgtgacaagaagggcttctacaagaagaagcagtgccggcccagcaagggcaggaagaggggcttctgctggtgtgtggacaagtatggccagcccctgcccggctacaccaccaagggcaaggaggatgtgcactgctacagcatgcagagcaagtag

SEQ ID NO: 13303 - DNA, 2508 bp, Artificial Sequence
  derived and/or modified sequence
ccagatgcgagcactgcggctgggcgctgaggatcagccgcttcctgcctggattccacagcttcgcgccgtgtactgtcgccccatccctgcgcgcccagcctgccaagcagcgtgccccggttgcaggcgtcatgcagcgggcgcgacccacgctctgggccgctgcgctgactctgctggtgctgctccgcgggccgccggtggcgcgggctggcgcgagctcggcgggcttgggtcccgtggtgcgctgcgagccgtgcgacgcgcgtgcactggcccagtgcgcgcctccgcccgccgtgtgcgcggagctggtgcgcgagccgggctgcggctgctgcctgacgtgcgcactgagcgagggccagccgtgcggcatctacaccgagcgctgtggctccggccttcgctgccagccgtcgcccgacgaggcgcgaccgctgcaggcgctgctggacggccgcgggctctgcgtcaacgctagtgccgtcagccgcctgcgcgcctacctgctgccagcgccgccagctccaggaaatgctagtgagtcggaggaagaccgcagcgccggcagtgtggagagcccgtccgtctccagcacgcaccgggtgtctgatcccaagttccaccccctccattcaaagataatcatcatcaagaaagggcatgctaaagacagccagcgctacaaagttgactacgagtctcagagcacagatacccagaacttctcctccgagtccaagcgggagacagaatatggtccctgccgtagagaaatggaagacacactgaatcacctgaagttcctcaatgtgctgagtcccaggggtgtacacattcccaactgtgacaagaagggattttataagaaaaagcagtgtcgcccttccaaaggcaggaagcggggcttctgctggtgtgtggataagtatgggcagcctctcccaggctacaccaccaaggggaaggaggacgtgcactgctacagcatgcagagcaagtagacgcctgccgcaaggttaatgtggagctcaaatatgccttattttgcacaaaagactgccaaggacatgaccagcagctggctacagcctcgatttatatttctgtttgtggtgaactgattttttttaaaccaaagtttagaaagaggtttttgaaatgcctatggtttctttgaatggtaaacttgagcatcttttcactttccagtagtcagcaaagagcagtttgaattttcttgtcgcttcctatcaaaatattcagagactcgagcacagcacccagacttcatgcgcccgtggaatgctcaccacatgttggtcgaagcggccgaccactgactttgtgacttaggcggctgtgttgcctatgtagagaacacgcttcacccccactccccgtacagtgcgcacaggctttatcgagaataggaaaacctttaaaccccggtcatccggacatcccaacgcatgctcctggagctcacagccttctgtggtgtcatttctgaaacaagggcgtggatccctcaaccaagaagaatgtttatgtcttcaagtgacctgtactgcttggggactattggagaaaataaggtggagtcctacttgtttaaaaaatatgtatctaagaatgttctagggcactctgggaacctataaaggcaggtatttcgggccctcctcttcaggaatcttcctgaagacatggcccagtcgaaggcccaggatggcttttgctgcggccccgtggggtaggagggacagagagacagggagagtcagcctccacattcagaggcatcacaagtaatggcacaattcttcggatgactgcagaaaatagtgttttgtagttcaacaactcaagacgaagcttatttctgaggataagctctttaaaggcaaagctttattttcatctctcatcttttgtcctccttagcacaatgtaaaaaagaatagtaatatcagaacaggaaggaggaatggcttgctggggagcccatccaggacactgggagcacatagagattcacccatgtttgttgaacttagagtcattctcatgcttttctttataattcacacatatatgcagagaagatatgttcttgttaacattgtatacaacatagccccaaatatagtaagatctatactagataatcctagatgaaatgttagagatgctatatgatacaactgtggccatgactgaggaaaggagctcacgcccagagactgggctgctctcccggaggccaaacccaagaaggtctggcaaagtcaggctcagggagactctgccctgctgcagacctcggtgtggacacacgctgcatagagctctccttgaaaacagaggggtctcaagacattctgcctacctattagcttttctttatttttttaactttttggggggaaaagtatttttgagaagtttgtcttgcaatgtatttataaatagtaaataaagtttttaccattaaaaaaa

SEQ ID NO: 13304 - DNA, 2208 bp, Artificial Sequence
  derived and/or modified sequence
agatgcgagcactgcggctgggcgctgaggatcagccgcttcctgcctggattccacagcttcgcgccgtgtactgtcgccccatccctgcgcgcccagcctgccaagcagcgtgccccggttgcaggcgtcatgcagcgggcgcgaccgctgcaggcgctgctggacggccgcgggctctgcgtcaacgctagtgccgtcagccgcctgcgcgcctacctgctgccagcgccgccagctccaggaaatgctagtgagtcggaggaagaccgcagcgccggcagtgtggagagcccgtccgtctccagcacgcaccgggtgtctgatcccaagttccaccccctccattcaaagataatcatcatcaagaaagggcatgctaaagacagccagcgctacaaagttgactacgagtctcagagcacagatacccagaacttctcctccgagtccaagcgggagacagaatatggtccctgccgtagagaaatggaagacacactgaatcacctgaagttcctcaatgtgctgagtcccaggggtgtacacattcccaactgtgacaagaagggattttataagaaaaagcagtgtcgcccttccaaaggcaggaagcggggcttctgctggtgtgtggataagtatgggcagcctctcccaggctacaccaccaaggggaaggaggacgtgcactgctacagcatgcagagcaagtagacgcctgccgcaaggttaatgtggagctcaaatatgccttattttgcacaaaagactgccaaggacatgaccagcagctggctacagcctcgatttatatttctgtttgtggtgaactgattttttttaaaccaaagtttagaaagaggtttttgaaatgcctatggtttctttgaatggtaaacttgagcatcttttcactttccagtagtcagcaaagagcagtttgaattttcttgtcgcttcctatcaaaatattcagagactcgagcacagcacccagacttcatgcgcccgtggaatgctcaccacatgttggtcgaagcggccgaccactgactttgtgacttaggcggctgtgttgcctatgtagagaacacgcttcacccccactccccgtacagtgcgcacaggctttatcgagaataggaaaacctttaaaccccggtcatccggacatcccaacgcatgctcctggagctcacagccttctgtggtgtcatttctgaaacaagggcgtggatccctcaaccaagaagaatgtttatgtcttcaagtgacctgtactgcttggggactattggagaaaataaggtggagtcctacttgtttaaaaaatatgtatctaagaatgttctagggcactctgggaacctataaaggcaggtatttcgggccctcctcttcaggaatcttcctgaagacatggcccagtcgaaggcccaggatggcttttgctgcggccccgtggggtaggagggacagagagacagggagagtcagcctccacattcagaggcatcacaagtaatggcacaattcttcggatgactgcagaaaatagtgttttgtagttcaacaactcaagacgaagcttatttctgaggataagctctttaaaggcaaagctttattttcatctctcatcttttgtcctccttagcacaatgtaaaaaagaatagtaatatcagaacaggaaggaggaatggcttgctggggagcccatccaggacactgggagcacatagagattcacccatgtttgttgaacttagagtcattctcatgcttttctttataattcacacatatatgcagagaagatatgttcttgttaacattgtatacaacatagccccaaatatagtaagatctatactagataatcctagatgaaatgttagagatgctatatgatacaactgtggccatgactgaggaaaggagctcacgcccagagactgggctgctctcccggaggccaaacccaagaaggtctggcaaagtcaggctcagggagactctgccctgctgcagacctcggtgtggacacacgctgcatagagctctccttgaaaacagaggggtctcaagacattctgcctacctattagcttttctttatttttttaactttttggggggaaaagtatttttgagaagtttgtcttgcaatgtatttataaatagtaaataaagtttttaccatt

SEQ ID NO: 13305 - DNA, 810 bp, Artificial Sequence
  derived and/or modified sequence
gtcggaggaagaccgcagcgccggcagtgtggagagcccgtccgtctccagcacgcaccgggtgtctgatcccaagttccaccccctccattcaaagataatcatcatcaagaaagggcatgctaaagacagccagcgctacaaagttgactacgagtctcagagcacagatacccagaacttctcctccgagtccaagcgggagacagaatatggtccctgccgtagagaaatggaagacacactgaatcacctgaagttcctcaatgtgctgagtcccaggggtgtacacattcccaactgtgacaagaagggattttataagaaaaagcagtgtcgcccttccaaaggcaggaagcggggcttctgctggtgtgtggataagtatgggcagcctctcccaggctacaccaccaaggggaaggaggacgtgcactgctacagcatgcagagcaagtagacgcctgccgcaagggtgagtactcaggaggggcagcctggggctccagggcctcactgtccttggaccagcctcaggggctgggcgtggccactggcccttccccaggcttacagacccaggagctgcagctcagggccagaaagagcaaagcaaataggacagagccctcagaagggtgcagggagagggagaccccatcaacccaaccaaacaagtgtggggaaggaggccggccagtgcacctcagggacactctgctttatctcagatacctcacagcacctaagctatcattcatccacacacaaagtgaagattttcaaagttaggctttacccgtgaggtct

SEQ ID NO: 13306 - DNA, 894 bp, Artificial Sequence
  derived and/or modified sequence
tggagagcccgtccgtctccagcacgcaccgggtgtctgatcccaagttccaccccctccattcaaagataatcatcatcaagaaagggcatgctaaagacagccagcgctacaaagttgactacgagtctcagagcacagatacccagaacttctcctccgagtccaagcgggagacagaatatggtccctgccgtagagaaatggaagacacactgaatcacctgaagttcctcaatgtgctgagtcccaggggtgtacacattcccaactgtgacaagaagggattttataagaaaaagcagtgtcgcccttccaaaggcaggaagcggggcttctgctggtgtgtggataagtatgggcagcctctcccaggctacaccaccaaggggaaggaggacgtgcactgctacagcatgcagagcaagtagacgcctgccgcaaggatacctcacagcacctaagctatcattcatccacacacaaagtgaagattttcaaagttaggctttacccgtgaggtctggaggtccatttatcttcacagagaaaccgttttaatccgcaagaacctgctaaagatacatgtttctaaattaaagatgtgaatgtgagacagctgaaatagctcagttgggagagcatcagtttgaagatgcagctttttttttctgtaaaatatataatgaatattctgttagtctgtggctaatataattttaataaagttaatttaaatctgatagaaaaatgaaattttaaacgataattttagagaatgctattatatccagtcttcttttttcttttaataaatgagggaactattgggggaaaggaataaatacattttctttcattttattaagacaaatttagtaagcagaagaaatt

SEQ ID NO: 13307 - DNA, 792 bp, Artificial Sequence
  derived and/or modified sequence
atgcagcgggcgcgacccacgctctgggccgcttgcgagccgtgcgacgcgcgtgcactggcccagtgcgcgcctccgcccgccgtgtgcgcggagctggtgcgcgagccgggctgcggctgctgcctgacgtgcgcactgagcgagggccagccgtgcggcatctacaccgagcgctgtggctccggccttcgctgccagccgtcgcccgacgaggcgcgaccgctgcaggcgctgctggacggccgcgggctctgcgtcaacgctagtgccgtcagccgcctgcgcgcctacctgctgccagcgccgccagctccaggaaatgctagtgagtcggaggaagaccgcagcgccggcagtgtggagagcccgtccgtctccagcacgcaccgggtgtctgatcccaagttccaccccctccattcaaagataatcatcatcaagaaagggcatgctaaagacagccagcgctacaaagttgactacgagtctcagagcacagatacccagaacttctcctccgagtccaagcgggagacagaatatggtccctgccgtagagaaatggaagacacactgaatcacctgaagttcctcaatgtgctgagtcccaggggtgtacacattcccaactgtgacaagaagggattttataagaaaaagcagtgtcgcccttccaaaggcaggaagcggggcttctgctggtgtgtggataagtatgggcagcctctcccaggctacaccaccaaggggaaggaggacgtgcactgctacagcatgcagagcaagtag

SEQ ID NO: 13308 - DNA, 2327 bp, Artificial Sequence
  derived and/or modified sequence
agatgcgagcactgcggctgggcgctgaggatcagccgcttcctgcctggattccacagcttcgcgccgtgtactgtcgccccatccctgcgcgcccagcctgccaagcagcgtgccccggttgcaggcgtcatgcagcgggcgcgacccacgctctgggccgctgcgctgactctgctggtgctgctccgcgggccgccggtggcgcgggctggcgcgagctcggcgggcttgggtcccgtggtgcgctgcgagccgtgcggcatctacaccgagcgctgctggacggccgcgggctctgcgtcaacgctagtgccgtcagccgcctgcgcgcctacctgctgccagcgccgccagctccaggaaatgctagtgagtcggaggaagaccgcagcgccggcagtgtggagagcccgtccgtctccagcacgcaccgggtgtctgatcccaagttccaccccctccattcaaagataatcatcatcaagaaagggcatgctaaagacagccagcgctacaaagttgactacgagtctcagagcacagatacccagaacttctcctccgagtccaagcgggagacagaatatggtccctgccgtagagaaatggaagacacactgaatcacctgaagttcctcaatgtgctgagtcccaggggtgtacacattcccaactgtgacaagaagggattttataagaaaaagcagtgtcgcccttccaaaggcaggaagcggggcttctgctggtgtgtggataagtatgggcagcctctcccaggctacaccaccaaggggaaggaggacgtgcactgctacagcatgcagagcaagtagacgcctgccgcaaggttaatgtggagctcaaatatgccttattttgcacaaaagactgccaaggacatgaccagcagctggctacagcctcgatttatatttctgtttgtggtgaactgattttttttaaaccaaagtttagaaagaggtttttgaaatgcctatggtttctttgaatggtaaacttgagcatcttttcactttccagtagtcagcaaagagcagtttgaattttcttgtcgcttcctatcaaaatattcagagactcgagcacagcacccagacttcatgcgcccgtggaatgctcaccacatgttggtcgaagcggccgaccactgactttgtgacttaggcggctgtgttgcctatgtagagaacacgcttcacccccactccccgtacagtgcgcacaggctttatcgagaataggaaaacctttaaaccccggtcatccggacatcccaacgcatgctcctggagctcacagccttctgtggtgtcatttctgaaacaagggcgtggatccctcaaccaagaagaatgtttatgtcttcaagtgacctgtactgcttggggactattggagaaaataaggtggagtcctacttgtttaaaaaatatgtatctaagaatgttctagggcactctgggaacctataaaggcaggtatttcgggccctcctcttcaggaatcttcctgaagacatggcccagtcgaaggcccaggatggcttttgctgcggccccgtggggtaggagggacagagagacagggagagtcagcctccacattcagaggcatcacaagtaatggcacaattcttcggatgactgcagaaaatagtgttttgtagttcaacaactcaagacgaagcttatttctgaggataagctctttaaaggcaaagctttattttcatctctcatcttttgtcctccttagcacaatgtaaaaaagaatagtaatatcagaacaggaaggaggaatggcttgctggggagcccatccaggacactgggagcacatagagattcacccatgtttgttgaacttagagtcattctcatgcttttctttataattcacacatatatgcagagaagatatgttcttgttaacattgtatacaacatagccccaaatatagtaagatctatactagataatcctagatgaaatgttagagatgctatatgatacaactgtggccatgactgaggaaaggagctcacgcccagagactgggctgctctcccggaggccaaacccaagaaggtctggcaaagtcaggctcagggagactctgccctgctgcagacctcggtgtggacacacgctgcatagagctctccttgaaaacagaggggtctcaagacattctgcctacctattagcttttctttatttttttaactttttggggggaaaagtatttttgagaagtttgtcttgcaatgtatttataaatagtaaataaagtttttaccatt

SEQ ID NO: 13309 - DNA, 2193 bp, Artificial Sequence
  derived and/or modified sequence
agatgcgagcactgcggctgggcgctgaggatcagccgcttcctgcctggattccacagcttcgcgccgtgtactgtcgccccatccctgcgcgcccagcctgccaagcagcgtgccccggttgcaggcgtcatgcagcgggcgcgacccacgctctgggccgctgcgctgactctgctggacggccgcgggctctgcgcctacctgctgccagcgccgccagctccaggaaatgctagtgagtcggaggaagaccgcagcgccggcagtgtggagagcccgtccgtctccagcacgcaccgggtgtctgatcccaagttccaccccctccattcaaagataatcatcatcaagaaagggcatgctaaagacagccagcgctacaaagttgactacgagtctcagagcacagatacccagaacttctcctccgagtccaagcgggagacagaatatggtccctgccgtagagaaatggaagacacactgaatcacctgaagttcctcaatgtgctgagtcccaggggtgtacacattcccaactgtgacaagaagggattttataagaaaaagcagtgtcgcccttccaaaggcaggaagcggggcttctgctggtgtgtggataagtatgggcagcctctcccaggctacaccaccaaggggaaggaggacgtgcactgctacagcatgcagagcaagtagacgcctgccgcaaggttaatgtggagctcaaatatgccttattttgcacaaaagactgccaaggacatgaccagcagctggctacagcctcgatttatatttctgtttgtggtgaactgattttttttaaaccaaagtttagaaagaggtttttgaaatgcctatggtttctttgaatggtaaacttgagcatcttttcactttccagtagtcagcaaagagcagtttgaattttcttgtcgcttcctatcaaaatattcagagactcgagcacagcacccagacttcatgcgcccgtggaatgctcaccacatgttggtcgaagcggccgaccactgactttgtgacttaggcggctgtgttgcctatgtagagaacacgcttcacccccactccccgtacagtgcgcacaggctttatcgagaataggaaaacctttaaaccccggtcatccggacatcccaacgcatgctcctggagctcacagccttctgtggtgtcatttctgaaacaagggcgtggatccctcaaccaagaagaatgtttatgtcttcaagtgacctgtactgcttggggactattggagaaaataaggtggagtcctacttgtttaaaaaatatgtatctaagaatgttctagggcactctgggaacctataaaggcaggtatttcgggccctcctcttcaggaatcttcctgaagacatggcccagtcgaaggcccaggatggcttttgctgcggccccgtggggtaggagggacagagagacagggagagtcagcctccacattcagaggcatcacaagtaatggcacaattcttcggatgactgcagaaaatagtgttttgtagttcaacaactcaagacgaagcttatttctgaggataagctctttaaaggcaaagctttattttcatctctcatcttttgtcctccttagcacaatgtaaaaaagaatagtaatatcagaacaggaaggaggaatggcttgctggggagcccatccaggacactgggagcacatagagattcacccatgtttgttgaacttagagtcattctcatgcttttctttataattcacacatatatgcagagaagatatgttcttgttaacattgtatacaacatagccccaaatatagtaagatctatactagataatcctagatgaaatgttagagatgctatatgatacaactgtggccatgactgaggaaaggagctcacgcccagagactgggctgctctcccggaggccaaacccaagaaggtctggcaaagtcaggctcagggagactctgccctgctgcagacctcggtgtggacacacgctgcatagagctctccttgaaaacagaggggtctcaagacattctgcctacctattagcttttctttatttttttaactttttggggggaaaagtatttttgagaagtttgtcttgcaatgtatttataaatagtaaataaagtttttaccatt

SEQ ID NO: 13310 - DNA, 2406 bp, Artificial Sequence
  derived and/or modified sequence
atgcagcgggcgcgacccacgctctgggccgctgcgctgactctgctggtgctgctccgcgggccgccggtggcgcgggctggcgcgagctcggcgggcttgggtcccgtggtgcgccgcgagccgggctgcggctgctgcctgacgtgcgcactgagcgagggccagccgtgcggcatctacaccgagcgctgtggctccggccttcgctgccagccgtcgcccgacgaggcgcgaccgctgcaggcgctgctggacggccgcgggctctgcgtcaacgctagtgccgtcagccgcctgcgcgcctacctgctgccagcgccgccagctccaggaaatgctagtgagtcggaggaagaccgcagcgccggcagtgtggagagcccgtccgtctccagcacgcaccgggtgtctgatcccaagttccaccccctccattcaaagataatcatcatcaagaaagggcatgctaaagacagccagcgctacaaagttgactacgagtctcagagcacagatacccagaacttctcctccgagtccaagcgggagacagaatatggtccctgccgtagagaaatggaagacacactgaatcacctgaagttcctcaatgtgctgagtcccaggggtgtacacattcccaactgtgacaagaagggattttataagaaaaagcagtgtcgcccttccaaaggcaggaagcggggcttctgctggtgtgtggataagtatgggcagcctctcccaggctacaccaccaaggggaaggaggacgtgcactgctacagcatgcagagcaagtagacgcctgccgcaaggttaatgtggagctcaaatatgccttattttgcacaaaagactgccaaggacatgaccagcagctggctacagcctcgatttatatttctgtttgtggtgaactgattttttttaaaccaaagtttagaaagaggtttttgaaatgcctatggtttctttgaatggtaaacttgagcatcttttcactttccagtagtcagcaaagagcagtttgaattttcttgtcgcttcctatcaaaatattcagagactcgagcacagcacccagacttcatgcgcccgtggaatgctcaccacatgttggtcgaagcggccgaccactgactttgtgacttaggcggctgtgttgcctatgtagagaacacgcttcacccccactccccgtacagtgcgcacaggctttatcgagaataggaaaacctttaaaccccggtcatccggacatcccaacgcatgctcctggagctcacagccttctgtggtgtcatttctgaaacaagggcgtggatccctcaaccaagaagaatgtttatgtcttcaagtgacctgtactgcttggggactattggagaaaataaggtggagtcctacttgtttaaaaaatatgtatctaagaatgttctagggcactctgggaacctataaaggcaggtatttcgggccctcctcttcaggaatcttcctgaagacatggcccagtcgaaggcccaggatggcttttgctgcggccccgtggggtaggagggacagagagacagggagagtcagcctccacattcagaggcatcacaagtaatggcacaattcttcggatgactgcagaaaatagtgttttgtagttcaacaactcaagacgaagcttatttctgaggataagctctttaaaggcaaagctttattttcatctctcatcttttgtcctccttagcacaatgtaaaaaagaatagtaatatcagaacaggaaggaggaatggcttgctggggagcccatccaggacactgggagcacatagagattcacccatgtttgttgaacttagagtcattctcatgcttttctttataattcacacatatatgcagagaagatatgttcttgttaacattgtatacaacatagccccaaatatagtaagatctatactagataatcctagatgaaatgttagagatgctatatgatacaactgtggccatgactgaggaaaggagctcacgcccagagactgggctgctctcccggaggccaaacccaagaaggtctggcaaagtcaggctcagggagactctgccctgctgcagacctcggtgtggacacacgctgcatagagctctccttgaaaacagaggggtctcaagacattctgcctacctattagcttttctttatttttttaactttttggggggaaaagtatttttgagaagtttgtcttgcaatgtatttataaatagtaaataaagtttttaccattaaaaaaatatctttccctttgttattgaccatctctgggctttgtatcactaattattttattttattatataataattattttattataataaaatcctgaaagggg

SEQ ID NO: 13311 - DNA, 876 bp, Artificial Sequence
  derived and/or modified sequence
atgcagcgggcccggcccaccctgtgggccgccgccctgaccctgctggttctgctaaggggtccacccgtggcgcgtgctggcgcttcgtccgctggtttgggcccggttgtgcgctgtgaaccatgcgacgcacgggctctggctcaatgcgctccacctcctgcagtgtgcgcggagctcgtgagggagccaggctgtgggtgctgtctgacctgtgctttgagtgagggtcaaccctgcggcatctacaccgaaaggtgcggttccgggctacggtgccagccctcaccagacgaggctcgaccgctgcaggccttgctagatggacgcgggctatgcgtcaatgccagtgccgtgtcacgactgcgggcgtacctgctgcctgctccacccgctccgggtaacgccagcgagagcgaggaagataggtccgccggctcagttgaatctccgtccgtgtcttctacacatagggtgagtgacccaaagttccatccattgcacagcaagattatcataattaagaaggggcatgcgaaggactctcaaaggtacaaggttgattacgagagccagagcacagatacccaaaatttttccagcgagtctaaacgcgagacagagtatggcccctgtcggagggagatggaggacaccctcaatcacctgaagtttctgaatgtgcttagccccaggggcgtgcatattcctaattgtgacaagaaaggcttctacaaaaaaaaacagtgcaggcctagcaagggacgaaaaagaggcttctgttggtgcgtagacaagtatggccagccgttaccaggctacacaacaaaaggcaaggaggacgttcattgttattcaatgcaaagcaaatag

SEQ ID NO: 13312 - DNA, 585 bp, Artificial Sequence
  derived and/or modified sequence
atgcagcgggcccggcccctgcaggccctgctggacggccggggcttatgcgtgaacgctagtgccgtgtcccggctgcgggcctacctgttacccgcaccacctgcgcctggcaacgctagcgaatcagaagaggaccggagtgcaggaagcgttgagtctccgtctgtgagctctacgcaccgtgttagcgaccctaagtttcacccactgcacagtaagatcataatcatcaaaaaagggcacgcaaaagatagccagcgctacaaagtggattacgaatcacagagcaccgatacacagaatttcagttccgaatccaaaagagaaaccgagtatggcccctgtcggagggaaatggaggatactttgaaccatcttaagttccttaacgtgttgagtccgcgcggagtccacatccctaactgcgacaaaaagggtttctacaaaaaaaagcagtgtcgcccaagcaaagggcgtaagcggggtttctgctggtgcgtggataaatatgggcagccactaccgggctacacaactaaaggaaaagaggatgtgcattgctattcaatgcagtctaagtag

SEQ ID NO: 13313 - DNA, 462 bp, Artificial Sequence
  derived and/or modified sequence
tgaagcgaggaggaccggagcgccggcagcgtggagagccccagcgtttcctcgacccatagggtctctgaccccaagttccaccccttgcattctaagatcattatcataaagaaaggccacgcgaaagacagccagagatacaaagttgattacgagtctcagagcactgatactcaaaatttcagcagcgaaagtaaaagggaaacagaatacggaccttgccggcgcgaaatggaagataccctgaatcaccttaagttcttgaacgttctctcccctagaggcgtacacattcccaactgcgataaaaagggattttacaaaaaaaaacaatgtcgaccatccaaggggcggaaaagggggttctgctggtgcgtggacaaatacgggcagcccttacccggctacacaaccaaagggaaggaagacgtccactgctattctatgcagtcaaaatag

SEQ ID NO: 13314 - DNA, 432 bp, Artificial Sequence
  derived and/or modified sequence
tgagagagccccagcgtgagcagcacccaccgggtgagcgaccccaagtttcatccactacatagtaagattatcatcatcaagaaaggccatgccaaggactcccagaggtataaagtcgattacgaatcccaatccactgacactcagaacttttcaagcgaatccaagagagagactgaatatggtccatgtcggagagagatggaagacaccctcaaccatttaaaattcctcaacgtgctatcccccagaggagtgcatattccaaactgtgacaaaaaaggcttttacaagaagaagcagtgccgtccgtctaagggaaggaaacgggggttctgctggtgtgtcgacaagtacgggcagcccctccctgggtatacaacaaaggggaaggaagacgtccattgttactccatgcagtcaaagtag

SEQ ID NO: 13315 - DNA, 792 bp, Artificial Sequence
  derived and/or modified sequence
atgcagcgggcccggcccaccctgtgggccgcctgcgagccctgcgatgcccgggccctcgcacagtgcgccccccctccagctgtctgcgccgaactggtccgggaacccggatgtgggtgttgtctgacatgtgccctgtcggaaggacagccatgtggtatctatacggaaagatgcggcagtggcctcagatgccagcctagccccgacgaggcacgaccactgcaagcactcttggacgggcgcgggctgtgtgtaaatgcctcagctgtctctcgtttacgggcctaccttttaccagctcctcccgcacctggcaacgcctctgagtcagaagaagaccggtcagcaggatcagtggagagcccatccgtttcatctacacaccgagtgagcgaccctaaattccaccctctgcactccaagatcatcatcattaaaaaggggcatgccaaggactcccaaagatacaaggtggactacgaatcacagagcacagatacacagaactttagcagcgagtcgaaacgtgaaacagagtatggtccttgccggagggagatggaagacacccttaaccatttaaaattcctcaatgttttgtccccccgcggtgtgcatatcccaaattgcgataaaaaaggtttttacaaaaagaagcagtgcagaccctcaaaaggacgaaaaaggggcttttgctggtgtgtggacaaatatggccagcccctgccaggctatacaaccaaaggtaaggaggacgtccactgctatagcatgcagagcaaatag

SEQ ID NO: 13316 - DNA, 834 bp, Artificial Sequence
  derived and/or modified sequence
atgcgggccctgcggctgggcgccgaggaccagcccctgcccgcctggatcccccagctgagagctgtgtactgccggcctataccggccaggccggcgtgccaagccgcctgccctggttgccggcgtcatgccgcaggagccacccatgccctaggacgctgcgccgatagcgcaggagcagcccctagagccgctggtggggctggctggagggaactgggcgggctgggttcaaggggcgcattgagggctgtgagacatcttcatcgtgcactactggacggtagggggttgtgcgttaacgcctctgccgtgagccggcttagagcctatttgcttcccgctccacccgctcccgggaacgcttcggaaagcgaggaagatcggagcgcaggcagcgtggagagtccttccgtgtcaagcacacatcgggtttctgatcccaagttccaccccctccacagtaagataattatcatcaaaaagggccacgccaaggacagtcaacggtataaagttgattacgaatctcagagtacagacacacagaattttagctcggagtctaaaagggaaacagaatatggcccctgccgacgagagatggaagatactttgaaccatctgaagtttctgaatgtcctttcaccacgcggcgtgcatatccccaattgtgataagaaaggcttttacaagaagaaacaatgtcggccatccaaaggacgtaagagaggattctgttggtgcgtagacaagtacgggcaacccctgccaggttacacaacgaagggcaaagaggacgtccactgttattctatgcagtcgaagtag

SEQ ID NO: 13317 - DNA, 570 bp, Artificial Sequence
  derived and/or modified sequence
atgcagcgggcccggcccaccctgtgggccgccgccctgaccctgctagatggccggggactgtgcgcttatcttctccccgccccccccgcaccgggcaatgccagcgagtccgaggaagatcggtctgcaggatccgttgaaagcccctcagtatcttccacgcatcgggtttctgatcccaaattccaccctcttcactctaagatcattattatcaaaaaagggcatgctaaggacagccagagatacaaggtggattacgaaagtcaatccactgacacgcagaatttctcatccgagagcaagagggaaacagaatatggtccttgccgacgcgagatggaggataccctcaatcatctgaagtttctaaacgtccttagccctcgtggagtgcacattcccaattgcgacaagaagggattttataagaaaaagcagtgtcgcccttcaaaagggcgtaagcgtgggttctgttggtgtgtggataagtatggccagcctctgccgggctacaccacaaaaggtaaggaagacgttcattgttattctatgcagtcaaagtag

SEQ ID NO: 13318 - DNA, 807 bp, Artificial Sequence
  derived and/or modified sequence
atgcagcgggcccggcccaccctgtgggccgccgccctgaccctgttggtgcttcttagaggtccccctgtcgcccgagccggtgcatcatccgctggcctggggccggtggtgcggcgcgaacctggttgcggctgctgtttgacatgtgcactgagtgaggggcagccctgcggcatttacactgagcgttgtggcagcgggttgcgatgccaaccgtcacccgacgaggcccggcctctccaggccctgctggacgggcggggactctgcgtgaatgcctcagcggtttccagactgagagcatatctcctgcccgccccacccgcaccgggcaacgcgagtgagagcgaggaggatagatcggccggcagtgtagagagcccttccgtatcgtctacccacagagtgagcgaccccaagttccatccgctgcactccaaaattattattattaagaaaggtcatgcaaaggactcacaaagatacaaagtcgactatgagtcccaatctacagacacccagaacttcagcagcgagtctaagcgagagactgagtacggtccttgcaggcgagaaatggaagacactctgaatcacctaaagttcctcaatgttcttagtccacgcggcgtgcacattcctaactgtgataagaagggcttttataagaagaaacaatgcaggccgagcaaggggagaaagagagggttctgttggtgtgtcgataagtatgggcagccactaccaggctatacgacaaaagggaaggaagacgtacattgctactctatgcagtcaaagtag

SEQ ID NO: 13319 - DNA, 876 bp, Artificial Sequence
  derived and/or modified sequence
atgcaacgagccagaccgacattgtgggctgccgctctgacgctgttggtcctgctccgcggaccaccggtggctagggctggcgcatcctcagcgggtttgggtcccgtggtccgctgcgagccctgcgacgcgagggctctagcgcagtgcgctcctcccccagcagtctgcgccgagctggtgagagagcccggttgtggatgctgcttaacttgcgccctgtcagagggacagccatgtggcatttataccgaacggtgtggctctggacttcgctgtcagccgtccccagacgaagccagacctctccaagctcttctggacggtaggggcttgtgcgtgaacgctagcgccgtttcgcgactgcgggcatacctactcccggcaccaccagcaccaggaaatgcctccgaatccgaagaggaccggtctgcgggatccgtggagtctccctcagtcagcagcacccaccgagtctccgaccccaaattccatcctctgcattcaaagatcattattattaagaagggccacgccaaggatagtcagagatataaggtggactacgaatcacagagcacggacactcaaaactttagctcagagtcaaaaagggagacagagtacggtccatgccgaagagaaatggaggacactcttaatcacctaaagtttctgaatgtgctgagccccagaggcgttcacattcccaactgcgacaaaaaaggcttctataagaaaaagcagtgcagacccagcaagggtagaaagcgtggtttctgttggtgcgtggacaagtatggacaacctttaccaggctatacaacaaagggtaaagaagatgtccactgctactctatgcaatccaaatag

SEQ ID NO: 13320 - DNA, 585 bp, Artificial Sequence
  derived and/or modified sequence
atgcaaagggcgcgacccctccaagccctcctggatggacggggactttgtgtgaatgcatcagccgtgagccgattgagagcctacctcctgcctgctccgccagcccctgggaacgcatcagagtccgaagaagacagatccgcagggagtgtagaatctcctagcgtctcaagtactcaccgggtatcagatcccaagttccatcctcttcactctaagatcatcattattaagaagggacacgcgaaagactcacaacgttacaaggtggactatgagtcacaaagtaccgacacccagaacttctcctccgaatccaagcgcgagacagagtacgggccttgccgcagagagatggaagataccttgaaccaccttaaattcctcaatgtgctgtctccaaggggtgttcatattcccaactgcgacaagaaaggattttacaagaagaaacaatgtaggccgagcaaaggtaggaagcggggtttctgttggtgcgtggataagtatggacagcccctccctggttacaccacaaagggtaaagaagacgtgcattgctacagcatgcaatctaagtag

SEQ ID NO: 13321 - DNA, 462 bp, Artificial Sequence
  derived and/or modified sequence
tagagcgaagaagatcgtagcgcgggatctgtcgagagcccctctgtgtcgagcacccatcgggtaagtgatcctaagttccatccccttcattccaaaattatcatcattaagaagggacacgctaaagactcacagcggtataaggtggactacgagtcacagtctaccgatacccagaatttcagctcagaaagtaaaagggaaaccgaatatggaccctgcaggagagagatggaggacaccctcaaccacctgaaattcctgaacgtcctatcccccagaggtgtgcatatccctaactgtgataaaaaaggtttttacaagaaaaagcagtgtcgtccgagtaaaggacggaaaagaggtttttgctggtgcgtagacaagtatggacagcccttgccgggatataccactaagggtaaagaagacgtacactgttatagcatgcagtccaaatag

SEQ ID NO: 13322 - DNA, 432 bp, Artificial Sequence
  derived and/or modified sequence
taggagtcacctagtgtgagcagtactcatcgagtgtcagatcccaagttccaccctctgcactcaaaaatcataattataaagaaggggcatgccaaggattcacaacggtataaagtggattatgaatcccagtctaccgacacacagaacttctccagcgagtccaaaagagagacagaatacggtccctgtcgcagagagatggaggataccttaaatcaccttaaatttctgaacgtgctgtcgcccaggggagttcatatccctaactgcgacaagaaaggcttctacaaaaagaagcaatgtaggccatcaaaggggagaaagcggggattctgttggtgtgtggataagtatggccaaccccttccaggctacacaacaaaaggcaaagaggacgttcactgctactcgatgcagtctaagtag

SEQ ID NO: 13323 - DNA, 792 bp, Artificial Sequence
  derived and/or modified sequence
atgcagcgcgcaagaccaaccctgtgggctgcctgtgagccatgcgacgccagagctctagcccagtgcgcgcctcctcctgccgtgtgtgctgaactagtgcgcgaacctgggtgtggctgctgccttacctgtgccttgtctgaggggcagccatgtggaatctacaccgagcgatgtggatccggcctgcgatgtcagccttccccggatgaggcaagaccactacaggccctgctggatggcagaggcctgtgtgtgaacgctagcgctgtgagccgcctaagggcttatctcctgccagcacctccggctcctggcaatgcctcagaaagcgaggaagatcgcagcgctggaagcgttgaatcgccatccgttagcagtactcatagagtcagcgaccctaaattccaccctttgcactctaagatcataatcattaaaaagggacacgcaaaagactcccagaggtacaaggttgattacgagtctcagtctactgacacccagaacttttcctctgagtcaaaaagggaaacggaatacggaccatgtaggcgcgagatggaggacaccctgaaccatctgaagtttctgaatgttttaagccccagaggggtgcacatccccaactgtgataagaaaggtttctataaaaagaagcagtgccgcccaagcaagggtcggaagagggggttttgttggtgcgttgacaaatatgggcagccacttcccggatacacaaccaagggaaaggaggatgtgcactgctattcaatgcagtctaagtag

SEQ ID NO: 13324 - DNA, 834 bp, Artificial Sequence
  derived and/or modified sequence
atgcgcgcactgaggctcggggcagaagatcagcctctgcccgcatggattccacagctgcgggcagtttattgccggccaattccagccaggcccgcttgtcaagctgcttgtccgggatgtagaaggcacgcagctggtgccacacacgcacttggcaggtgtgctgattccgccggagccgctccacgggctgccggaggtgcaggctggcgggagctagggggattgggaagtaggggagcacttcgggctgtaagacatctccaccgtgccctcctggacgggcgtggcctttgtgtgaacgcgagcgccgtctctagactgcgggcttatctgttgccggcacctccagcaccaggcaacgcttcagagagcgaagaggaccgttcagcagggtctgtggaatctccttccgtgtcctcgacccacagagtgtccgatcccaagtttcaccccctgcactctaagataattatcatcaaaaaaggacatgccaaggactcccagagatataaggtggattacgaatcccaaagcacagatacgcagaacttttcctccgagagtaaacgggagacagaatatggcccttgtaggcgggaaatggaggacacactgaatcacctgaaattcctgaatgttctgagccctcggggtgtccatattccaaattgcgacaagaaaggtttttacaagaaaaagcaatgccgaccctctaaaggcagaaagcgagggttttgttggtgtgtcgacaaatatgggcagccgctgcccggttacaccacgaaaggtaaggaagacgttcactgttattccatgcagtccaaatag

SEQ ID NO: 13325 - DNA, 570 bp, Artificial Sequence
  derived and/or modified sequence
atgcagagggctcgccctacactctgggccgcagcccttacgctcctcgatggacggggtctttgcgcttacttgctccctgcaccacctgctcctgggaatgccagtgagagtgaggaggacagatcagccggttctgttgagagcccttctgtcagtagtactcaccgggttagcgatcccaagtttcatcccctccattcaaagatcatcataattaagaaggggcacgctaaagactctcagagatataaagtggactacgaatcgcagtctacagatactcagaattttagcagcgaatccaagagggaaaccgaatatggaccctgccgaagagaaatggaagacactctgaaccaccttaagttccttaacgtgctatcacctagaggcgtgcatatcccaaactgtgacaagaaaggtttctataaaaagaagcagtgcagaccctcaaaaggtagaaagcggggtttttgctggtgtgtggataagtacggccagcccctgcccggatatacaactaaggggaaagaagacgtgcattgctactctatgcaatctaagtag

SEQ ID NO: 13326 - DNA, 807 bp, Artificial Sequence
  derived and/or modified sequence
atgcagcgcgctcgacccacactatgggcagcggcactgactttactggttctgttacgtggtccccctgtggcacgggcaggtgcgtcttccgccggtctcgggcctgtggtgaggcgggaacctgggtgcgggtgctgcctgacatgtgctctatccgagggccagccctgcggaatttatactgagaggtgcggttccggcctgcggtgtcagccgtcgccagacgaggcacgcccactacaggcgctgcttgatggccgagggctctgtgttaacgctagtgccgtgtctcgactaagagcctacttattgcctgcccctcctgcccctgggaatgcctccgaatcggaagaagatcggagtgcaggctctgtagagtcaccctcagttagctctacgcacagagttagcgacccaaagtttcaccctctgcacagcaagattatcatcatcaagaaggggcacgctaaggatagtcagagatataaggtcgactacgaatcccagtcaaccgacacacagaactttagctcagagtcgaagagagagactgagtatggcccatgccgcagagaaatggaggataccctgaatcacttgaagttcctgaacgtgcttagccccagaggtgtgcacattcccaactgtgacaagaaaggcttttacaagaagaaacagtgtaggccctccaagggaagaaagcgtggattctgttggtgtgtcgataagtacggtcagcccctgccgggttatactaccaaaggcaaagaggacgtgcactgctattcgatgcagagcaagtag

SEQ ID NO: 13327 - DNA, 876 bp, Artificial Sequence
  derived and/or modified sequence
atgcaaagagcacgcccaactctttgggccgccgccttgactctccttgtgctactgcgggggcctcccgttgcaagggctggcgcgtcttcagccggcttaggtccagtggtgaggtgtgaaccttgtgatgcccgcgccctggcccaatgcgccccaccccccgcagtctgcgctgaactggtccgggaacctggctgtggatgttgcttgacgtgcgcactctcagaaggccagccatgcggcatatatacagaacgttgcggcagcgggctcaggtgtcagccatcgcccgacgaggctagacctctccaggcactactcgacggaagaggcctgtgtgtgaacgcctctgcagtctcccgcctcagagcttacctactccccgcccctccggcgcctggaaatgcatctgagagcgaggaagacagatccgccgggtcagttgaaagcccctctgttagcagcacccaccgagtgagtgacccaaagttccatcctctacattcgaagattatcatcataaagaagggccacgccaaagactcacagcgctataaagttgactacgagtcccagagcacagacactcaaaacttttctagcgaaagtaaaagggagacagaatatggaccgtgcagacgagaaatggaagacactcttaatcacctgaaatttttaaacgtgctcagtccaaggggggtccatattcctaactgcgacaagaaagggttctataaaaagaaacagtgtcgaccatccaaggggaggaaaaggggattttgttggtgtgtcgacaagtatggacaacccttacccggctataccaccaagggtaaagaagacgtacattgctattcaatgcagtctaagtag

SEQ ID NO: 13328 - DNA, 585 bp, Artificial Sequence
  derived and/or modified sequence
atgcaacgggctcggcctttacaggccctcctggacggcagaggactgtgcgtgaatgcaagcgccgttagcagacttagggcctacctccttccagctccccctgcaccgggcaatgccagcgagtcggaagaagatcgatctgccgggtctgtggagtcgccaagtgtcagctctacccatagggtttccgaccccaagttccacccactacatagtaaaatcattatcattaagaagggtcacgccaaagactcacaaaggtacaaagttgactatgagtcccaaagcaccgatacacaaaatttcagctccgagtccaaaagggagacagaatacggaccttgtcggcgagaaatggaggacaccttaaaccatctgaagtttttgaatgtattatcgccacggggggtccatattcctaattgtgacaaaaagggcttctacaagaagaaacaatgcaggccgtcgaaaggacgaaagcgaggcttttgctggtgcgtagataaatatggtcaacccttacctggttacacgactaagggcaaggaggacgttcactgctatagtatgcagtccaaatag

SEQ ID NO: 13329 - DNA, 462 bp, Artificial Sequence
  derived and/or modified sequence
tgatctgaggaggaccgaagtgccggttctgtcgaaagtccgtcagttagctctacacatcgtgtttccgatccaaaatttcatcctttgcactccaaaatcatcatcatcaagaaggggcatgccaaagacagccagcgctataaagtcgattacgagagccaaagtacagacactcagaacttctcttccgaatccaagcgcgaaaccgaatacggcccatgtaggcgagaaatggaggataccctaaaccatttaaagtttcttaacgttctgagtccacgcggagtgcacattcccaactgtgataagaagggcttctataagaaaaagcaatgtcggccaagcaaaggccgcaaaagaggcttctgctggtgtgtagataagtacggccaaccattgcccgggtacaccacaaaaggaaaggaagatgttcactgctatagcatgcagtccaagtag

SEQ ID NO: 13330 - DNA, 432 bp, Artificial Sequence
  derived and/or modified sequence
tgagaatcaccttctgtttccagcacccatcgggtgtccgaccctaaattccatcccctccactccaaaatcatcatcattaagaagggacatgccaaagactcacagagatacaaggtggactatgagtcccagagcaccgatacacagaatttttcaagcgagtcaaagcgggaaacagaatatggaccctgtcgacgggagatggaagatacgttgaatcatctgaaattcctcaatgttctcagtccacggggcgtgcatattcccaattgtgataaaaagggtttttacaagaaaaaacaatgtagaccatcaaaggggcgaaagaggggattctgctggtgtgtagacaagtacggtcaaccactccccggctacaccactaaaggaaaggaagacgtccattgctatagcatgcagagtaagtag

SEQ ID NO: 13331 - DNA, 792 bp, Artificial Sequence
  derived and/or modified sequence
atgcagagagcccggcctacactctgggccgcctgtgagccatgcgacgccagagcccttgcccagtgcgctccaccccccgctgtttgtgctgagctggtcagagaaccaggctgtggatgctgcctcacctgtgcactttcagagggccagccgtgcgggatctacacagaacggtgtgggagtggcctgcggtgccaacccagccctgatgaagcaagacctcttcaggccctcctggacggcaggggcttatgtgtcaacgcttcagctgtgtctcgtcttagagcctacctgctgccagcgccacccgccccaggcaacgcatctgaaagtgaagaagacagatccgccggctctgtcgaatctccatcagtttccagtacacacagagtgtccgaccccaagttccaccccctacactcaaagatcatcattatcaagaagggccatgccaaggactcgcagcgatataaagtagactacgaatcacaatcaacagatacccagaatttctccagcgaatcaaagcgcgaaacagagtacggtccctgtcgccgagagatggaggacacgctgaaccatttgaagtttctcaatgtcctgtcccctaggggggttcacatccctaattgcgataagaaggggttctataagaaaaaacagtgtagaccgagcaaaggccgaaagaggggcttctgttggtgcgttgataaatatggacagccgttgccaggttacacaacaaaaggaaaggaagatgtgcattgctacagtatgcagagtaagtag

SEQ ID NO: 13332 - DNA, 834 bp, Artificial Sequence
  derived and/or modified sequence
atgagggcccttaggctcggcgccgaagaccagccattgccggcttggattccccagttacgggcggtttattgtcgacctattccggcccggccagcttgccaggccgcttgtcccggatgccgccgccatgccgccggagcaacacatgcccttgggagatgtgccgacagtgccggcgccgcaccccgagccgcggggggtgcaggttggagagaactgggtggcctgggaagtcgaggtgcactgagagccgtgagacaccttcaccgagcccttctagacggaagaggtctgtgcgtaaatgcgtcagcagtgagtcgtctccgagcctacctgctgccagcccctcccgctcccggcaacgcttccgagagtgaagaagaccggtctgccggatccgtggagagcccaagtgtcagctccacacaccgggtgagcgatccgaagttccaccctttgcatagcaagatcattataattaaaaagggacacgcaaaggattcccaacggtacaaggtcgactacgagagccagtctaccgacacgcagaatttctccagcgaaagtaagcgcgagactgagtatggcccctgtcggagggaaatggaggataccctgaaccatctgaagtttttgaatgttctgtctccgcggggtgtgcatattcctaattgtgataaaaaaggtttctataagaaaaaacagtgcaggccctccaaaggtcgaaaacggggattctgctggtgcgtcgacaaatatgggcagcctctccctggctacaccactaaaggaaaagaggacgtgcattgctattcgatgcagtcgaagtag

SEQ ID NO: 13333 - DNA, 570 bp, Artificial Sequence
  derived and/or modified sequence
atgcagcgcgcaaggcctaccttatgggcggcagcactgacactgcttgatggaagagggctttgcgcctatctgcttcctgcgccccctgccccggggaatgcttctgagtctgaggaagacagaagcgcgggatccgttgaatctcccagcgtcagcagtacccacagagtcagcgatcctaagttccacccccttcattctaaaattattatcatcaaaaaaggacatgccaaagactcccagcggtacaaggttgattatgagtcacaatccacggatacccagaactttagttccgagtctaaaagggaaactgagtatgggccgtgcagaagagagatggaggacactctgaatcaccttaaattcctgaacgtcctgtcaccacgtggtgttcacattccgaactgcgacaaaaaagggttctataagaaaaaacaatgccgaccatctaaaggacggaagagaggcttttgctggtgtgtggataaatacggacagccactgcccggatacacaaccaaagggaaggaagacgttcactgctattctatgcaatctaaatag

SEQ ID NO: 13334 - DNA, 807 bp, Artificial Sequence
  derived and/or modified sequence
atgcaaagggcccggccaacattatgggcagcggctctgactctccttgttcttctcagaggcccacctgtggcccgtgccggagcttccagcgctgggctgggtccagtggtccgcagggaacctggttgcggctgttgcctgacttgcgctctctctgagggacagccatgcggcatttatacggaaagatgtggatccggtctaagatgtcaaccctcccccgatgaagctcgcccactccaggccctgctggacggacggggcttgtgcgtgaatgcatctgccgtttctagactgcgtgcctatctcctccctgcacctccagcacctggaaacgctagcgagtctgaagaggatcgctctgccggttcagtcgaaagcccttcggtgtctagcactcaccgcgtttctgatccaaagtttcacccattgcattccaagattattataattaagaaagggcatgcaaaagacagtcagcgttacaaggtcgactacgagtctcagagtacggatacccaaaacttctccagtgagtccaaaagggagactgaatacggtccttgccggagagaaatggaggatactttgaaccacctgaagttcctgaacgtgctatcgcctagaggggttcacatccccaattgtgataagaaagggttctacaagaaaaaacagtgccgcccatccaaggggcgcaaaagggggttttgctggtgcgttgataagtacggacagcccttgcctggttatactaccaagggtaaagaggacgtacattgctactctatgcagtcaaaatag

SEQ ID NO: 13335 - DNA, 876 bp, Artificial Sequence
  derived and/or modified sequence
atgcaaagagctagacctactctgtgggccgccgccctaactctcctggtgttgctgcgcggcccccccgtggctagagctggagccagctccgccggcttgggacctgtggtcaggtgtgaaccctgtgacgctcgtgccttagcccagtgcgcaccccctccagccgtgtgtgcagagttggttagagagcctggatgcggctgttgtcttacctgtgcccttagcgaaggacagccttgtggaatctatacggaacggtgtggcagtggactgcgctgccagccatctcccgacgaggccagacctttgcaggcactgcttgatggccgtggcctgtgcgtgaatgcatctgctgtatcgagattacgcgcataccttcttcccgccccacccgccccaggaaacgcctccgagtccgaagaagatagatcagctggtagcgtggagtctccatcagtgtcctctacacatcgagtcagcgacccaaagtttcatccacttcactctaaaatcattatcatcaaaaaggggcacgccaaagacagccagcggtacaaggtcgattatgaatctcaatcaacagatacccagaacttctcaagcgagtctaagagagagactgaatacggcccatgcagacgagagatggaagacactttgaatcacctcaagttccttaatgtcttgtcccccagaggcgtacatatcccgaactgtgataaaaagggcttctataaaaaaaaacaatgccgcccaagcaaaggtcgcaaaagggggttctgttggtgcgtagacaagtatggccagccactgcccggatataccactaaagggaaagaggacgtccattgctattctatgcagtctaaatag

SEQ ID NO: 13336 - DNA, 585 bp, Artificial Sequence
  derived and/or modified sequence
atgcaacgcgctagacctctgcaagcactgttggatggtcggggcctatgcgtcaatgcctccgccgtatcacgcctgagagcctatctactgcccgctccacccgcacccggcaacgcctctgaaagtgaggaagatcggtcagccgggagcgtggaatccccatctgtttcgtcaacccatcgtgtttccgatcccaagtttcatccgctgcactccaagattatcattataaaaaagggccacgctaaagactcccagcggtacaaagttgactacgagagccagagcaccgacacgcagaactttagttctgagagcaagcgggagacggaatacggaccatgtagaagagagatggaagataccctcaaccacctgaagtttttaaatgtgctatccccccgcggcgttcatatccccaactgtgataaaaagggcttttacaaaaaaaaacaatgtcgaccctctaaagggcgaaaacggggcttctgttggtgtgttgacaagtatggccagccacttcccggctacacgaccaaggggaaggaagatgttcactgttattcaatgcagtccaagtag

SEQ ID NO: 13337 - DNA, 462 bp, Artificial Sequence
  derived and/or modified sequence
taaagcgaagaggatagaagcgccggcagcgttgaatctccctcagtcagcagcacccaccgcgtctccgatccaaagtttcatccactgcattctaagataatcattataaagaagggtcacgctaaggactcgcagagatataaagtggattacgaatcacaaagtactgatacacaaaacttctcctcagagtccaagcgggagacagagtatggcccatgccgccgcgaaatggaagacacattaaaccacttgaaattcttgaacgtgttgtctcctcgtggagttcatatacctaattgtgataaaaaggggttttacaaaaagaagcagtgtcgaccatcaaagggaagaaaacgcggtttttgctggtgtgtggataagtacggacagcctcttcctggttatacgacaaagggtaaagaagatgtacattgttactccatgcagtccaagtag

SEQ ID NO: 13338 - DNA, 432 bp, Artificial Sequence
  derived and/or modified sequence
taggagtcacccagtgtgagtagtacacatagagtttcagatcccaagtttcatccactccattccaagatcattatcatcaaaaaggggcatgctaaagacagtcagcggtacaaagtggattacgaatcccagtctactgatactcagaacttcagctctgaatcgaaaagagagaccgaatacgggccctgtagaagagaaatggaagacacgctaaaccacctgaaattcctcaatgtcctgtctcctcgaggagtccatattccgaattgcgataaaaagggcttttacaagaaaaagcaatgtaggccaagcaagggaagaaaaaggggtttttgctggtgcgtggataaatatggacagccgctgcccgggtacacaacaaaaggaaaggaagatgtgcattgctactcgatgcaatccaagtag

SEQ ID NO: 13339 - DNA, 792 bp, Artificial Sequence
  derived and/or modified sequence
atgcaaagagcccgccctacattatgggccgcctgtgaaccgtgtgacgcacgtgcattggcccaatgtgcgcctccccctgcggtttgcgcagaattagtacgggagcccggatgcggatgctgtctgacttgtgccttgagcgaaggacagccctgcggtatttataccgaacggtgcggatccgggttgagatgccagccaagtcccgacgaagcccggccccttcaagccctgctggatggacgcggactgtgcgttaacgcatccgctgtgagtcggctgagagcttatttattgccagcgccacccgccccaggcaacgcatctgaaagtgaagaagacagatccgccggctctgtcgaatctccatcagtttccagtacacacagagtgtccgaccccaagttccaccccctacactcaaagatcatcattatcaagaagggccatgccaaggactcgcagcgatataaagtagactacgaatcacaatcaacagatacccagaatttctccagcgaatcaaagcgcgaaacagagtacggtccctgtcgccgagagatggaggacacgctgaaccatttgaagtttctcaatgtcttatcaccccgaggagtacacatacctaactgtgacaagaaaggattttacaaaaaaaaacagtgtaggccatcaaagggacggaaaagaggcttctgctggtgcgtcgataagtacggtcagcccctgccagggtacactaccaaaggaaaagaggatgttcactgttattcaatgcagtcaaaatag

SEQ ID NO: 13340 - DNA, 834 bp, Artificial Sequence
  derived and/or modified sequence
atgagggcccttaggctcggcgccgaagaccagccattgccggcttggattccccagttacgggcggtttattgtcgacctattccggcccggccagcttgccaggccgcttgtcccggatgccgccgccatgccgccggagcaacacatgcccttgggagatgtgccgacagtgccggcgccgcaccccgagccgcggggggtgcaggttggagagaactgggtggcctgggaagtcgaggtgcactgagagccgtgagacaccttcaccgagcccttctagacggaagaggtctgtgcgtgaacgcgtcggctgtgtcccggctcagagcgtacctactgccagcaccaccagcccccggcaacgccagtgagtctgaagaggatcggtcagccggatccgtggaatccccatcagtgtcatccacccaccgtgtgtcagatccaaaattccacccattgcattcaaaaataattattatcaagaaggggcatgcaaaggattctcaaagatataaggtcgattacgagagccagagcaccgacactcaaaacttttcgtctgaaagtaagcgggagacagagtacggaccttgcagacgcgagatggaggacacactgaatcatttgaaatttcttaacgtgcttagccctcgaggcgtgcatattccaaattgtgataagaaggggttctacaaaaaaaaacagtgcagaccctctaaaggcaggaagaggggcttttgttggtgcgtcgataagtatggtcaaccactccccggctataccactaagggtaaggaggatgtacattgctacagcatgcagagcaagtag

SEQ ID NO: 13341 - DNA, 570 bp, Artificial Sequence
  derived and/or modified sequence
atgcagagagcccgaccaaccctgtgggccgctgccttgaccttgctggatggccgcgggctgtgcgcttatttactcccggcaccccctgccccaggcaatgcttccgaatcagaggaggacagatccgctggctctgtggagtctccatcagtatcctccacccaccgggtttcggacccaaaattccatccactacacagtaagattataatcatcaagaagggacacgcaaaggacagtcagagatataaagtcgattacgaaagccagtccaccgacacacagaatttttcatccgagtctaaaagggaaactgagtatgggccgtgcagaagagagatggaggacactctgaatcaccttaaattcctgaacgtcctgtcaccacgtggtgttcacattccgaactgcgacaaaaaagggttctataagaaaaaacaatgccgaccatctaaaggacggaagagaggcttttgctggtgtgtggataaatacggacagccactgcccggatacacaaccaaagggaaggaagacgttcactgctattctatgcaatctaaatag

SEQ ID NO: 13342 - DNA, 807 bp, Artificial Sequence
  derived and/or modified sequence
atgcaaagggcccggccaacattatgggcagcggctctgactctccttgttcttctcagaggcccacctgtggcccgtgccggagcttccagcgctgggctgggtccagtggtccgcagggaacctggttgcggctgttgcctgacttgcgctctctctgagggacagccatgcggcatttatacggaaagatgtggatccggtctaagatgtcaaccctcccccgatgaagctcgcccactccaggccctgctggacggacggggcttgtgcgtgaatgcatctgccgtttctagactgagagcctatttgctgccagccccccccgcacccggcaatgcatcagaatcagaagaagacagatccgccggtagcgtagaatctccctcggttagctccacccacagagtttcagaccctaagttccatcccctgcacagcaaaattatcattattaagaaaggacatgctaaggactctcagcgctataaggttgattacgagagccagtccaccgatactcaaaactttagttccgagagcaagagagaaaccgagtatggaccatgcaggcgtgagatggaggatacattaaaccatctgaaatttcttaatgttctgagcccacgtggtgtacatatcccaaattgcgataagaaagggttctacaagaaaaagcagtgtcggccgagtaaggggagaaagcggggattctgttggtgtgtggataaatacggacagccattgcccggatatacgaccaaaggtaaggaggatgtgcactgctacagcatgcaaagtaagtag

SEQ ID NO: 13343 - RNA, 876 nt, Artificial Sequence
  derived and/or modified sequence
augcaaagagcacgcccaacucuuugggccgccgccuugacucuccuugugcuacugcgggggccucccguugcaagggcuggcgcgucuucagccggcuuagguccaguggugaggugugaaccuugugaugcccgcgcccuggcccaaugcgccccaccccccgcagucugcgcugaacugguccgggaaccuggcuguggauguugcuugacgugcgcacucucagaaggccagccaugcggcauauauacagaacguugcggcagcgggcucaggugucagccaucgcccgacgaggcuagaccucuccaggcacuacucgacggaagaggccugugugugaacgccucugcagucucccgccucagagcuuaccuacuccccgccccuccggcgccuggaaaugcaucugagagcgaggaagacagauccgccgggucaguugaaagccccucuguuagcagcacccaccgagugagugacccaaaguuccauccucuacauucgaagauuaucaucauaaagaagggccacgccaaagacucacagcgcuauaaaguugacuacgagucccagagcacagacacucaaaacuuuucuagcgaaaguaaaagggagacagaauauggaccgugcagacgagaaauggaagacacucuuaaucaccugaaauuuuuaaacgugcucaguccaagggggguccauauuccuaacugcgacaagaaaggguucuauaaaaagaaacagugucgaccauccaaggggaggaaaaggggauuuuguuggugugucgacaaguauggacaacccuuacccggcuauaccaccaaggguaaagaagacguacauugcuauucaaugcagucuaaguag

SEQ ID NO: 13344 - RNA, 585 nt, Artificial Sequence
  derived and/or modified sequence
augcaacgggcucggccuuuacaggcccuccuggacggcagaggacugugcgugaaugcaagcgccguuagcagacuuagggccuaccuccuuccagcucccccugcaccgggcaaugccagcgagucggaagaagaucgaucugccgggucuguggagucgccaagugucagcucuacccauaggguuuccgaccccaaguuccacccacuacauaguaaaaucauuaucauuaagaagggucacgccaaagacucacaaagguacaaaguugacuaugagucccaaagcaccgauacacaaaauuucagcuccgaguccaaaagggagacagaauacggaccuugucggcgagaaauggaggacaccuuaaaccaucugaaguuuuugaauguauuaucgccacgggggguccauauuccuaauugugacaaaaagggcuucuacaagaagaaacaaugcaggccgucgaaaggacgaaagcgaggcuuuugcuggugcguagauaaauauggucaacccuuaccugguuacacgacuaagggcaaggaggacguucacugcuauaguaugcaguccaaauag

SEQ ID NO: 13345 - RNA, 462 nt, Artificial Sequence
  derived and/or modified sequence
ugaucugaggaggaccgaagugccgguucugucgaaaguccgucaguuagcucuacacaucguguuuccgauccaaaauuucauccuuugcacuccaaaaucaucaucaucaagaaggggcaugccaaagacagccagcgcuauaaagucgauuacgagagccaaaguacagacacucagaacuucucuuccgaauccaagcgcgaaaccgaauacggcccauguaggcgagaaauggaggauacccuaaaccauuuaaaguuucuuaacguucugaguccacgcggagugcacauucccaacugugauaagaagggcuucuauaagaaaaagcaaugucggccaagcaaaggccgcaaaagaggcuucugcugguguguagauaaguacggccaaccauugcccggguacaccacaaaaggaaaggaagauguucacugcuauagcaugcaguccaaguag

SEQ ID NO: 13346 - RNA, 432 nt, Artificial Sequence
  derived and/or modified sequence
ugagaaucaccuucuguuuccagcacccaucggguguccgacccuaaauuccauccccuccacuccaaaaucaucaucauuaagaagggacaugccaaagacucacagagauacaagguggacuaugagucccagagcaccgauacacagaauuuuucaagcgagucaaagcgggaaacagaauauggacccugucgacgggagauggaagauacguugaaucaucugaaauuccucaauguucucaguccacggggcgugcauauucccaauugugauaaaaaggguuuuuacaagaaaaaacaauguagaccaucaaaggggcgaaagaggggauucugcugguguguagacaaguacggucaaccacuccccggcuacaccacuaaaggaaaggaagacguccauugcuauagcaugcagaguaaguag

SEQ ID NO: 13347 - RNA, 792 nt, Artificial Sequence
  derived and/or modified sequence
augcagagagcccggccuacacucugggccgccugugagccaugcgacgccagagcccuugcccagugcgcuccaccccccgcuguuugugcugagcuggucagagaaccaggcuguggaugcugccucaccugugcacuuucagagggccagccgugcgggaucuacacagaacggugugggaguggccugcggugccaacccagcccugaugaagcaagaccucuucaggcccuccuggacggcaggggcuuaugugucaacgcuucagcugugucucgucuuagagccuaccugcugccagcgccacccgccccaggcaacgcaucugaaagugaagaagacagauccgccggcucugucgaaucuccaucaguuuccaguacacacagaguguccgaccccaaguuccacccccuacacucaaagaucaucauuaucaagaagggccaugccaaggacucgcagcgauauaaaguagacuacgaaucacaaucaacagauacccagaauuucuccagcgaaucaaagcgcgaaacagaguacggucccugucgccgagagauggaggacacgcugaaccauuugaaguuucucaauguccuguccccuagggggguucacaucccuaauugcgauaagaagggguucuauaagaaaaaacaguguagaccgagcaaaggccgaaagaggggcuucuguuggugcguugauaaauauggacagccguugccagguuacacaacaaaaggaaaggaagaugugcauugcuacaguaugcagaguaaguag

SEQ ID NO: 13348 - RNA, 834 nt, Artificial Sequence
  derived and/or modified sequence
augagggcccuuaggcucggcgccgaagaccagccauugccggcuuggauuccccaguuacgggcgguuuauugucgaccuauuccggcccggccagcuugccaggccgcuugucccggaugccgccgccaugccgccggagcaacacaugcccuugggagaugugccgacagugccggcgccgcaccccgagccgcggggggugcagguuggagagaacuggguggccugggaagucgaggugcacugagagccgugagacaccuucaccgagcccuucuagacggaagaggucugugcguaaaugcgucagcagugagucgucuccgagccuaccugcugccagccccucccgcucccggcaacgcuuccgagagugaagaagaccggucugccggauccguggagagcccaagugucagcuccacacaccgggugagcgauccgaaguuccacccuuugcauagcaagaucauuauaauuaaaaagggacacgcaaaggauucccaacgguacaaggucgacuacgagagccagucuaccgacacgcagaauuucuccagcgaaaguaagcgcgagacugaguauggccccugucggagggaaauggaggauacccugaaccaucugaaguuuuugaauguucugucuccgcggggugugcauauuccuaauugugauaaaaaagguuucuauaagaaaaaacagugcaggcccuccaaaggucgaaaacggggauucugcuggugcgucgacaaauaugggcagccucucccuggcuacaccacuaaaggaaaagaggacgugcauugcuauucgaugcagucgaaguag

SEQ ID NO: 13349 - RNA, 570 nt, Artificial Sequence
  derived and/or modified sequence
augcagcgcgcaaggccuaccuuaugggcggcagcacugacacugcuugauggaagagggcuuugcgccuaucugcuuccugcgcccccugccccggggaaugcuucugagucugaggaagacagaagcgcgggauccguugaaucucccagcgucagcaguacccacagagucagcgauccuaaguuccacccccuucauucuaaaauuauuaucaucaaaaaaggacaugccaaagacucccagcgguacaagguugauuaugagucacaauccacggauacccagaacuuuaguuccgagucuaaaagggaaacugaguaugggccgugcagaagagagauggaggacacucugaaucaccuuaaauuccugaacguccugucaccacgugguguucacauuccgaacugcgacaaaaaaggguucuauaagaaaaaacaaugccgaccaucuaaaggacggaagagaggcuuuugcugguguguggauaaauacggacagccacugcccggauacacaaccaaagggaaggaagacguucacugcuauucuaugcaaucuaaauag

SEQ ID NO: 13350 - RNA, 807 nt, Artificial Sequence
  derived and/or modified sequence
augcaaagggcccggccaacauuaugggcagcggcucugacucuccuuguucuucucagaggcccaccuguggcccgugccggagcuuccagcgcugggcuggguccagugguccgcagggaaccugguugcggcuguugccugacuugcgcucucucugagggacagccaugcggcauuuauacggaaagauguggauccggucuaagaugucaacccucccccgaugaagcucgcccacuccaggcccugcuggacggacggggcuugugcgugaaugcaucugccguuucuagacugcgugccuaucuccucccugcaccuccagcaccuggaaacgcuagcgagucugaagaggaucgcucugccgguucagucgaaagcccuucggugucuagcacucaccgcguuucugauccaaaguuucacccauugcauuccaagauuauuauaauuaagaaagggcaugcaaaagacagucagcguuacaaggucgacuacgagucucagaguacggauacccaaaacuucuccagugaguccaaaagggagacugaauacgguccuugccggagagaaauggaggauacuuugaaccaccugaaguuccugaacgugcuaucgccuagagggguucacauccccaauugugauaagaaaggguucuacaagaaaaaacagugccgcccauccaaggggcgcaaaaggggguuuugcuggugcguugauaaguacggacagcccuugccugguuauacuaccaaggguaaagaggacguacauugcuacucuaugcagucaaaauag

SEQ ID NO: 13351 - RNA, 876 nt, Artificial Sequence
  derived and/or modified sequence
augcaaagagcuagaccuacucugugggccgccgcccuaacucuccugguguugcugcgcggcccccccguggcuagagcuggagccagcuccgccggcuugggaccuguggucaggugugaacccugugacgcucgugccuuagcccagugcgcacccccuccagccgugugugcagaguugguuagagagccuggaugcggcuguugucuuaccugugcccuuagcgaaggacagccuuguggaaucuauacggaacgguguggcaguggacugcgcugccagccaucucccgacgaggccagaccuuugcaggcacugcuugauggccguggccugugcgugaaugcaucugcuguaucgagauuacgcgcauaccuucuucccgccccacccgccccaggaaacgccuccgaguccgaagaagauagaucagcugguagcguggagucuccaucaguguccucuacacaucgagucagcgacccaaaguuucauccacuucacucuaaaaucauuaucaucaaaaaggggcacgccaaagacagccagcgguacaaggucgauuaugaaucucaaucaacagauacccagaacuucucaagcgagucuaagagagagacugaauacggcccaugcagacgagagauggaagacacuuugaaucaccucaaguuccuuaaugucuugucccccagaggcguacauaucccgaacugugauaaaaagggcuucuauaaaaaaaaacaaugccgcccaagcaaaggucgcaaaaggggguucuguuggugcguagacaaguauggccagccacugcccggauauaccacuaaagggaaagaggacguccauugcuauucuaugcagucuaaauag

SEQ ID NO: 13352 - RNA, 585 nt, Artificial Sequence
  derived and/or modified sequence
augcaacgcgcuagaccucugcaagcacuguuggauggucggggccuaugcgucaaugccuccgccguaucacgccugagagccuaucuacugcccgcuccacccgcacccggcaacgccucugaaagugaggaagaucggucagccgggagcguggaauccccaucuguuucgucaacccaucguguuuccgaucccaaguuucauccgcugcacuccaagauuaucauuauaaaaaagggccacgcuaaagacucccagcgguacaaaguugacuacgagagccagagcaccgacacgcagaacuuuaguucugagagcaagcgggagacggaauacggaccauguagaagagagauggaagauacccucaaccaccugaaguuuuuaaaugugcuauccccccgcggcguucauauccccaacugugauaaaaagggcuuuuacaaaaaaaaacaaugucgacccucuaaagggcgaaaacggggcuucuguugguguguugacaaguauggccagccacuucccggcuacacgaccaaggggaaggaagauguucacuguuauucaaugcaguccaaguag

SEQ ID NO: 13353 - RNA, 462 nt, Artificial Sequence
  derived and/or modified sequence
uaaagcgaagaggauagaagcgccggcagcguugaaucucccucagucagcagcacccaccgcgucuccgauccaaaguuucauccacugcauucuaagauaaucauuauaaagaagggucacgcuaaggacucgcagagauauaaaguggauuacgaaucacaaaguacugauacacaaaacuucuccucagaguccaagcgggagacagaguauggcccaugccgccgcgaaauggaagacacauuaaaccacuugaaauucuugaacguguugucuccucguggaguucauauaccuaauugugauaaaaagggguuuuacaaaaagaagcagugucgaccaucaaagggaagaaaacgcgguuuuugcugguguguggauaaguacggacagccucuuccugguuauacgacaaaggguaaagaagauguacauuguuacuccaugcaguccaaguag

SEQ ID NO: 13354 - RNA, 432 nt, Artificial Sequence
  derived and/or modified sequence
uaggagucacccagugugaguaguacacauagaguuucagaucccaaguuucauccacuccauuccaagaucauuaucaucaaaaaggggcaugcuaaagacagucagcgguacaaaguggauuacgaaucccagucuacugauacucagaacuucagcucugaaucgaaaagagagaccgaauacgggcccuguagaagagaaauggaagacacgcuaaaccaccugaaauuccucaauguccugucuccucgaggaguccauauuccgaauugcgauaaaaagggcuuuuacaagaaaaagcaauguaggccaagcaagggaagaaaaagggguuuuugcuggugcguggauaaauauggacagccgcugcccggguacacaacaaaaggaaaggaagaugugcauugcuacucgaugcaauccaaguag

SEQ ID NO: 13355 - RNA, 792 nt, Artificial Sequence
  derived and/or modified sequence
augcaaagagcccgcccuacauuaugggccgccugugaaccgugugacgcacgugcauuggcccaaugugcgccucccccugcgguuugcgcagaauuaguacgggagcccggaugcggaugcugucugacuugugccuugagcgaaggacagcccugcgguauuuauaccgaacggugcggauccggguugagaugccagccaagucccgacgaagcccggccccuucaagcccugcuggauggacgcggacugugcguuaacgcauccgcugugagucggcugagagcuuauuuauugccagcgccacccgccccaggcaacgcaucugaaagugaagaagacagauccgccggcucugucgaaucuccaucaguuuccaguacacacagaguguccgaccccaaguuccacccccuacacucaaagaucaucauuaucaagaagggccaugccaaggacucgcagcgauauaaaguagacuacgaaucacaaucaacagauacccagaauuucuccagcgaaucaaagcgcgaaacagaguacggucccugucgccgagagauggaggacacgcugaaccauuugaaguuucucaaugucuuaucaccccgaggaguacacauaccuaacugugacaagaaaggauuuuacaaaaaaaaacaguguaggccaucaaagggacggaaaagaggcuucugcuggugcgucgauaaguacggucagccccugccaggguacacuaccaaaggaaaagaggauguucacuguuauucaaugcagucaaaauag

SEQ ID NO: 13356 - RNA, 834 nt, Artificial Sequence
  derived and/or modified sequence
augagggcccuuaggcucggcgccgaagaccagccauugccggcuuggauuccccaguuacgggcgguuuauugucgaccuauuccggcccggccagcuugccaggccgcuugucccggaugccgccgccaugccgccggagcaacacaugcccuugggagaugugccgacagugccggcgccgcaccccgagccgcggggggugcagguuggagagaacuggguggccugggaagucgaggugcacugagagccgugagacaccuucaccgagcccuucuagacggaagaggucugugcgugaacgcgucggcugugucccggcucagagcguaccuacugccagcaccaccagcccccggcaacgccagugagucugaagaggaucggucagccggauccguggaauccccaucagugucauccacccaccgugugucagauccaaaauuccacccauugcauucaaaaauaauuauuaucaagaaggggcaugcaaaggauucucaaagauauaaggucgauuacgagagccagagcaccgacacucaaaacuuuucgucugaaaguaagcgggagacagaguacggaccuugcagacgcgagauggaggacacacugaaucauuugaaauuucuuaacgugcuuagcccucgaggcgugcauauuccaaauugugauaagaagggguucuacaaaaaaaaacagugcagacccucuaaaggcaggaagaggggcuuuuguuggugcgucgauaaguauggucaaccacuccccggcuauaccacuaaggguaaggaggauguacauugcuacagcaugcagagcaaguag

SEQ ID NO: 13357 - RNA, 570 nt, Artificial Sequence
  derived and/or modified sequence
augcagagagcccgaccaacccugugggccgcugccuugaccuugcuggauggccgcgggcugugcgcuuauuuacucccggcacccccugccccaggcaaugcuuccgaaucagaggaggacagauccgcuggcucuguggagucuccaucaguauccuccacccaccggguuucggacccaaaauuccauccacuacacaguaagauuauaaucaucaagaagggacacgcaaaggacagucagagauauaaagucgauuacgaaagccaguccaccgacacacagaauuuuucauccgagucuaaaagggaaacugaguaugggccgugcagaagagagauggaggacacucugaaucaccuuaaauuccugaacguccugucaccacgugguguucacauuccgaacugcgacaaaaaaggguucuauaagaaaaaacaaugccgaccaucuaaaggacggaagagaggcuuuugcugguguguggauaaauacggacagccacugcccggauacacaaccaaagggaaggaagacguucacugcuauucuaugcaaucuaaauag

SEQ ID NO: 13358 - RNA, 807 nt, Artificial Sequence
  derived and/or modified sequence
augcaaagggcccggccaacauuaugggcagcggcucugacucuccuuguucuucucagaggcccaccuguggcccgugccggagcuuccagcgcugggcuggguccagugguccgcagggaaccugguugcggcuguugccugacuugcgcucucucugagggacagccaugcggcauuuauacggaaagauguggauccggucuaagaugucaacccucccccgaugaagcucgcccacuccaggcccugcuggacggacggggcuugugcgugaaugcaucugccguuucuagacugagagccuauuugcugccagccccccccgcacccggcaaugcaucagaaucagaagaagacagauccgccgguagcguagaaucucccucgguuagcuccacccacagaguuucagacccuaaguuccauccccugcacagcaaaauuaucauuauuaagaaaggacaugcuaaggacucucagcgcuauaagguugauuacgagagccaguccaccgauacucaaaacuuuaguuccgagagcaagagagaaaccgaguauggaccaugcaggcgugagauggaggauacauuaaaccaucugaaauuucuuaauguucugagcccacgugguguacauaucccaaauugcgauaagaaaggguucuacaagaaaaagcagugucggccgaguaaggggagaaagcggggauucuguugguguguggauaaauacggacagccauugcccggauauacgaccaaagguaaggaggaugugcacugcuacagcaugcaaaguaaguag

SEQ ID NO: 13359 - protein, 272 aa, Artificial Sequence
  derived and/or modified sequence
MVLLTAVLLLLAAYAGPAQSLGSFVHCEPCDEKALSMCPPSPLGCELVKEPGCGCCMTCALAEGQSCGVYTERCAQGLRCLPRQDEEKPLHALLHGRGVCLNEKSYREQVKIERDSREHEEPTTSEMAEETYSPKIFRPKHTRISELKAEAVKKDRRKKLTQSKFVGGAENTAHPRIISAPEMRQESEQGPCRRHMEASLQELKASPRMVPRAVYLPNCDRKGFYKRKQCKPSRGRKRGICWCVDKYGMKLPGMEYVDGDFQCHTFDSSNVE

SEQ ID NO: 13360 - DNA, 6215 bp, Artificial Sequence
  derived and/or modified sequence
ggggaaaagagctaggaaagagctgcaaagcagtgtgggctttttcccttttttgctccttttcattacccctcctccgttttcacccttctccggacttcgcgtagaacctgcgaatttcgaagaggaggtggcaaagtgggagaaaagaggtgttagggtttggggtttttttgtttttgtttttgttttttaatttcttgatttcaacattttctcccaccctctcggctgcagccaacgcctcttacctgttctgcggcgccgcgcaccgctggcagctgagggttagaaagcggggtgtattttagattttaagcaaaaattttaaagataaatccatttttctctcccacccccaacgccatctccactgcatccgatctcattatttcggtggttgcttgggggtgaacaattttgtggctttttttcccctataattctgacccgctcaggcttgagggtttctccggcctccgctcactgcgtgcacctggcgctgccctgcttcccccaacctgttgcaaggctttaattcttgcaactgggacctgctcgcaggcaccccagccctccacctctctctacatttttgcaagtgtctgggggagggcacctgctctacctgccagaaattttaaaacaaaaacaaaaacaaaaaaatctccgggggccctcttggcccctttatccctgcactctcgctctcctgccccaccccgaggtaaagggggcgactaagagaagatggtgttgctcaccgcggtcctcctgctgctggccgcctatgcggggccggcccagagcctgggctccttcgtgcactgcgagccctgcgacgagaaagccctctccatgtgcccccccagccccctgggctgcgagctggtcaaggagccgggctgcggctgctgcatgacctgcgccctggccgaggggcagtcgtgcggcgtctacaccgagcgctgcgcccaggggctgcgctgcctcccccggcaggacgaggagaagccgctgcacgccctgctgcacggccgcggggtttgcctcaacgaaaagagctaccgcgagcaagtcaagatcgagagagactcccgtgagcacgaggagcccaccacctctgagatggccgaggagacctactcccccaagatcttccggcccaaacacacccgcatctccgagctgaaggctgaagcagtgaagaaggaccgcagaaagaagctgacccagtccaagtttgtcgggggagccgagaacactgcccacccccggatcatctctgcacctgagatgagacaggagtctgagcagggcccctgccgcagacacatggaggcttccctgcaggagctcaaagccagcccacgcatggtgccccgtgctgtgtacctgcccaattgtgaccgcaaaggattctacaagagaaagcagtgcaaaccttcccgtggccgcaaacgtggcatctgctggtgcgtggacaagtacgggatgaagctgccaggcatggagtacgttgacggggactttcagtgccacaccttcgacagcagcaacgttgagtgatgcgtccccccccaacctttccctcaccccctcccacccccagccccgactccagccagcgcctccctccaccccaggacgccactcatttcatctcatttaagggaaaaatatatatctatctatttgaggaaactgaggacctcggaatctctagcaagggctcaacttcgaaaatggcaacaacagagatgcaaaaagctaaaaagacaccccccccctttaaatggttttctttttgaggcaagttggatgaacagagaagggaagagaggaagaacgagaggaagagaagggaaggaagtgtttgtgtagaagagagagaaagacgaatagagttaggaaaaggaagacaagcaggtgggcaggaaggacatgcaccgagaccaggcaggggcccaactttcacgtccagccctggcctggggtcgggagaggtgggcgctagaagatgcagcccaggatgtggcaatcaatgacactattggggtttcccaggatggattggtcagggggagaaaggaaaaggcaaaacactccaggacctctcccggatctgtctcctcctctagccagcagtatggacagctggacccctgaacttcctctcctcttacctgggcagagtgttgtctctccccaaatttataaaaactaaaatgcattccattcctctgaaagcaaaacaaattcataattgagtgatattaaatagagaggttttcggaagcagatctgtgaatatgaaatacatgtgcatatttcattccccaggcagacattttttagaaatcaatacatgccccaatattggaaagacttgttcttccacggtgactacagtacatgctgaagcgtgccgtttcagccctcatttaattcaatttgtaagtagcgcagcagcctctgtgggggaggataggctgaaaaaaaaaagtgggctcgtatttatctacaggactccatatagtcatatataggcatataaatctattctttttctttgtttttttctttcttcctttctttcaaaggtttgcattaacttttcaaagtagttcctataggggcattgaggagcttcctcattctgggaaaactgagaaaacccatattctcctaatacaacccgtaatagcatttttgcctgcctcgaggcagagtttcccgtgagcaataaactcagcttttttgtggggcacagtactggatttgacagtgattccccacgtgtgttcatctgcacccaccgagccaggcagaggccagccctccgtggtgcacacagcacgcgcctcagtccatcccattttagtctttaaaccctcaggaagtcacagtctccggacaccacaccacatgagcccaacaggtccacgatggatccaccagtcccaccccagccttttcctttcatctgaacagaatgtgcatttttggaagcctccctcactctccatgctggcagagcaggagggagactgaagtaagagatggcagagggagatggtggcaaaaaggtttagatgcaggagaacagtaagatggatggttccggccagagtcgatgtggggaggaacagagggctgaagggagagggggctgactgttccattctagctttggcacaaagcagcagaaagggggaaaagccaatagaaatttccttagcttccccaccatatgtattttctaggatttgagaggaaagagaggaaaatgggggaatgggttgcaaaatagaaatgagcttaatccaggccgcagagccagggaaggtgagtaactttaggagggtgctagactttagaagccagataggaagaatcagtctaaactggccatgctttggaagggacaagactatgtgctccgctgcccaccttcagcctgcaatgagggactgaggcccacgagtctttccagctcttcctccattctggccagtccctgcatcctccctggggtggaggatggaaggaaagctgggacaagcagggaacgcatgattcagggatgctgtcactcggcagccagattccgaaactcccattctccaatgacttcctcaaccaatgggtggccttgtgactgttctttaaggctgaagatatccaggaaagggggcttggacactggccaaggagaccccttcgtgctgtggacacagctctcttcactctttgctcatggcatgacacagcggagaccgcctccaacaacgaatttggggctacgaagaggaatagcgaaaaagcaaatctgtttcaactgatgggaaccctatagctatagaacttgggggctatctcctatgcccctggacaggacagttggctggggacaggagaagtgctcaatcttcatgagacaaaggggcccgatagggccagcagccacaaggccttgacctgccgagtcagcatgccccatctctctgcacagctgtcccctaaacccaactcacgtttctgtatgtcttaggccagtatcccaaacctcttccacgtcactgttctttccacccattctccctttgcatcttgagcagttatccaactaggatctgccaagtggatactggggtgccactcccctgagaaaagactgagccaggaactacaagctccccccacattcctcccagcctggacctaattcttgagaggggctctctcttcacggactgtgtctggactttgagcaggcttctgccccttgcgttggctctttgctgccagccatcaggtgggggattagagcctggtgtaagtgcgccagactcttccggtttccaaagttcgtgcctgcgaacccaaacctgtgagtctcttctgcatgcaggagtttctcctgggcagctggtcactccccagagaagctgggccttcatggacacatggaactaagcctcccaaatgggagttctggctgagcccagggtggggagatcctgggaagggaggcactggaggaagacggcacctcttcccccatggcagggtgtgagggaggcaggtttggaatggtgcgagtatggcaatctaagcaggggtctggtctctttgactccaggctggcctttggccgactgtctgctcacccagagaccttggactccggactatccatggctccgaatctaagtgctgcccactcccatgctcacacccacagaaggtcttcccatcccctttagattcgtgcctcactccaccagtgaggaagatgcctctgtctttcccacgactgccaggagatagggaagcccagccaggactgaccctccttcctccagcctgccctgacccacctggcaaagcagggcacatggggaggaagagactggaacctttctttgacagccaggcctagacagacaggcctggggacactggccccatgaggggaggaaggcaggcgcacgaggtccagggaggcccttttctgatcatgccccttctctcccaccccatctccccaccaccacctctgtggcctccatggtacccccacagggctggcctcccctagagggtgggcctcaaccacctgctcccgccacgcaccggttagtgagacagggctgccacggcaaccgccaagcccccctcaaggtgggacagtaccccggacccatccactcactcctgagagggctccggcccagaatgggaacctcagagaagagctctaaggagaagaaaccccatagcgtcagagaggatatgtctggcttccaagagaaaggaggctccgttttgcaaagtggaggagggacgagggacaggggtttcaccagccagcaacctgggccttgtactgtctgtgtttttaaaaccactaaagtgcaagaattacattgcactgtttctccactttttattttctcttaggcttttgtttctatttcaaacatactttcttggttttctaatggagtatatagtttagtcatttcacagactctggcctcctctcctgaaatccttttggatggggaaagggaaggtggggagggtccgaggggaaggggaccccagcttccctgtgcccgctcaccccactccaccagtccccggtcgccagccggagtctcctctctaccgccactgtcacaccgtagcccacatggatagcacagttgtcagacaagattccttcagattccgagttgcctaccggttgttttcgttgttgttgttgttgtttttctttttctttttttttttgaagacagcaataaccacagtacatattactgtagttctctatagttttacatacattcataccataactctgttctctcctcttttttgttttcaactttaaaaacaaaaataaacgatgataatctttactggtgaaaaggatggaaaaataaatcaacaaatgcaaccagtttgtgagaaaaaaaaaaaaaagccgaaaaaaaaaaaaaaaacacctgaatgcggaagagctcggctcccgtttagcattttgtacttaaggaaataaaaaaccaacaaaggatctcacattttcttaaaaagtgaagattgctgtatactatttattcaacttataatttatgttactccttgatctttgtcttttgtcatgacaaagcatttatttaataaagttatgcattcagtta

SEQ ID NO: 13361 - DNA, 819 bp, Artificial Sequence
  derived and/or modified sequence
atggtcttgttgaccgcagtcctcctgttgctcgcagcttacgccggcccagctcaatcactgggctcattcgtgcattgcgagccgtgtgacgaaaaagccctgagtatgtgccccccatccccactgggatgtgagttggtcaaagaacctggatgtggttgttgcatgacctgtgcactggccgagggccagtcctgcggcgtgtacaccgagagatgcgcccaggggctgcgctgcctccccagacaagacgaagaaaagccactgcacgctcttctccacggaaggggtgtatgccttaatgagaaatcctatcgggagcaagtgaaaattgaaagagatagccgtgagcacgaggagcccacaacatccgagatggccgaggagacgtactctcccaagatttttcgacccaagcacaccaggatctccgaactcaaggccgaggccgtgaagaaggacagaagaaagaagctaacacaatcaaagttcgtcggtggcgccgaaaacactgcgcaccctaggatcattagcgccccagagatgcgtcaagagtctgaacagggaccctgccgtagacatatggaggcctctctgcaggaactgaaggcaagccctcgcatggtaccgcgcgctgtttatttgcctaattgcgatcggaagggcttctacaaacgcaagcagtgcaagccgtctcggggaagaaaacgcggcatctgctggtgtgtagacaagtatggtatgaagctccctgggatggagtacgtggacggtgatttccagtgtcatacgttcgatagtagtaacgttgaatag

SEQ ID NO: 13362 - DNA, 819 bp, Artificial Sequence
  derived and/or modified sequence
atggtgctgctgacagctgtgctgctgctgctggccgcctatgccggccctgcccagagcctgggcagctttgtgcactgtgagccctgtgatgagaaggccctgtccatgtgcccccccagccccctgggctgtgagctggtgaaggagcccggctgcggctgctgcatgacctgtgccctggccgagggccagagctgtggggtgtacacagagcgctgtgcccagggcctgcgctgcctgccccggcaggatgaggagaagcccctgcacgccctgctgcacggccggggcgtgtgcctgaatgagaagagctaccgggagcaggtgaagattgaaagagacagccgggagcacgaggagcccaccaccagcgagatggccgaggagacctacagccccaagatcttccggcccaagcacacccgcatcagcgagctgaaggccgaggccgtgaagaaggacaggaggaagaagctgacccagagcaagtttgtgggcggcgctgagaacacagcccacccccgcatcatcagcgcccctgagatgaggcaggagagcgagcagggcccctgcagaagacacatggaggccagcctgcaggagctgaaggccagccccaggatggtgcccagggctgtgtacctgcccaactgtgacaggaagggcttctacaagaggaagcagtgcaagcccagccggggcaggaagaggggcatctgctggtgtgtggacaagtatggcatgaagctgcccggcatggagtatgtggatggagacttccagtgccacacctttgacagcagcaatgtggagtag

SEQ ID NO: 13363 - DNA, 819 bp, Artificial Sequence
  derived and/or modified sequence
atggtgctgctgaccgccgtgctgctgctgctggccgcctacgccggtccagcccagtcgctcggtagcttcgtgcactgcgagccgtgcgacgaaaaagcactgagtatgtgtcctcccagccccctgggttgtgagctcgttaaagagccaggatgcgggtgctgcatgacgtgcgccctggccgagggccagagctgcggagtgtatacagaacgctgtgctcagggccttcgttgtctgcccaggcaggacgaagaaaagcctctgcacgcgctgttacatggcaggggggtttgtctgaacgaaaagagttaccgagagcaggtgaagattgaaagggactctcgggaacatgaagaacctacaacttctgagatggctgaggagacatatagcccaaagatctttagacccaaacatactcgtatcagtgaactcaaggcagaggccgtcaagaaggaccggcgcaagaagctcactcagtccaagttcgtgggtggcgctgaaaacactgcacacccaagaatcatatctgcccccgaaatgagacaggagagcgagcagggtccctgtcgtagacacatggaagccagccttcaagaactgaaagcatccccacgcatggtcccaagggccgtgtatttgcctaattgtgaccgaaaggggttttataagcgaaaacaatgtaaaccctcgaggggccggaagagagggatttgttggtgcgtcgacaagtatggtatgaaactgcctggaatggagtatgtggacggggactttcagtgtcacacctttgatagctctaacgttgagtag

SEQ ID NO: 13364 - DNA, 819 bp, Artificial Sequence
  derived and/or modified sequence
atggtcctgcttactgctgttctactgctgcttgccgcttacgcagggcctgcccagtcgctcggctctttcgtacactgcgaaccctgtgatgagaaggcccttagtatgtgtccacccagccccctgggctgcgagctagtgaaagagcctggttgcgggtgctgtatgacatgtgctctcgccgaaggtcagtcctgtggcgtttacactgagagatgtgcccaggggctccgatgtctcccaagacaggatgaggagaagccactacatgccctcctgcacggcagaggagtgtgcctgaatgagaagtcgtaccgggagcaagtcaaaatcgagagggactcccgggagcacgaagaacctacaacgtctgaaatggctgaggagacatattctcccaagatttttagacccaaacataccagaatctccgaacttaaggctgaggccgtgaaaaaagataggagaaaaaagttaacgcagagcaagttcgtgggcggagccgaaaatactgcccatcccaggatcatcagcgccccagaaatgcgacaggagtctgagcagggtccttgtcgcagacatatggaggcaagtttgcaggaactcaaggctagccccaggatggtgcccagggccgtgtacctgcctaattgcgacagaaaaggcttctacaaacgtaagcagtgtaaacccagtcgcggtcgcaaacgaggtatttgctggtgtgtggacaagtatggaatgaagctgccaggtatggagtatgtagacggggacttccaatgtcatacattcgattctagtaacgtggagtag

SEQ ID NO: 13365 - DNA, 819 bp, Artificial Sequence
  derived and/or modified sequence
atggtgttgcttactgccgtgctccttttgctggctgcctacgctggtccagcccagagtctagggtccttcgtgcattgtgaaccctgtgatgaaaaggctctgtctatgtgccctccctcaccactgggttgcgaactggttaaagagcccgggtgtggctgctgcatgacctgtgccctcgccgaaggccagagttgcggagtgtacaccgagcgatgtgcccaggggctgaggtgtcttcctagacaggacgaagagaaaccgctacatgctctcttacacggaagaggggtctgtctgaatgagaaatcctaccgtgaacaggtgaaaatcgagagagattcgagagagcacgaggagccaaccacaagcgaaatggcagaggaaacctactcccctaagattttcaggccgaagcatacaagaatctccgagctcaaggctgaagcagtgaaaaaggataggcgaaaaaagctgactcaaagcaaattcgttggaggcgcagagaataccgcccaccctaggataatatccgcacccgaaatgcggcaggaaagcgaacagggaccttgccgtagacacatggaagcttccctgcaggagctgaaagctagccccagaatggtaccccgagccgtgtatcttcctaattgtgaccggaaggggttctacaaacggaaacaatgtaagccttcaagggggcgtaagcggggcatttgttggtgtgttgataagtacggaatgaaattaccaggcatggagtacgttgacggagattttcagtgccacacatttgattcatccaacgtggagtag

SEQ ID NO: 13366 - DNA, 819 bp, Artificial Sequence
  derived and/or modified sequence
atggttctattgacggctgtgcttctgttgctcgccgcgtacgccgggcccgcacaatcgctaggatcttttgtgcactgtgagccttgcgatgaaaaagcccttagtatgtgtcctccttctcctttaggctgcgagttagtgaaagagcccggctgcggttgctgtatgacttgtgccctggcagagggacaaagttgtggcgtctacacagaacgttgtgctcaaggacttcgctgcctgcctcggcaggatgaagaaaaacccctccacgcgctgttacatggacgcggtgtgtgcctcaacgaaaaatcataccgggagcaggtcaaaatagagcgggacagcagagagcatgaagagccgacgacttccgaaatggccgaagaaacatatagccctaagattttcagaccaaagcacaccagaatcagcgaactaaaggccgaagccgtaaagaaggatcggaggaaaaagctaacacagtcaaaatttgtgggaggcgccgaaaatacagcccacccaagaatcatctccgccccggaaatgcgtcaagaatctgagcaaggcccttgcaggagacacatggaagccagccttcaggaacttaaggccagtcctcgcatggtcccaagagccgtttacctacccaattgtgacagaaagggattttacaaaagaaaacagtgtaaaccctctcgaggaagaaagagagggatctgctggtgcgtggacaagtatggcatgaagctgcccgggatggagtatgtggatggggatttccaatgtcataccttcgacagttcaaatgtggaatag

SEQ ID NO: 13367 - DNA, 819 bp, Artificial Sequence
  derived and/or modified sequence
atggtgctgctgaccgccgtgctgctgctgctggccgcctacgccggccccgcccagagcctgggcagcttcgtgcactgcgagccctgcgacgagaaggccctgagcatgtgcccccccagccccctgggctgcgagctggtgaaggagcccggctgcggctgctgcatgacctgcgccctggccgagggccagagctgcggcgtgtacaccgagagatgcgcccagggcctgagatgcctgcccagacaggacgaggagaagcccctgcacgccctgctgcacggcagaggcgtgtgcctgaacgagaagagctacagagagcaggtgaagatcgagagagacagcagagagcacgaggagcccaccaccagcgagatggccgaggagacctacagccccaagatcttcagacccaagcacaccagaatcagcgagctgaaggccgaggccgtgaagaaggacagaagaaagaagctgacccagagcaagttcgtgggcggcgccgagaacaccgcccaccccagaatcatcagcgcccccgagatgagacaggagagcgagcagggcccctgcagaagacacatggaggccagcctgcaggagctgaaggccagccccagaatggtgcccagagccgtgtacctgcccaactgcgacagaaagggcttctacaagagaaagcagtgcaagcccagcagaggcagaaagagaggcatctgctggtgcgtggacaagtacggcatgaagctgcccggcatggagtacgtggacggcgacttccagtgccacaccttcgacagcagcaacgtggagtag

SEQ ID NO: 13368 - protein, 212 aa, Artificial Sequence
  derived and/or modified sequence
MNSFSTSAFGPVAFSLGLLLVLPAAFPAPVPPGEDSKDVAAPHRQPLTSSERIDKQIRYILDGISALRKETCNKSNMCESSKEALAENNLNLPKMAEKDGCFQSGFNEETCLVKIITGLLEFEVYLEYLQNRFESSEEQARAVQMSTKVLIQFLQKKAKNLDAITTPDPTTNASLLTKLQAQNQWLQDMTTHLILRSFKEFLQSSLRALRQM

SEQ ID NO: 13369 - protein, 152 aa, Artificial Sequence
  derived and/or modified sequence
MNSFSTSAFGPVAFSLGLLLVLPAAFPAPVPPGEDSKDVAAPHRQPLTSSERIDKQIRYILDGISALRKETCNKSNMCESSKEALAENNLNLPKMAEKDGCFQSGFNEETCLVKIITGLLEFEVYLEYLQNRFESSEEQARAVQMSTKVLIQ

SEQ ID NO: 13370 - DNA, 639 bp, Artificial Sequence
  derived and/or modified sequence
atgaacagcttcagcaccagcgccttcggccccgtggccttcagcctgggcctgctgctggtgctgcccgccgccttccccgcccccgtgccccccggcgaggacagcaaggacgtggccgccccccacagacagcccctgaccagcagcgagagaatcgacaagcagatcagatacatcctggacggcatcagcgccctgagaaaggagacctgcaacaagagcaacatgtgcgagagcagcaaggaggccctggccgagaacaacctgaacctgcccaagatggccgagaaggacggctgcttccagagcggcttcaacgaggagacctgcctggtgaagatcatcaccggcctgctggagttcgaggtgtacctggagtacctgcagaacagattcgagagcagcgaggagcaggccagagccgtgcagatgagcaccaaggtgctgatccagttcctgcagaagaaggccaagaacctggacgccatcaccacccccgaccccaccaccaacgccagcctgctgaccaagctgcaggcccagaaccagtggctgcaggacatgaccacccacctgatcctgagaagcttcaaggagttcctgcagagcagcctgagagccctgagacagatgtag

SEQ ID NO: 13371 - DNA, 459 bp, Artificial Sequence
  derived and/or modified sequence
atgaacagcttcagcaccagcgccttcggccccgtggccttcagcctgggcctgctgctggtgctgcccgccgccttccccgcccccgtgccccccggcgaggacagcaaggacgtggccgccccccacagacagcccctgaccagcagcgagagaatcgacaagcagatcagatacatcctggacggcatcagcgccctgagaaaggagacctgcaacaagagcaacatgtgcgagagcagcaaggaggccctggccgagaacaacctgaacctgcccaagatggccgagaaggacggctgcttccagagcggcttcaacgaggagacctgcctggtgaagatcatcaccggcctgctggagttcgaggtgtacctggagtacctgcagaacagattcgagagcagcgaggagcaggccagagccgtgcagatgagcaccaaggtgctgatccagtag

SEQ ID NO: 13372 - DNA, 639 bp, Artificial Sequence
  derived and/or modified sequence
atgaactccttctcaacctccgcatttggtcctgtggcctttagcctaggcttgctgcttgtccttccagcagcctttccagcaccggtcccccccggcgaagactccaaggacgtcgccgctccgcataggcagccactgacgtcttcggagcggatcgacaagcagatccggtacatcctggatgggatcagtgccctcaggaaagagacttgcaataagtctaacatgtgcgagtcctccaaagaggcactggcagagaacaaccttaacctgcccaagatggcagagaaagacggctgtttccagagcggctttaacgaagagacatgcctggtcaagattatcactggcttgctggagttcgaagtttaccttgagtacctgcagaatcgcttcgaaagttccgaggaacaagcacgggctgtacagatgtctaccaaggtactgatccagtttctgcagaagaaagcaaagaatctggatgccatcacaacacctgatcccacgactaacgcctcattgctcaccaagcttcaagctcagaatcaatggctgcaagacatgaccacacatttaattctcagatccttcaaagaatttctgcagtcctcccttagggctctgagacagatgtag

SEQ ID NO: 13373 - DNA, 639 bp, Artificial Sequence
  derived and/or modified sequence
atgaattcttttagtacctcagcctttgggccggtggccttcagtctgggccttctcctcgtgctgcccgctgctttccccgctcctgtgccgccaggcgaggattctaaagatgtggcagcccctcatcggcaacctttaacaagttctgaaagaattgacaagcagatccggtacatactggatgggatttccgcgctccggaaagaaacttgtaataagtccaacatgtgcgaaagctccaaagaggcactggcggaaaataaccttaatctcccaaaaatggccgaaaaggacggctgttttcagagtggtttcaatgaggaaacctgcctggtgaaaatcatcaccgggctgctggaattcgaggtgtatctagagtatctgcagaacaggtttgagagcagtgaggagcaggctcgtgcagtccagatgtccaccaaagtgctgatacagtttttgcagaaaaaggccaagaatcttgacgccatcacgacccccgatccaaccactaacgcctcactcttgactaagctgcaggcccaaaatcaatggctgcaggatatgacgactcatctgatacttcgctccttcaaagaattcctgcaatcatccctgcgtgctctcagacagatgtag

SEQ ID NO: 13374 - DNA, 459 bp, Artificial Sequence
  derived and/or modified sequence
atgaatagcttctcaacgtccgcatttgggcctgtcgcattcagtctgggcctgttgttggtcctgccagccgcgttccccgccccggtccccccaggggaagactccaaggacgtggcagctccacacaggcagccgcttacctctagcgagcggattgacaagcagataaggtatatcctcgacgggatttcagccttacggaaggaaacctgtaacaagtcaaatatgtgtgagtcatccaaagaggccctcgctgaaaacaacctgaatctcccaaaaatggctgaaaaggacgggtgcttccagtctggattcaatgaagagacctgtctggtgaaaattatcaccggactcctggaattcgaggtgtacctcgaatacttacagaaccgctttgagtcctcagaggagcaggctcgcgcggtgcagatgtccacaaaagtactgatacagtag

SEQ ID NO: 13375 - DNA, 639 bp, Artificial Sequence
  derived and/or modified sequence
atgaacagcttcagcaccagcgcctttggacctgtggccttcagcctgggcctgctgctggtgctgcctgctgccttccctgcccctgtgcccccaggagaggacagcaaggatgtggccgccccccaccggcagcccctgaccagcagcgagagaattgacaagcagatccgctacatcctggatggcatcagcgccctgaggaaggagacctgcaacaagagcaacatgtgtgagagcagcaaggaggccctggccgagaacaacctgaacctgcccaagatggccgagaaggatggctgcttccagagcggcttcaatgaggagacctgcctggtgaagatcatcaccggcctgctggagtttgaggtgtacctggagtacctgcagaacagatttgagagcagcgaggagcaggcccgggctgtgcagatgagcaccaaggtgctgatccagttcctgcagaagaaggccaagaacctggatgccatcaccaccccagaccccaccaccaatgccagcctgctgaccaagctgcaggcccagaaccagtggctgcaggacatgaccacccacctgatcctgcgctccttcaaggagttcctgcagagcagcctgcgggccctgcggcagatgtag

SEQ ID NO: 13376 - DNA, 459 bp, Artificial Sequence
  derived and/or modified sequence
atgaacagcttcagcaccagcgcctttggacctgtggccttcagcctgggcctgctgctggtgctgcctgctgccttccctgcccctgtgcccccaggagaggacagcaaggatgtggccgccccccaccggcagcccctgaccagcagcgagagaattgacaagcagatccgctacatcctggatggcatcagcgccctgaggaaggagacctgcaacaagagcaacatgtgtgagagcagcaaggaggccctggccgagaacaacctgaacctgcccaagatggccgagaaggatggctgcttccagagcggcttcaatgaggagacctgcctggtgaagatcatcaccggcctgctggagtttgaggtgtacctggagtacctgcagaacagatttgagagcagcgaggagcaggcccgggctgtgcagatgagcaccaaggtgctgatccagtag

SEQ ID NO: 13377 - DNA, 1170 bp, Artificial Sequence
  derived and/or modified sequence
aatattagagtctcaacccccaataaatataggactggagatgtctgaggctcattctgccctcgagcccaccgggaacgaaagagaagctctatctcccctccaggagcccagctatgaactccttctccacaagcgccttcggtccagttgccttctccctggggctgctcctggtgttgcctgctgccttccctgccccagtacccccaggagaagattccaaagatgtagccgccccacacagacagccactcacctcttcagaacgaattgacaaacaaattcggtacatcctcgacggcatctcagccctgagaaaggagacatgtaacaagagtaacatgtgtgaaagcagcaaagaggcactggcagaaaacaacctgaaccttccaaagatggctgaaaaagatggatgcttccaatctggattcaatgaggagacttgcctggtgaaaatcatcactggtcttttggagtttgaggtatacctagagtacctccagaacagatttgagagtagtgaggaacaagccagagctgtgcagatgagtacaaaagtcctgatccagttcctgcagaaaaaggcaaagaatctagatgcaataaccacccctgacccaaccacaaatgccagcctgctgacgaagctgcaggcacagaaccagtggctgcaggacatgacaactcatctcattctgcgcagctttaaggagttcctgcagtccagcctgagggctcttcggcaaatgtagcatgggcacctcagattgttgttgttaatgggcattccttcttctggtcagaaacctgtccactgggcacagaacttatgttgttctctatggagaactaaaagtatgagcgttaggacactattttaattatttttaatttattaatatttaaatatgtgaagctgagttaatttatgtaagtcatatttatatttttaagaagtaccacttgaaacattttatgtattagttttgaaataataatggaaagtggctatgcagtttgaatatcctttgtttcagagccagatcatttcttggaaagtgtaggcttacctcaaataaatggctaacttatacatatttttaaagaaatatttatattgtatttatataatgtataaatggtttttataccaataaatggcatttt

SEQ ID NO: 13378 - DNA, 1527 bp, Artificial Sequence
  derived and/or modified sequence
aggtaacaccatgtttggtaaataagtgttttggtgttgtgcaagggtctggtttcagcctgaagccatctcagagctgtctgggtctctggagactggagggacaacctagtctagagcccatttgcatgagaccaaggatcctcctgcaagagacaccatcctgagggaagagggcttctgaaccagcttgacccaataagaaattcttgggtgccgacgcggaagcagattcagagcctagagccgtgcctgcgtccgtagtttccttctagcttcttttgatttcaaatcaagacttacagggagagggagcgataaacacaaactctgcaagatgccacaaggtcctcctttgacatccccaacaaagaggactggagatgtctgaggctcattctgccctcgagcccaccgggaacgaaagagaagctctatctcccctccaggagcccagctatgaactccttctccacaagcgccttcggtccagttgccttctccctggggctgctcctggtgttgcctgctgccttccctgccccagtacccccaggagaagattccaaagatgtagccgccccacacagacagccactcacctcttcagaacgaattgacaaacaaattcggtacatcctcgacggcatctcagccctgagaaaggagacatgtaacaagagtaacatgtgtgaaagcagcaaagaggcactggcagaaaacaacctgaaccttccaaagatggctgaaaaagatggatgcttccaatctggattcaatgaggagacttgcctggtgaaaatcatcactggtcttttggagtttgaggtatacctagagtacctccagaacagatttgagagtagtgaggaacaagccagagctgtgcagatgagtacaaaagtcctgatccagttcctgcagaaaaaggcaaagaatctagatgcaataaccacccctgacccaaccacaaatgccagcctgctgacgaagctgcaggcacagaaccagtggctgcaggacatgacaactcatctcattctgcgcagctttaaggagttcctgcagtccagcctgagggctcttcggcaaatgtagcatgggcacctcagattgttgttgttaatgggcattccttcttctggtcagaaacctgtccactgggcacagaacttatgttgttctctatggagaactaaaagtatgagcgttaggacactattttaattatttttaatttattaatatttaaatatgtgaagctgagttaatttatgtaagtcatatttatatttttaagaagtaccacttgaaacattttatgtattagttttgaaataataatggaaagtggctatgcagtttgaatatcctttgtttcagagccagatcatttcttggaaagtgtaggcttacctcaaataaatggctaacttatacatatttttaaagaaatatttatattgtatttatataatgtataaatggtttttataccaataaatggcattttaaaaaattcagcaa

SEQ ID NO: 13379 - DNA, 574 bp, Artificial Sequence
  derived and/or modified sequence
aatattagagtctcaacccccaataaatataggactggagatgtctgaggctcattctgccctcgagcccaccgggaacgaaagagaagctctatctcccctccaggagcccagctatgaactccttctccacaagcgccttcggtccagttgccttctccctggggctgctcctggtgttgcctgctgccttccctgccccagtacccccaggagaagattccaaagatgtagccgccccacacagacagccactcacctcttcagaacgaattgacaaacaaattcggtacatcctcgacggcatctcagccctgagaaaggagacatgtaacaagagtaacatgtgtgaaagcagcaaagaggcactggcagaaaacaacctgaaccttccaaagatggctgaaaaagatggatgcttccaatctggattcaatgaggagacttgcctggtgaaaatcatcactggtcttttggagtttgaggtatacctagagtacctccagaacagatttgagagtagtgaggaacaagccagagctgtgcagatgagtacaaaagtcctgatccagtt

SEQ ID NO: 13380 - DNA, 639 bp, Artificial Sequence
  derived and/or modified sequence
atgaacagcttcagcaccagcgccttcggccccgtggccttcagcctgggactcctactagttctgcctgcagcctttcctgccccggtcccgcccggggaagacagcaaagatgtggcagcacctcatagacagccgctgacttcgagtgaaagaatcgataaacagatacggtacattctcgacgggatctctgccctgcggaaagagacctgcaataagtcgaacatgtgtgagagcagcaaggaagccctggctgaaaataatctcaatttacccaagatggcagagaaggatggatgctttcagtcgggttttaatgaagagacctgcctggtcaagatcataaccggattgttagaattcgaggtgtatctggagtatcttcaaaaccggttcgaaagcagtgaggaacaagccagggccgtccagatgtccactaaagtgctgattcagttcctccaaaaaaaagccaagaatcttgatgcaattactacgccggatcctaccacaaacgctagtctgctcacaaagctgcaagcccaaaatcagtggcttcaggacatgacgacacacctgatactcaggtcatttaaagagtttctgcagtcatcgttgcgtgcactgcgccagatgtag

SEQ ID NO: 13381 - DNA, 639 bp, Artificial Sequence
  derived and/or modified sequence
atgaacagcttcagcaccagcgccttcggccccgtggccttcagcctggggctgctgttagtcctgccagcggcatttccggccccggtgcctccaggggaagactcaaaagacgtggcagcgcctcataggcagccgttgacaagctcagaacggatcgataagcagattaggtatatcctggatggcatctccgcccttcgtaaagaaacatgtaacaagtcaaacatgtgcgagtcctctaaagaggctctggcggaaaacaacttgaatcttccaaagatggccgagaaagacggatgcttccagagcgggttcaatgaggagacttgcctggtgaaaattattaccgggctattagagttcgaagtctatttagaatacctccagaaccgttttgagagcagtgaggagcaggccagggccgtgcagatgtctacaaaggttctcatccagtttttacagaagaaggccaagaacctggacgccattacaacaccggaccccactaccaatgcttcccttctgacaaaattgcaggctcagaatcaatggctccaggatatgactacgcacttaattctgaggagttttaaagaattcctgcagagctcccttagggcactgcgccagatgtag

SEQ ID NO: 13382 - DNA, 459 bp, Artificial Sequence
  derived and/or modified sequence
atgaacagcttcagcaccagcgccttcggccccgtggccttcagcctcggcttactgctggtcctgccagccgctttccccgcccctgtgcctccaggcgaggactcgaaggacgtagctgcaccacatagacagcccttgacttcttcggaacgcatcgataagcaaattagatatatcctcgatggcatatccgctcttaggaaggaaacctgcaataagtccaacatgtgcgagagttcaaaagaggcgctcgcagaaaacaatctcaacctccccaaaatggctgagaaggacggctgtttccagtccggctttaacgaagaaacctgcttggtcaagataataacaggactgctagagtttgaggtgtaccttgaatatctccaaaataggttcgaatcctccgaagagcaggcccgagccgtgcagatgtccaccaaggttctcattcagtag

SEQ ID NO: 13383 - DNA, 639 bp, Artificial Sequence
  derived and/or modified sequence
atgaatagtttttccacatcggcatttggacctgtggccttcagcctgggcctgctccttgtcctccctgccgcattccccgctcccgtgcctccaggggaggactctaaagatgtggcggctccccataggcagcccctgacatcatccgagcgcatcgacaagcagatccggtacatcctggatgggatatctgcattgcgaaaggagacatgtaataagagcaacatgtgtgaatcatccaaagaggctctggccgagaacaatctgaacctccctaaaatggccgaaaaggacggttgttttcagtcaggctttaatgaagaaacctgcttagtgaagataatcaccggactgctggaatttgaagtttatctggagtacctgcagaatcggtttgaaagctctgaggaacaggcgagagctgtgcagatgagtaccaaggttcttatacagttcctgcagaaaaaagcgaaaaatttagacgcgattaccacacccgaccccacgaccaatgccagcctgttgacaaaactccaggcccagaaccagtggctccaggacatgacaacgcacctgatactccggagctttaaagaatttcttcaatcgtcactccgggcacttcgacaaatgtag

SEQ ID NO: 13384 - DNA, 639 bp, Artificial Sequence
  derived and/or modified sequence
atgaatagcttctccaccagcgcttttggtcctgtggccttttcactcggcctgctgttggttttgccggcagcctttcccgctccagtgcctcctggagaagacagcaaggacgtggccgcacctcataggcaaccgttaacgagttcggagcggatagacaaacagatacgttatatactcgatggcatttcggctctacggaaggagacctgcaacaaaagcaatatgtgcgaaagttcaaaggaagccctggcagaaaataacttgaatctccccaagatggccgaaaaagatggctgttttcaatcaggattcaacgaagagacctgcctggttaaaatcatcaccggtctgctagaatttgaggtttacctggagtacctacagaacagatttgagtcttccgaagagcaagccagggcggtgcagatgtccactaaggtgttaatccagtttttacagaagaaagcaaaaaacctggatgcaataactacccccgacccaacaacaaacgccagccttttaaccaagttacaggcccagaatcagtggctgcaggacatgacgacacacctgattttacgcagttttaaagagtttctgcagagttcgctgagggccctgcgccagatgtag

SEQ ID NO: 13385 - DNA, 459 bp, Artificial Sequence
  derived and/or modified sequence
atgaactcctttagcacctctgcttttgggccagtagccttttcccttgggctgctccttgtcctacccgcagcctttccagctccagtccctcccggtgaggacagtaaggacgtggccgctcctcataggcaacctctcacaagtagcgagaggattgataagcagattcgctatatcctcgatggtatcagtgccttgcgcaaggaaacctgtaataagagcaacatgtgcgagagttccaaagaagccctcgcagagaataaccttaaccttcccaagatggcagagaaagacggttgcttccaaagtggcttcaacgaagagacctgtctggtgaaaataattaccgggctgctggaattcgaggtgtacctggagtatctgcagaacaggtttgaatcatctgaggagcaggcacgcgctgtgcagatgtcaaccaaagttctaattcagtag

SEQ ID NO: 13386 - DNA, 639 bp, Artificial Sequence
  derived and/or modified sequence
atgaactcattcagcacctctgcattcggccctgttgccttctccctcggcctgctcctcgtgctgcctgccgcttttcccgcacctgtgcctcccggcgaagactccaaggacgtggccgcaccccaccggcaacccctgacttcctctgagcgaatcgataaacaaatccgatatattcttgacggaatcagcgccctcagaaaagaaacttgtaataagagcaatatgtgcgagtcctcaaaagaagccctggccgaaaataatttaaacttgcccaagatggcagaaaaggatggctgctttcaatctggattcaacgaggagacctgccttgttaaaataattaccggactcctggagttcgaagtttatctggagtacctgcaaaaccgctttgaatcaagcgaagaacaggccagagctgtgcagatgtcaaccaaggtgctgattcaattcctgcagaaaaaggcgaagaacctggatgctatcaccaccccagatcctaccactaacgcctcactactaacaaaacttcaggcacagaatcagtggctccaagatatgaccacccacttaatcctgcgcagttttaaagagtttttgcaatcctctttgcgtgcccttcggcaaatgtag

SEQ ID NO: 13387 - DNA, 639 bp, Artificial Sequence
  derived and/or modified sequence
atgaactccttctccaccagcgcattcgggcctgttgccttttcccttggcctcctgttagtactcccagcggcctttcccgctccggttcctcccggcgaagatagtaaagatgtggcagccccgcaccgccagccactaacaagttcagaaaggattgacaagcagatccggtatattttggacggcatctcggcactccgtaaagagacatgcaataagtcaaacatgtgtgagtcttccaaggaggcccttgctgaaaacaatttgaatctgcccaagatggctgaaaaggatgggtgcttccagtccggatttaacgaggagacgtgtcttgtcaagatcattactggattactcgaattcgaagtttatttagaatatttgcaaaaccgattcgagtcgtctgaagaacaagctcgggcagtacagatgagcactaaagttttaatacagttccttcaaaaaaaggctaagaacctcgacgccattacaactcccgaccctacaacgaatgcaagcctcctgacgaaactgcaagcacagaatcagtggctacaagacatgactacccatctgatcttaaggagttttaaagagtttttacaaagctcactaagggctctccgccaaatgtag

SEQ ID NO: 13388 - DNA, 459 bp, Artificial Sequence
  derived and/or modified sequence
atgaactcattcagtacatcagcctttggcccagtcgctttttctctgggattgctgcttgtgttacccgccgcctttcccgcaccagtcccgcccggggaggactctaaagatgttgccgcaccacacagacagccactcacgtcaagcgagagaattgacaagcagattagatacatcctcgatggcattagtgccctgagaaaagagacatgcaacaagtcaaacatgtgcgaaagctctaaagaggccttggccgagaacaacctgaatctgccaaagatggctgaaaaagacgggtgtttccagtcaggttttaatgaagagacttgtctcgtgaagataataaccggactgctggagttcgaagtgtatttagaatacttgcaaaacaggtttgagtccagtgaagaacaggcaagagcggtgcaaatgtctactaaagtcctgattcagtag

SEQ ID NO: 13389 - DNA, 639 bp, Artificial Sequence
  derived and/or modified sequence
atgaactcgttttctacttccgcctttggacccgtggctttcagtctgggcctcctgcttgtactgcccgccgcttttcccgcaccggtcccaccaggcgaagattcaaaggacgtggcagccccacatagacagcccctaacctcaagcgagaggattgataagcagattaggtacatcctggatggaatttctgcattgagaaaagagacttgtaataagagtaatatgtgtgaatcctctaaagaagccctcgccgagaataacttaaatctccctaagatggcagagaaagatggatgctttcagtcgggatttaatgaagaaacctgtctggtaaagatcatcactgggctgttggagttcgaagtttacttagagtatttacagaaccgtttcgaatcttcagaggaacaggccagagccgtgcagatgtccacgaaagtgcttattcaatttctgcagaaaaaagccaaaaacctcgacgcaatcactacacccgatcctacaacaaacgcatccctcctgacaaagctccaggcgcagaaccagtggctgcaagatatgactactcatctcatcttacgctcttttaaagaatttctccaatcttccttacgagccttgcgtcagatgtag

SEQ ID NO: 13390 - DNA, 639 bp, Artificial Sequence
  derived and/or modified sequence
atgaattcattttctacctcagcttttggaccggtggctttcagcctcggcttactgctagtgctcccagctgctttcccggcacccgtgcctcctggagaggactcaaaggacgtcgctgcaccccacagacaacctctcacttcaagcgagcgcatagacaaacagatcagatacattctggatggtatcagcgcattgagaaaagaaacatgcaacaagtcaaatatgtgtgagagctctaaagaagctctagccgaaaataacctgaatctccctaagatggccgaaaaggacggttgcttccagtccggatttaacgaggagacgtgtcttgtcaagatcattactggattactcgaattcgaagtttatttagaatatttgcaaaaccgattcgagtcgtctgaagaacaagctcgggcagtacagatgagcactaaagttttaatacagttccttcaaaaaaaggctaagaacctcgacgccattacaactcccgaccctacaacgaatgcaagcctcctgacgaaactgcaagcacagaatcagtggctacaagacatgactacccatctgatcttaaggagttttaaagagttcctccaatctagcctacgcgcactcagacaaatgtag

SEQ ID NO: 13391 - DNA, 459 bp, Artificial Sequence
  derived and/or modified sequence
atgaattcattctcaactagcgcgtttggcccagtggccttcagcctcggcctgttattagtactgcccgcagctttccccgcccctgttcctccaggagaggactccaaggatgtcgcagccccccatcgtcagcccctgacttctagtgaaagaattgataagcagatccggtatattctggatggcatatccgcccttagaaaagagacctgtaataagagtaatatgtgcgaaagtagcaaggaagccctcgcagagaacaatttgaacctcccaaagatggctgagaaagatggttgttttcagtctggcttcaatgaggagacctgcctagtgaaaattattaccggccttcttgagttcgaagtttaccttgaatatctacaaaaccgattcgagtcaagtgaagaacaggctagggctgtacagatgtcaaccaaggtgcttatacaatag

SEQ ID NO: 13392 - RNA, 639 nt, Artificial Sequence
  derived and/or modified sequence
augaacucauucagcaccucugcauucggcccuguugccuucucccucggccugcuccucgugcugccugccgcuuuucccgcaccugugccucccggcgaagacuccaaggacguggccgcaccccaccggcaaccccugacuuccucugagcgaaucgauaaacaaauccgauauauucuugacggaaucagcgcccucagaaaagaaacuuguaauaagagcaauaugugcgaguccucaaaagaagcccuggccgaaaauaauuuaaacuugcccaagauggcagaaaaggauggcugcuuucaaucuggauucaacgaggagaccugccuuguuaaaauaauuaccggacuccuggaguucgaaguuuaucuggaguaccugcaaaaccgcuuugaaucaagcgaagaacaggccagagcugugcagaugucaaccaaggugcugauucaauuccugcagaaaaaggcgaagaaccuggaugcuaucaccaccccagauccuaccacuaacgccucacuacuaacaaaacuucaggcacagaaucaguggcuccaagauaugaccacccacuuaauccugcgcaguuuuaaagaguuuuugcaauccucuuugcgugcccuucggcaaauguag

SEQ ID NO: 13393 - RNA, 639 nt, Artificial Sequence
  derived and/or modified sequence
augaacuccuucuccaccagcgcauucgggccuguugccuuuucccuuggccuccuguuaguacucccagcggccuuucccgcuccgguuccucccggcgaagauaguaaagauguggcagccccgcaccgccagccacuaacaaguucagaaaggauugacaagcagauccgguauauuuuggacggcaucucggcacuccguaaagagacaugcaauaagucaaacaugugugagucuuccaaggaggcccuugcugaaaacaauuugaaucugcccaagauggcugaaaaggaugggugcuuccaguccggauuuaacgaggagacgugucuugucaagaucauuacuggauuacucgaauucgaaguuuauuuagaauauuugcaaaaccgauucgagucgucugaagaacaagcucgggcaguacagaugagcacuaaaguuuuaauacaguuccuucaaaaaaaggcuaagaaccucgacgccauuacaacucccgacccuacaacgaaugcaagccuccugacgaaacugcaagcacagaaucaguggcuacaagacaugacuacccaucugaucuuaaggaguuuuaaagaguuuuuacaaagcucacuaagggcucuccgccaaauguag

SEQ ID NO: 13394 - RNA, 459 nt, Artificial Sequence
  derived and/or modified sequence
augaacucauucaguacaucagccuuuggcccagucgcuuuuucucugggauugcugcuuguguuacccgccgccuuucccgcaccagucccgcccggggaggacucuaaagauguugccgcaccacacagacagccacucacgucaagcgagagaauugacaagcagauuagauacauccucgauggcauuagugcccugagaaaagagacaugcaacaagucaaacaugugcgaaagcucuaaagaggccuuggccgagaacaaccugaaucugccaaagauggcugaaaaagacggguguuuccagucagguuuuaaugaagagacuugucucgugaagauaauaaccggacugcuggaguucgaaguguauuuagaauacuugcaaaacagguuugaguccagugaagaacaggcaagagcggugcaaaugucuacuaaaguccugauucaguag

SEQ ID NO: 13395 - RNA, 639 nt, Artificial Sequence
  derived and/or modified sequence
augaacucguuuucuacuuccgccuuuggacccguggcuuucagucugggccuccugcuuguacugcccgccgcuuuucccgcaccggucccaccaggcgaagauucaaaggacguggcagccccacauagacagccccuaaccucaagcgagaggauugauaagcagauuagguacauccuggauggaauuucugcauugagaaaagagacuuguaauaagaguaauaugugugaauccucuaaagaagcccucgccgagaauaacuuaaaucucccuaagauggcagagaaagauggaugcuuucagucgggauuuaaugaagaaaccugucugguaaagaucaucacugggcuguuggaguucgaaguuuacuuagaguauuuacagaaccguuucgaaucuucagaggaacaggccagagccgugcagauguccacgaaagugcuuauucaauuucugcagaaaaaagccaaaaaccucgacgcaaucacuacacccgauccuacaacaaacgcaucccuccugacaaagcuccaggcgcagaaccaguggcugcaagauaugacuacucaucucaucuuacgcucuuuuaaagaauuucuccaaucuuccuuacgagccuugcgucagauguag

SEQ ID NO: 13396 - RNA, 639 nt, Artificial Sequence
  derived and/or modified sequence
augaauucauuuucuaccucagcuuuuggaccgguggcuuucagccucggcuuacugcuagugcucccagcugcuuucccggcacccgugccuccuggagaggacucaaaggacgucgcugcaccccacagacaaccucucacuucaagcgagcgcauagacaaacagaucagauacauucuggaugguaucagcgcauugagaaaagaaacaugcaacaagucaaauaugugugagagcucuaaagaagcucuagccgaaaauaaccugaaucucccuaagauggccgaaaaggacgguugcuuccaguccggauuuaacgaggagacgugucuugucaagaucauuacuggauuacucgaauucgaaguuuauuuagaauauuugcaaaaccgauucgagucgucugaagaacaagcucgggcaguacagaugagcacuaaaguuuuaauacaguuccuucaaaaaaaggcuaagaaccucgacgccauuacaacucccgacccuacaacgaaugcaagccuccugacgaaacugcaagcacagaaucaguggcuacaagacaugacuacccaucugaucuuaaggaguuuuaaagaguuccuccaaucuagccuacgcgcacucagacaaauguag

SEQ ID NO: 13397 - RNA, 459 nt, Artificial Sequence
  derived and/or modified sequence
augaauucauucucaacuagcgcguuuggcccaguggccuucagccucggccuguuauuaguacugcccgcagcuuuccccgccccuguuccuccaggagaggacuccaaggaugucgcagccccccaucgucagccccugacuucuagugaaagaauugauaagcagauccgguauauucuggauggcauauccgcccuuagaaaagagaccuguaauaagaguaauaugugcgaaaguagcaaggaagcccucgcagagaacaauuugaaccucccaaagauggcugagaaagaugguuguuuucagucuggcuucaaugaggagaccugccuagugaaaauuauuaccggccuucuugaguucgaaguuuaccuugaauaucuacaaaaccgauucgagucaagugaagaacaggcuagggcuguacagaugucaaccaaggugcuuauacaauag

SEQ ID NO: 13398 - protein, 728 aa, Artificial Sequence
  derived and/or modified sequence
MWVTKLLPALLLQHVLLHLLLLPIAIPYAEGQRKRRNTIHEFKKSAKTTLIKIDPALKIKTKKVNTADQCANRCTRNKGLPFTCKAFVFDKARKQCLWFPFNSMSSGVKKEFGHEFDLYENKDYIRNCIIGKGRSYKGTVSITKSGIKCQPWSSMIPHEHSFLPSSYRGKDLQENYCRNPRGEEGGPWCFTSNPEVRYEVCDIPQCSEVECMTCNGESYRGLMDHTESGKICQRWDHQTPHRHKFLPERYPDKGFDDNYCRNPDGQPRPWCYTLDPHTRWEYCAIKTCADNTMNDTDVPLETTECIQGQGEGYRGTVNTIWNGIPCQRWDSQYPHEHDMTPENFKCKDLRENYCRNPDGSESPWCFTTDPNIRVGYCSQIPNCDMSHGQDCYRGNGKNYMGNLSQTRSGLTCSMWDKNMEDLHRHIFWEPDASKLNENYCRNPDDDAHGPWCYTGNPLIPWDYCPISRCEGDTTPTIVNLDHPVISCAKTKQLRVVNGIPTRTNIGWMVSLRYRNKHICGGSLIKESWVLTARQCFPSRDLKDYEAWLGIHDVHGRGDEKCKQVLNVSQLVYGPEGSDLVLMKLARPAVLDDFVSTIDLPNYGCTIPEKTSCSVYGWGYTGLINYDGLLRVAHLYIMGNEKCSQHHRGKVTLNESEICAGAEKIGSGPCEGDYGGPLVCEQHKMRMVLGVIVPGRGCAIPNRPGIFVRVAYYAKWIHKIILTYKVPQS

SEQ ID NO: 13399 - protein, 296 aa, Artificial Sequence
  derived and/or modified sequence
MWVTKLLPALLLQHVLLHLLLLPIAIPYAEGQRKRRNTIHEFKKSAKTTLIKIDPALKIKTKKVNTADQCANRCTRNKGLPFTCKAFVFDKARKQCLWFPFNSMSSGVKKEFGHEFDLYENKDYIRNCIIGKGRSYKGTVSITKSGIKCQPWSSMIPHEHSFLPSSYRGKDLQENYCRNPRGEEGGPWCFTSNPEVRYEVCDIPQCSEVECMTCNGESYRGLMDHTESGKICQRWDHQTPHRHKFLPERYPDKGFDDNYCRNPDGQPRPWCYTLDPHTRWEYCAIKTCGDITWALN

SEQ ID NO: 13400 - DNA, 2820 bp, Artificial Sequence
  derived and/or modified sequence
gggagttcagacctagatctttccagttaatcacacaacaaacttagctcatcgcaataaaaagcagctcagagccgactggctcttttaggcactgactccgaacaggattctttcacccaggcatctcctccagagggatccgccagcccgtccagcagcaccatgtgggtgaccaaactcctgccagccctgctgctgcagcatgtcctcctgcatctcctcctgctccccatcgccatcccctatgcagagggacaaaggaaaagaagaaatacaattcatgaattcaaaaaatcagcaaagactaccctaatcaaaatagatccagcactgaagataaaaaccaaaaaagtgaatactgcagaccaatgtgctaatagatgtactaggaataaaggacttccattcacttgcaaggcttttgtttttgataaagcaagaaaacaatgcctctggttccccttcaatagcatgtcaagtggagtgaaaaaagaatttggccatgaatttgacctctatgaaaacaaagactacattagaaactgcatcattggtaaaggacgcagctacaagggaacagtatctatcactaagagtggcatcaaatgtcagccctggagttccatgataccacacgaacacagctttttgccttcgagctatcggggtaaagacctacaggaaaactactgtcgaaatcctcgaggggaagaagggggaccctggtgtttcacaagcaatccagaggtacgctacgaagtctgtgacattcctcagtgttcagaagttgaatgcatgacctgcaatggggagagttatcgaggtctcatggatcatacagaatcaggcaagatttgtcagcgctgggatcatcagacaccacaccggcacaaattcttgcctgaaagatatcccgacaagggctttgatgataattattgccgcaatcccgatggccagccgaggccatggtgctatactcttgaccctcacacccgctgggagtactgtgcaattaaaacatgcgctgacaatactatgaatgacactgatgttcctttggaaacaactgaatgcatccaaggtcaaggagaaggctacaggggcactgtcaataccatttggaatggaattccatgtcagcgttgggattctcagtatcctcacgagcatgacatgactcctgaaaatttcaagtgcaaggacctacgagaaaattactgccgaaatccagatgggtctgaatcaccctggtgttttaccactgatccaaacatccgagttggctactgctcccaaattccaaactgtgatatgtcacatggacaagattgttatcgtgggaatggcaaaaattatatgggcaacttatcccaaacaagatctggactaacatgttcaatgtgggacaagaacatggaagacttacatcgtcatatcttctgggaaccagatgcaagtaagctgaatgagaattactgccgaaatccagatgatgatgctcatggaccctggtgctacacgggaaatccactcattccttgggattattgccctatttctcgttgtgaaggtgataccacacctacaatagtcaatttagaccatcccgtaatatcttgtgccaaaacgaaacaattgcgagttgtaaatgggattccaacacgaacaaacataggatggatggttagtttgagatacagaaataaacatatctgcggaggatcattgataaaggagagttgggttcttactgcacgacagtgtttcccttctcgagacttgaaagattatgaagcttggcttggaattcatgatgtccacggaagaggagatgagaaatgcaaacaggttctcaatgtttcccagctggtatatggccctgaaggatcagatctggttttaatgaagcttgccaggcctgctgtcctggatgattttgttagtacgattgatttacctaattatggatgcacaattcctgaaaagaccagttgcagtgtttatggctggggctacactggattgatcaactatgatggcctattacgagtggcacatctctatataatgggaaatgagaaatgcagccagcatcatcgagggaaggtgactctgaatgagtctgaaatatgtgctggggctgaaaagattggatcaggaccatgtgagggggattatggtggcccacttgtttgtgagcaacataaaatgagaatggttcttggtgtcattgttcctggtcgtggatgtgccattccaaatcgtcctggtatttttgtccgagtagcatattatgcaaaatggatacacaaaattattttaacatataaggtaccacagtcatagctgaagtaagtgtgtctgaagcacccaccaatacaactgtcttttacatgaagatttcagagaatgtggaatttaaaatgtcacttacaacaatcctaagacaactactggagagtcatgtttgttgaaattctcattaatgtttatgggtgttttctgttgttttgtttgtcagtgttattttgtcaatgttgaagtgaattaaggtacatgcaagtgtaataacatatctcctgaagatacttgaatggattaaaaaaacacacaggtatatttgctggatgataaagatttcatgggaaaaaaaatcaattaatctgtctaagctgctttctgatgttggtttcttaataatgagtaaaccacaaattaaatgttattttaacctcaccaaaacaatttataccttgtgtccctaaattgtagccctatattaaattatattacatttcaaaaaaaaaaaaaaaa

SEQ ID NO: 13401 - DNA, 2184 bp, Artificial Sequence
  derived and/or modified sequence
atgtgggtgacgaagttgctgcccgcactgttgcttcagcatgtgcttttgcatcttctgttgctgccaattgctatcccatacgccgaaggacaacgtaagaggcgaaacacgatccatgagtttaagaaatcggcgaaaactaccctcataaagatcgatcctgcccttaagattaagaccaagaaagttaacacggcagaccaatgtgcaaatcgatgtacgaggaacaagggtctgccgttcacctgcaaggctttcgtgtttgacaaagctcgcaagcagtgtctctggtttccatttaactccatgagttcgggagtgaaaaaagagtttgggcacgagtttgatctgtacgagaacaaagactacatcagaaactgtattatcgggaaggggcgaagctacaaggggactgtctcaataaccaaatctgggatcaaatgtcagccgtggtcgtcgatgatcccacatgagcacagcttcctcccttcctcataccggggaaaggatctccaagaaaactattgcagaaacccaagaggtgaagaaggcggaccttggtgtttcacctcgaatccagaggtgcgatacgaggtctgcgatattccacagtgttctgaggtggaatgtatgacctgtaatggcgagtcgtacagaggccttatggatcacactgagtccggtaagatttgtcaaagatgggatcaccaaactccccaccggcacaagtttctcccagagcgctaccctgataagggatttgatgacaactattgccggaatcccgatggccaaccgcgtccgtggtgctacaccctggacccgcatacgagatgggaatactgtgcgattaagacctgcgcagacaatactatgaatgacaccgacgtccctctggaaaccactgaatgtattcagggccagggagagggataccgcggtactgtcaataccatctggaacggtatcccctgtcaacggtgggattcgcagtaccctcatgagcacgacatgactcctgaaaactttaagtgtaaggatcttcgcgaaaactactgcagaaaccccgacggttctgaatcgccatggtgctttaccactgatcctaacattcgtgtcggctactgttcccaaataccaaactgtgatatgagtcacgggcaggattgctacagagggaatggcaaaaactatatgggaaatctttcccaaaccagaagcggactcacttgtagcatgtgggataagaatatggaagatctccaccggcacattttctgggaaccagacgcatcaaagctcaacgagaattactgtaggaacccggatgacgatgcccatggaccctggtgttatactgggaatccactgataccctgggattactgcccaatttcacggtgcgagggagataccactcccaccattgtgaaccttgaccatcctgttatctcgtgtgcgaaaactaagcaactgcgagtggtcaatggaatccccactcggaccaacattgggtggatggtcagcttgcgataccggaataagcatatatgtggtggttcactcatcaaggaatcgtgggtgcttaccgcacgacaatgttttccttcgagggatctgaaggattacgaggcatggttgggcattcatgacgtccacggccgcggcgacgagaagtgcaagcaagtcctgaacgtgtcgcagctggtgtacgggcctgagggaagcgatctcgtgcttatgaagctcgccagacctgcagtgcttgatgattttgtgtccacgatcgatcttccaaactacggctgtacgattcctgaaaaaacttcttgcagcgtctacggatggggatacacgggtctgatcaattacgatgggctgctgagggtcgcccatttgtacattatgggtaacgagaagtgctcgcagcaccatcgcggaaaggtcaccttgaacgaatccgaaatttgcgcaggagcagaaaagatcggctcgggaccatgcgaaggcgattacgggggacctttggtgtgcgaacaacacaaaatgcggatggtccttggagtgatcgtgcctggaagaggatgtgctattcctaaccgtcctggcatctttgtgagagtggcatactatgccaagtggattcataagattatcctgacgtacaaagtgccacagtcc

SEQ ID NO: 13402 - DNA, 2184 bp, Artificial Sequence
  derived and/or modified sequence
atgtgggtgacaaaactgttaccagcgcttctcttacagcacgtgctcttacatctcctgctgctgcctatcgcaatcccatacgctgagggacagcgcaagcggaggaacactattcatgaattcaagaagtctgcaaagaccactctgattaagattgatccagcattgaaaattaagacaaaaaaagtgaatacggccgaccagtgtgccaaccgatgcacacgtaacaagggcctgccatttacatgcaaagcctttgtttttgacaaggcccgtaagcagtgcctgtggtttccattcaattctatgagttccggcgtgaagaaggaatttggccacgaatttgacttatacgaaaacaaagattacatccgaaactgcatcatcggaaagggacggtcctacaaaggtacggtgtccattactaagtctggtatcaagtgtcaaccctggtcaagcatgatccctcacgaacatagcttcctgccatccagttatagaggcaaggatctacaagagaactattgtagaaatccaaggggcgaagagggggggccttggtgctttacaagcaatcccgaagtccggtacgaagtgtgtgacattccccagtgttccgaagtcgagtgtatgacatgtaatggtgagtcctatcgggggttaatggaccacacagagtccggcaaaatctgccaacgctgggaccatcagaccccacaccgccacaagtttttgcctgaaaggtatcccgataaaggctttgatgacaattactgccgcaaccccgatggtcagccccggccctggtgttacacactggacccacatactcgctgggagtattgtgctattaagacgtgtgccgacaataccatgaatgatacagacgtgcctttagagacgaccgagtgtatccagggacagggcgagggatacagaggcacggttaacacaatctggaatggaattccatgtcagaggtgggattcacagtacccgcacgaacatgacatgactccagagaacttcaaatgcaaagacctgagggaaaattactgtaggaatcctgacggatctgaatctccctggtgtttcacgacagaccctaatattcgagtgggctattgttcacagatccccaattgtgacatgtctcacggccaggattgctatcgcgggaacggcaagaattatatgggtaacttgagtcagacaaggtccggactcacctgctcgatgtgggacaagaacatggaggacctacacaggcatatcttttgggagcctgatgctagcaagcttaatgagaactactgccgtaatcctgatgacgatgctcacggtccctggtgttataccggcaatccactcattccctgggactactgccccattagccgatgtgagggtgacacgacaccgacaatcgtaaatctcgaccaccccgttatctcttgtgctaaaacgaaacagttacgcgttgtgaacgggatcccaacacgcaccaacatcgggtggatggtgtccctgagatatcggaataaacatatatgtggcggcagcctgatcaaagaaagctgggtgctaacagcacgccaatgcttcccctcacgcgacctcaaagattacgaagcctggctcggcatccatgatgtccacggcaggggcgatgagaagtgcaaacaagtgctgaacgtcagtcagctggtgtatgggccagagggctccgatctggttctcatgaagctggccagacccgctgttttggatgactttgtgagcaccatagatctcccaaactatggctgcactattccagaaaagaccagttgctcagtgtatggttgggggtacacagggctcattaattatgacggactgctacgggttgcccacctatatatcatgggaaatgaaaaatgttcacagcaccatcggggaaaagtgactctgaatgagtctgagatttgcgccggcgccgaaaaaataggctccggtccttgtgagggggattacggcggacctctggtgtgtgaacaacacaagatgagaatggtgctgggggtgatcgtaccaggccgcggatgtgctatcccaaatcgaccggggatctttgtgcgagtagcctattatgccaaatggatacacaagatcatcctcacctataaggtgcctcagagt

SEQ ID NO: 13403 - DNA, 2184 bp, Artificial Sequence
  derived and/or modified sequence
atgtgggttacaaagctcttgcctgccttattgctccagcatgtacttcttcacctgcttctcctgccaatcgctatcccctacgccgagggtcagcgcaaaaggcgaaacactatccacgagttcaaaaagtccgctaaaacaaccttgatcaaaattgatcccgctcttaagatcaaaactaagaaggtgaacaccgcagatcagtgcgccaacaggtgtacccgaaacaaaggcctccccttcacttgtaaggccttcgtattcgataaagccaggaagcagtgcttatggtttccgtttaactctatgagcagcggggttaaaaaggaatttggacacgagttcgacctttatgaaaacaaggactatatacgcaattgcattatcggcaagggacggagctataagggtactgtctccatcacaaagtcaggaatcaagtgtcagccctggtcatcgatgatccctcatgagcacagctttttacccagctcgtacaggggcaaagacctccaggaaaactactgtcgtaatccgcggggtgaggaaggcgggccttggtgtttcaccagtaacccggaagtcaggtatgaggtgtgcgatataccacagtgcagtgaggtggagtgtatgacttgtaacggcgagagctatcgtggactcatggaccatactgagagtggcaaaatttgccaacgttgggatcaccaaactccccatagacataaatttttacctgagcgctacccggataaaggcttcgatgataactactgccgtaatccggacggccagccccgcccctggtgctatactctggacccccatacccgctgggagtattgtgccatcaagacatgcgctgacaataccatgaatgacaccgatgtgccacttgaaaccaccgagtgtatccagggccagggcgagggctacaggggcacagtgaatacaatctggaacggcataccgtgtcagcgttgggattcccagtacccccacgaacatgacatgaccccagagaacttcaaatgcaaggatttgagggagaattactgccgaaatcccgacggatctgagtctccttggtgttttacaaccgatcccaacatccgagtcggctattgctcgcagatacctaactgcgacatgtcccacggacaggattgctaccgtgggaatggaaaaaactacatgggaaatttgtcacagacgagatctggcctgacatgcagcatgtgggataaaaacatggaggatctgcaccgccacatcttttgggagcccgatgcaagcaagcttaatgagaattattgccgcaaccccgacgacgacgcccacgggccctggtgctataccggcaatccactgattccctgggactactgcccgatctccaggtgtgaaggagacaccacacccacgatagtgaatctggatcacccagtcatcagctgtgccaagacaaagcagcttcgtgtggtcaatggtatccctacaagaaccaatatcggatggatggtaagtctgagatatcggaataaacacatctgcggtggctcgctgattaaggaaagttgggttctcacggcgcgtcagtgctttccgtctagagacttgaaggactacgaagcctggctggggattcatgacgtccacggtcggggggatgaaaaatgcaaacaggttttgaatgtaagccaacttgtctatggtcccgaaggaagcgatctagtcctaatgaagcttgctagacccgccgtcttagacgatttcgtgagtacaattgatctgcccaactacggctgtacaattcccgaaaaaacttcttgcagtgtctatggttgggggtacactgggctgattaactatgatggtctgctgagagtggctcacctgtatatcatgggaaacgagaaatgtagtcagcaccataggggaaaggtgacccttaacgagtcagagatctgtgccggagccgagaagatcggatctggcccttgtgaaggtgactacgggggccccctcgtgtgtgagcagcacaaaatgcggatggttttgggagttatcgtgcccggaagaggatgtgccattcccaatcggcctgggatcttcgtgagggttgcctactacgccaaatggatccataaaatcatcctgacctataaggtgccacagagc

SEQ ID NO: 13404 - DNA, 2184 bp, Artificial Sequence
  derived and/or modified sequence
atgtgggtaaccaaactgcttccagcattgcttcttcagcatgttctgctgcatctgctccttctgcctattgccattccctatgctgagggccaaaggaagagaagaaacaccattcatgagttcaagaagtccgccaagactaccctcattaagattgacccagctctgaagattaaaacaaagaaggtaaataccgccgaccagtgcgccaacaggtgtacaagaaataagggcttgccatttacttgcaaggccttcgtgtttgacaaggctcgcaaacagtgtctttggttcccattcaacagcatgtcctctggtgttaagaaagagtttggtcatgagtttgatctgtacgagaataaagattacatccgcaactgcataatcggaaagggccgttcatacaagggcaccgtttctattacaaaatcaggcatcaagtgccagccttggtctagcatgataccacatgagcacagcttccttcctagctcttacagaggtaaggacctgcaggaaaactactgtaggaatcctcgtggagaagagggcggtccctggtgcttcacctctaatcccgaggtccgctatgaggtgtgcgacatcccccagtgcagtgaggtcgagtgcatgacctgcaacggcgagagctatagaggtctcatggatcatacagaatctggcaaaatttgccagagatgggatcaccagacaccccacagacataagttcctccctgagaggtaccctgacaagggattcgacgacaattactgtcgtaatcctgatggtcagcctcgcccctggtgttacacccttgatccccacactagatgggaatactgcgccatcaagacctgtgccgataacaccatgaacgacaccgacgtaccactggagaccaccgagtgcatccagggccagggcgagggatacaggggaaccgtcaacaccatctggaacggaattccttgtcaaagatgggactcccagtacccccacgagcatgacatgacacctgagaactttaagtgtaaggacctccgtgaaaactactgtagaaacccagatggaagtgaaagcccatggtgctttaccaccgatcctaatatcagggtcggttactgcagccaaatccctaactgcgatatgtcacacggacaagactgctaccgtggaaacggcaaaaactatatgggaaatctgtcccagactcgctccggtctgacttgcagtatgtgggataagaacatggaagaccttcatcgccacatcttttgggagcctgacgccagtaagttgaacgagaattactgtaggaaccctgacgatgacgcacatggcccttggtgctacaccggcaatcccctgatcccatgggactactgtcccatttcacgctgcgaaggcgacactacccccaccattgttaacctggaccatcccgtgatatcatgtgccaagacaaagcagctgcgcgtagtgaacggtatccccaccaggaccaacatcggttggatggtctctctgaggtacaggaacaaacatatctgtggaggaagcctgatcaaggagagttgggtcttgaccgcccgccagtgtttcccatcccgtgatttgaaggactacgaggcttggcttggaatccacgatgtccacggcaggggagacgagaagtgtaagcaggtcttgaacgtttctcagctggtttacggtccagaaggttccgatttggtcctgatgaagcttgcacgtcctgcagtactcgatgactttgtttccacaatcgacctgcctaactacggctgcaccatcccagagaaaacctcatgttctgtctacggctggggttacactggtctcatcaactatgacggcctcctccgcgtggctcacctctacattatgggcaacgagaagtgcagtcagcaccatcgcggcaaggtgaccctgaatgaaagcgaaatttgcgccggtgctgagaagattggaagcggaccttgcgagggtgattacggaggtcccctcgtttgtgagcagcataaaatgagaatggtgctgggtgtaatcgtgccaggcagaggctgtgccattcccaatcgcccaggcatcttcgtccgcgtagcttactacgcaaaatggattcataagatcatcctgacttacaaagtcccacaaagt

SEQ ID NO: 13405 - DNA, 2184 bp, Artificial Sequence
  derived and/or modified sequence
atgtgggttaccaagctgctgccagccctgcttttacaacacgtgttactgcatttactgctgctgcctatcgcaataccatacgctgagggccagcggaagcggcggaatactatacacgaattcaaaaaatccgctaaaactacccttataaagatagatcctgctcttaaaatcaagaccaagaaggtgaatacagcagaccagtgtgccaaccgctgcacacgtaataagggcttgccatttacctgcaaagcctttgtttttgacaaggcacgcaagcaatgcttatggtttccctttaattccatgagcagcggcgtgaagaaagagtttggccatgagttcgatctctacgaaaataaagattacataaggaactgcatcatcggtaaggggaggagttacaaggggacagtgtccatcactaagtctggcatcaaatgccagccatggtctagcatgattccccatgagcattccttcctgccaagctcctaccgggggaaggacctccaggagaattactgccggaaccctcggggcgaagaaggcggcccatggtgtttcacctctaacccagaagtgcggtacgaggtgtgtgacatcccacagtgcagtgaggtagagtgcatgacctgcaatggggaaagctaccggggccttatggaccataccgaatccggaaagatctgtcagcgctgggaccatcaaacaccccaccgtcacaaatttctccccgagagatatcccgacaaaggcttcgacgacaattattgcaggaaccccgacgggcagccaagaccttggtgctataccctggacccccacacaaggtgggagtactgcgccataaaaacctgcgctgacaacaccatgaatgatacagatgtgcctctggaaaccacagagtgcatccagggtcagggggaaggttatcgggggactgttaatacaatttggaacggcattccctgccagaggtgggactcacagtacccccacgaacacgacatgaccccagagaattttaagtgtaaagaccttcgtgaaaactactgtagaaaccccgatggaagcgagagtccatggtgctttaccacagaccccaatattcgcgtcggatactgttctcaaatccccaattgcgatatgagtcacggccaagattgttacagagggaatggaaaaaattacatgggaaacctgtcacagactaggagtggactgacatgttccatgtgggacaagaatatggaagatctgcatcgacatatcttctgggaacccgacgccagcaagttaaatgagaactactgtcgcaaccctgacgatgacgctcacggcccttggtgttataccggtaaccccctgatcccgtgggactactgtcccatctcaaggtgcgaaggagatacaactccaaccatcgtaaatctcgatcatcccgtaattagttgtgccaagaccaagcaactgcgcgtggtgaatggaattcccacccggactaatatcggctggatggtaagccttcgttatcgaaataagcacatttgcgggggctctctgataaaagagagttgggtcctgaccgcccgccagtgtttccctagtcgggacctgaaggattatgaagcctggttaggcattcatgacgtgcacggcaggggggatgagaagtgtaaacaggtgctgaacgttagccagctggtctatggaccagaaggcagcgatctcgtactcatgaagctagcaagaccagctgtgttggacgacttcgtgagtactattgatctgccaaactacggctgtactattcccgaaaagacatcctgcagtgtctatggttggggctacacaggcttaatcaactacgatggccttctaagagtggcccatctctatatcatgggcaatgaaaaatgcagtcaacaccatcgtggaaaagttacactaaacgagtccgaaatctgtgctggggccgagaaaattggctcaggcccatgtgagggagattatggcgggcccctggtgtgtgagcagcacaagatgcggatggttttgggggtgattgtgcctgggagaggctgtgccatccctaaccggcctggtatattcgtgcgggtggcttactatgccaagtggatacacaagataattctcacatacaaggtgccccagtct

SEQ ID NO: 13406 - DNA, 2184 bp, Artificial Sequence
  derived and/or modified sequence
atgtgggtgacgaagctgttgccagccctcctgctccagcatgttctgctccacctccttctgctgccgatcgccattccatacgctgagggccaacgcaagcgccgcaatactattcatgagtttaagaaatccgcaaagactacgctgatcaagatcgacccggccctcaagatcaaaaccaagaaagtgaacaccgcggaccaatgcgcaaaccgctgtacccggaacaagggcctcccctttacttgcaaggccttcgtgttcgacaaggcacgcaagcagtgtctgtggtttccgtttaactcgatgagctccggagtgaagaaggaattcggtcatgagttcgacctgtatgaaaacaaggactacatcagaaactgcatcatcggaaaaggccggtcgtacaagggtactgtgtccatcaccaagtcaggcatcaagtgccagccgtggtccagcatgatcccgcatgaacactcatttctgccgtcctcgtaccgcgggaaggatttgcaggagaattactgccgcaatccgagaggtgaagaaggtggtccgtggtgctttacctcgaatccggaagttaggtacgaggtgtgcgatatccctcaatgttcggaagtggaatgcatgacctgcaatggggaatcgtaccgcggactcatggatcacaccgagagcggaaagatctgccagaggtgggatcaccagactccacaccggcacaaattcctgccggaaaggtaccccgacaaggggttcgatgacaactactgtaggaatcctgacgggcagccacgcccttggtgttacacgctcgacccgcacacgcggtgggaatactgcgcgatcaagacctgcgcggataatacgatgaatgacaccgacgtccctctggaaaccactgagtgcatccagggacagggtgaaggatacagaggtacggttaataccatctggaatgggatcccgtgccaacgctgggattcacaatacccacacgagcacgacatgactccggaaaacttcaaatgtaaggacctgcgcgagaactactgccgtaacccggatgggagcgaatcaccctggtgtttcactaccgatccaaatatcagagtgggatactgttcgcagatccctaattgtgacatgagccatggacaggattgctaccgcggcaacgggaagaactacatgggcaacctctcgcagactaggtccggtctgacctgctcgatgtgggataagaacatggaagatctgcaccggcacatcttctgggaacctgacgcctcgaagctcaacgaaaactattgtcggaaccctgatgacgatgcccatggaccgtggtgctacactggaaacccgctcattccttgggactactgccctatcagccggtgcgaaggggatactaccccgactatcgtcaatctggaccaccctgtgatctcttgcgctaaaacgaagcagctgagagtcgtgaatggcattccgacccggaccaacattgggtggatggtgagcttgcgataccggaacaaacacatctgtggcggatccctcatcaaggagtcctgggtgctcactgctcgacagtgcttcccatcgagggatcttaaggattacgaagcctggttgggaatccatgacgttcatggccgcggcgacgaaaaatgtaaacaggtcctgaatgtgagccagttggtctacgggccagagggttcggatttggtgcttatgaagctggctaggcctgcagtgcttgacgactttgtttccactatcgacctgccaaactatgggtgtaccatccctgaaaaaacctcgtgctcagtgtacggctggggatataccggactgatcaactatgatggactcctgcgggtggctcatctctacatcatgggaaatgaaaagtgttcgcagcatcaccggggcaaggtgaccctgaacgaatcggaaatctgcgcgggggcagaaaagatcggaagcggtccgtgcgaaggagattacggaggaccccttgtttgtgagcagcataagatgagaatggtgctgggtgtcatagtcccaggaaggggatgcgccatccctaaccgtccgggaatcttcgtgagagtggcctactacgccaagtggatccataagatcatcctgacctacaaggtgcctcagtca

SEQ ID NO: 13407 - DNA, 2184 bp, Artificial Sequence
  derived and/or modified sequence
atgtgggtgaccaaactgctgccggcccttctgctgcagcatgtgctcctgcacctgctcctccttccaatcgcgatcccgtacgccgaaggacaaagaaaacggcggaacactattcatgagttcaagaagtcggccaaaaccaccctgatcaagatcgacccagcgctgaagatcaagaccaagaaagtgaacaccgctgatcagtgtgccaaccgctgcacgcggaataaggggctcccgtttacttgcaaggctttcgtattcgataaggcccgcaagcaatgtctctggttcccattcaactcgatgtcctcaggtgtcaagaaggagtttggacacgaattcgacctgtacgaaaacaaggactacatcaggaactgtatcatcggaaagggccgctcgtacaaagggactgtgagcattactaaatcgggtataaagtgccagccttggagctccatgataccgcacgaacactctttcctgccatcgtcgtaccgcggcaaggatctgcaggaaaactactgcagaaacccgagaggggaggaaggcggcccatggtgcttcactagcaacccggaagtgaggtacgaagtgtgcgacatccctcagtgctcagaagtggagtgcatgacgtgcaacggagagtcatatcggggacttatggaccacaccgaaagtggaaagatctgccagcggtgggaccatcagactccgcatcgccacaagtttctgcctgagcggtacccagacaaaggcttcgacgataactactgtagaaatccggacggtcaacccagaccgtggtgctacacgctggacccgcacaccagatgggagtactgcgcaatcaagacttgcgcggacaacaccatgaatgataccgatgtgccgctggagactaccgaatgcattcaaggacagggagaaggatacagagggaccgtgaatactatctggaatggaatcccgtgccaaagatgggactcccaatatccgcatgaacacgatatgaccccggagaatttcaaatgcaaggatctccgggagaattactgccgaaaccctgatgggtccgagtcgccttggtgcttcacgactgatccgaacatccgcgtcggatactgttcacaaatccctaactgcgatatgtcgcatggacaggactgttatcgcgggaacggtaagaactatatgggaaatctttcacagacgcgctcgggattgacctgttcgatgtgggataagaatatggaggatttgcaccgtcacatcttctgggaaccggatgcatcgaagttgaacgaaaactactgtcgaaatcctgacgatgacgcgcacggaccctggtgctacaccggaaacccactgatcccatgggactactgcccgatctccaggtgcgaaggcgatactaccccaactatcgtgaatctggatcacccagttatctcctgcgcaaagacgaagcagctgagggtggtgaacggcatcccgaccagaaccaatatcggatggatggtcagcttgagataccggaacaagcatatctgcggaggatcgctgatcaaagaaagctgggtgttgactgcccggcagtgctttccaagcagagatctgaaggactacgaagcctggttgggtatacacgacgtacacggtcgcggtgacgaaaagtgcaagcaggtgctcaatgtctcacagttggtgtatggccccgagggctccgacctcgttctcatgaagctcgctcgcccggccgtcctggacgattttgtcagcaccattgacctgcccaactatgggtgtaccattcctgagaaaacttcatgttcagtgtacggctggggctacaccgggctgatcaactacgacggactgcttcgggtggctcatctgtacatcatgggaaacgagaaatgctctcagcatcatagaggcaaagttacccttaacgagtcggaaatttgcgcgggggccgagaagattggatcgggcccgtgtgaaggagattacggcggccccctggtgtgtgagcaacacaaaatgcgcatggtcctcggagtgatcgtgccgggacgaggatgtgccattcctaaccggccaggtatctttgtgcgcgtcgcttactacgccaagtggatacacaaaatcatcttgacctacaaagttcctcaatca

SEQ ID NO: 13408 - DNA, 2184 bp, Artificial Sequence
  derived and/or modified sequence
atgtgggtgactaagctgctgccagcccttttgctccagcatgtcctccttcatcttttgctgttgccgattgccattccttacgcagaaggacaaaggaaacgccgcaatacgatccacgagttcaagaaatccgcgaaaactaccctgatcaaaattgatcccgcccttaagatcaaaactaaaaaggtgaacactgcagatcaatgcgcaaaccgctgtaccagaaacaaaggccttccctttacttgtaaggcgttcgtctttgataaggcacggaagcagtgcctctggtttccgttcaattccatgtcgtcgggcgtgaaaaaagaatttggacatgaattcgatctctacgaaaacaaagattacataagaaactgtatcattgggaaaggccggtcctataaaggcaccgtctcgattactaagtcagggattaagtgtcaaccatggtcatcgatgattccacatgaacattcctttctgccctcatcatataggggaaaagatctccaagaaaactactgcaggaatccaagaggagaagaagggggcccttggtgtttcacttcgaacccagaagtccgttacgaagtgtgcgacattccacagtgttcggaagtggagtgtatgacctgcaacggagagtcgtaccgaggactgatggaccacaccgaatcaggtaagatctgtcaacgttgggatcaccaaactcctcatagacataagtttctccccgaacgttaccctgataagggtttcgatgataactactgtcgtaatcctgacggccaaccccgtccctggtgctacaccctcgatcctcatactagatgggaatactgcgccattaagacctgtgccgataacactatgaatgataccgacgtgcctcttgagactaccgaatgtattcaaggacaaggagaaggataccggggtaccgtgaacaccatttggaacggcattccttgtcagaggtgggactcgcagtatccgcatgagcacgatatgaccccagagaatttcaagtgcaaggatctgagagagaattactgcagaaacccggatggctcggagtcgccgtggtgttttaccaccgatcccaatattcgtgtgggatactgttcacaaataccaaactgcgacatgtcacatggacaggattgctacaggggaaacggaaagaactacatgggaaatctttcgcagacccgctcgggactcacttgctcaatgtgggataagaatatggaggatctgcatagacatatcttttgggaaccagacgcaagcaaacttaacgagaactactgccggaaccctgatgatgatgcccatggaccttggtgctatactggtaaccctctgataccctgggactactgcccaatcagccggtgtgaaggggacaccacgccgactattgtgaatctcgatcatccagtgatttcttgcgctaaaactaagcaactcagagtggtcaatggaatacccacccgaactaatatcggatggatggtgtcccttcgctaccggaacaaacatatttgtggcggttccctcatcaaggagagctgggtgctgactgcaagacagtgctttccgtcgcgcgatcttaaggattacgaggcctggctcgggatccatgatgtccatggacgcggagatgaaaagtgtaagcaggtgctcaacgtgagccaactcgtttacggccctgagggatccgatctcgtgcttatgaagctggccaggcctgcagtgctggatgacttcgtgtcgactattgacctgccaaactacggatgtaccatccccgaaaagacctcctgctcagtctacggatggggatataccggtctgatcaattacgatggactgctgagagtggcacatctttacatcatgggtaacgaaaaatgttcccaacatcataggggaaaggtgaccctgaatgagtccgagatctgtgcaggcgcagaaaagataggctctggaccctgtgagggggactacggaggcccgttggtctgtgaacagcataagatgcggatggtgcttggtgtgatcgtgcctggtagagggtgtgctattccaaatagacctgggatctttgtgcgggtggcttactacgcaaagtggatccataagatcatacttacttacaaggtgccgcaaagc

SEQ ID NO: 13409 - DNA, 2184 bp, Artificial Sequence
  derived and/or modified sequence
atgtgggtgactaagctcctgccggctctgctcctgcaacatgtgctcctccatcttctgctgctgccaatcgcgatcccatacgccgagggtcagcggaagcggcggaataccatccatgagttcaaaaagtcggccaagactaccctgatcaaaatcgaccctgctctgaagatcaagactaagaaggtcaacactgcggaccaatgcgccaatcgatgcactcggaataagggattgccgtttacctgcaaggctttcgtgtttgacaaagcgcgcaagcaatgtctgtggttcccgtttaacagcatgtccagcggagtgaagaaggaattcggacacgagttcgatctgtacgaaaacaaggactacatcagaaactgcatcatcggaaagggacgcagctacaaggggactgtctcgatcaccaaatcggggatcaagtgtcagccgtggagctctatgatcccgcacgaacattcgttcctcccctcgtcctaccgggggaaggaccttcaggaaaactactgtcggaatccgaggggtgaggaaggtggtccgtggtgcttcacctcgaacccagaagtgcggtacgaagtgtgcgacattccacaatgcagcgaggtggagtgtatgacttgtaacggggaatcgtaccgcggactgatggaccataccgaaagcggcaagatctgccaacgttgggatcaccaaactccgcatcgccacaaattcctgccagaacgatacccggataaggggtttgacgacaactactgcaggaaccctgacggccagccgcgcccgtggtgttacaccttggacccacataccagatgggagtactgcgcaatcaaaacttgcgctgataacaccatgaacgacaccgacgtgccgctggagacgactgagtgcatccagggtcagggggaaggctaccggggaactgtgaacaccatctggaatggaatcccttgtcaacgctgggacagccagtacccgcatgaacatgatatgacccctgaaaacttcaagtgcaaggacctcagggagaattactgccggaacccagacggatcagaatcaccgtggtgctttaccactgacccgaacatccgggtgggatactgtagccagatcccaaactgtgatatgagccatggtcaggattgttaccgcggaaacggaaagaactacatgggcaacctgtcgcagacccgcagcggactgacttgttcaatgtgggataagaacatggaagatctgcacaggcatatcttctgggagccagacgcatcaaaactgaatgaaaactactgccgcaatcctgacgatgatgcccacggaccttggtgttacactggaaatccgctgattccgtgggactactgtcccatctcgcgctgtgagggtgacactactccgaccatagtcaatctcgaccatccggtgatctcgtgcgccaagaccaagcagctccgcgtggtcaacggcatcccaactcgcactaatatcggctggatggtttccctgagataccgcaacaagcacatctgcggcgggtcgcttatcaaggaatcgtgggtgctgaccgcgcggcaatgtttcccatccagggacctcaaggattacgaagcctggctcggaatccacgatgtgcacggccgcggtgatgagaagtgcaagcaggtgctcaacgtgagccaattggtgtacggacctgaggggtcggatttggtgctgatgaagctggcgcgcccggccgtgctggatgactttgtgagcaccattgacctccccaactacggatgcaccatcccagagaaaacttcctgcagcgtgtacgggtgggggtacactggactgatcaactatgatggcctgcttagagtcgcgcacctgtacatcatggggaatgaaaagtgttcgcagcaccatcgcggaaaggtgactctgaacgaatccgaaatctgcgccggagcagagaaaatcggatcgggcccttgtgaaggagattacggaggcccactggtgtgtgagcaacacaaaatgcgcatggtgcttggggtgattgtgcctggcaggggatgcgcaatcccgaacagaccaggcatctttgtccgggtggcatactatgcaaagtggattcacaagattatactgacctacaaggtccctcagtcc

SEQ ID NO: 13410 - DNA, 2184 bp, Artificial Sequence
  derived and/or modified sequence
atgtgggtcaccaagctgcttccggcgttgctcctgcagcatgtgctcctccacctgctcctgctcccgatagcgatcccctacgctgaagggcaacgcaagcgccgcaacaccatccatgagttcaaaaagagcgccaagactaccctgatcaaaatcgacccggcattgaaaatcaaaactaagaaggttaacacggctgaccaatgtgcgaatcgctgcactagaaacaaaggactgccttttacctgcaaggccttcgtgttcgataaggcacggaaacagtgcctttggttcccatttaactccatgagctccggagtcaagaaggagttcgggcacgaattcgatctgtacgaaaacaaggactacattagaaactgtatcataggaaagggaagatcctataagggcactgtctcgatcaccaagtcaggcattaagtgccagccgtggagctcaatgatcccgcatgaacattccttcctgccatcgagctaccgcggtaaggatctccaagagaactactgtcgaaaccctcggggcgaggaaggcggtccgtggtgcttcacctccaacccagaggtgagatacgaggtgtgcgacatcccgcagtgctcagaagtggaatgcatgacctgcaatggagagtcgtatcgcggactgatggaccataccgaatcaggcaagatctgtcagagatgggaccaccaaactccgcataggcacaagttcctgcctgaacggtacccggacaagggattcgacgacaactactgccgcaatcccgatggtcagccacgaccatggtgctacacgctggatccacacactcgttgggagtactgtgccatcaaaacctgcgcagacaacactatgaatgacactgacgtcccgttggagactaccgaatgtatccaggggcagggagagggttaccgcggcaccgtcaacaccatctggaatggcattccgtgccaacgatgggactcccaatacccccatgaacacgatatgactcccgaaaacttcaagtgcaaggacctgcgggaaaactattgccggaatcccgacggctccgagtcgccttggtgctttactaccgatcccaatatccgcgtgggttattgctcgcagatccccaactgcgacatgagccatgggcaggattgttatcggggcaacggcaagaactacatgggaaacctgtcgcagactaggagcgggctgacctgctcaatgtgggataagaacatggaggacctccaccggcacatcttctgggagcccgatgcatctaaactcaatgaaaactactgtcgcaatccagatgatgatgcgcatggaccctggtgctacaccggaaatcccctgattccatgggactattgtccgatttctcggtgcgaaggggacactaccccaactatcgtcaacctggaccatccagtcatttcatgcgcgaaaactaagcaactccgcgtggtgaacgggatcccgaccagaaccaacatcggatggatggtgtcactgagatacagaaacaaacacatctgtggaggctcactcattaaagaatcatgggtgctcaccgcgcgccagtgcttcccgtcgagagatctcaaggattacgaagcctggctgggaatccacgacgtgcatggccgcggagacgagaagtgcaagcaagtgctgaatgtctcgcaactcgtgtacggtcctgagggaagtgacctcgtcctgatgaagctcgcccggccagcagtgctggatgatttcgtgtcaacgatcgatctgccaaattacggatgcaccatccctgaaaaaacctcctgttccgtgtacggctgggggtacactgggctgattaactacgatggtctgctcagagtggcgcacctttacatcatgggaaacgaaaaatgttcgcagcaccaccggggaaaggtgactctgaacgagtcggaaatctgcgcgggagcggaaaagatcggctcaggcccgtgcgagggagactacggaggaccgctcgtctgcgaacagcacaagatgagaatggtgctgggagtcatcgtgccgggtcgcggctgcgctatcccaaataggcctggaatctttgtgcgggtcgcgtactacgccaagtggatccacaaaatcattttgacgtacaaagtgcctcagtca

SEQ ID NO: 13411 - DNA, 2184 bp, Artificial Sequence
  derived and/or modified sequence
atgtgggttacgaagctgcttcctgcactcctgctgcagcacgtgctgctgcatttgttgctgctccccatcgcaatcccctacgccgaagggcagcgtaaaaggcgtaataccatccacgaattcaagaagtccgcaaagaccaccctgatcaaaattgatcctgccttgaagatcaaaacaaaaaaggtgaacacggctgatcagtgcgccaaccgctgcacaaggaataaaggccttccctttacatgcaaagccttcgtcttcgacaaggcccggaagcaatgtctatggtttccttttaattccatgtcatctggcgtgaagaaggagtttggccacgagtttgatctatacgagaacaaagactacatacgtaattgtatcatcggtaaaggccgctcctataaagggaccgtttctatcaccaagagcgggatcaagtgtcagccgtggtcttccatgatccctcacgagcatagtttccttccgtcttcataccgggggaaggatcttcaggagaactactgtcgaaaccctaggggggaggaaggcggcccttggtgtttcacctcgaacccggaggtgcgatatgaggtgtgcgacattccccagtgctccgaagtcgaatgtatgacttgtaacggcgaatcataccggggcctgatggaccatactgaatccggaaaaatctgccaacgttgggaccaccagacaccccaccgacacaagtttctgccagagaggtacccagacaagggattcgatgacaactactgtaggaatccggacggccagccccgaccttggtgttacacgctcgaccctcatacccgatgggagtactgtgccatcaagacgtgcgcagacaacaccatgaatgataccgacgtgcctctggaaacgaccgagtgcatccaaggtcaaggcgaaggctaccgaggtactgtgaatacaatttggaacgggattccttgtcagagatgggacagccagtatccccacgaacacgatatgacccctgaaaactttaagtgcaaggacctccgcgagaattattgtagaaatcctgacgggtcagagagcccctggtgcttcactacggacccgaatattagagtcggctattgttcccaaattcccaactgcgatatgagccacggccaggattgctacagaggaaacggtaagaactacatgggaaatctctctcaaacccgaagcggcctgacctgttctatgtgggataagaatatggaagacctgcaccgccatatattctgggaaccagatgccagtaagttgaatgagaattactgcagaaacccagatgatgacgcccacgggccatggtgctacacaggaaaccctctcatcccctgggactattgtccaatctcccggtgtgagggggataccacccccaccatcgtcaacttagaccaccctgtgatatcgtgcgccaaaaccaagcaactaagggtcgtgaatggcatccctacgagaaccaacattggctggatggtgtccctgaggtacagaaataaacacatctgcggcggctctttgatcaaagaatcttgggtactgactgcgcggcagtgcttcccctctcgggatctgaaggactatgaggcctggttgggcattcacgatgtccatgggaggggggacgaaaagtgcaagcaagtactcaatgtgtcccaattggtgtatggccccgagggcagcgacctggtcctaatgaagttagccagacccgcagttctggacgattttgtaagcacaattgacttaccaaactatgggtgcacgattccagaaaaaacatcttgcagtgtgtacggttggggctacactggtcttatcaactatgatggattgcttcgtgtagctcatctttacatcatgggaaatgagaagtgttcccaacatcaccgaggcaaggtcactctgaatgaatccgagatctgtgctggagccgagaagattggatccggcccctgtgaaggagattatggcgggccgctcgtttgcgagcaacataagatgcggatggttcttggcgttatagtccctggaagaggatgtgcgattcccaacagaccgggaattttcgtgcgggtcgcgtattatgcgaaatggatccataaaattattcttacgtacaaagtgccccagtcc

SEQ ID NO: 13412 - DNA, 2184 bp, Artificial Sequence
  derived and/or modified sequence
atgtgggtgacgaagctcctgcccgcactgctgcttcaacatgtgctgctgcatttgcttcttctcccaatagcgatcccatacgcagaaggtcaaagaaaacgccggaacaccattcatgagttcaagaaaagcgccaagactactcttatcaaaatcgaccctgcgctcaagataaagacgaaaaaagtcaataccgccgaccagtgtgccaaccgctgcacccgtaataagggtctgccttttacttgtaaggcctttgtgtttgataaggcacgtaaacagtgtttgtggtttccgtttaacagcatgtcgtccggggtcaagaaggaatttggacacgaatttgacctgtacgagaacaaggattacatcagaaactgcattataggcaaggggagatcctacaagggcaccgtgtcgatcaccaagtccggaatcaaatgccagccgtggtcatcgatgatccctcatgaacattccttccttccatcatcttatcgcggaaaggaccttcaagagaactactgtcgaaaccccagaggagaagaaggaggtccttggtgtttcacttcgaaccctgaagtccggtacgaagtctgcgacattccgcagtgttccgaagtcgaatgtatgacctgcaacggagagagctacagaggccttatggatcataccgagtcagggaaaatctgccaacggtgggaccatcagactccacatagacacaagttcctgcctgagcggtaccccgataagggttttgatgacaattactgtcgcaaccctgacggacaacctagaccgtggtgctatactctcgacccacacactcgctgggaatactgtgctattaagacttgtgccgacaatactatgaacgatactgacgtgcctctggaaaccactgaatgtattcaaggtcagggggaaggttaccggggcactgtgaacaccatttggaatggaattccgtgtcaaaggtgggactcccaatacccacacgagcatgacatgaccccagaaaacttcaagtgcaaggatcttagagaaaactactgtaggaaccccgacggttcggaatccccctggtgcttcactaccgatcccaacataagagtgggttactgttcccaaattcccaattgcgatatgtcacatgggcaagattgttaccgcgggaatggaaagaactacatgggaaacctgtcgcagacccgatccggacttacttgttccatgtgggacaagaatatggaggatctccatcggcatatcttttgggaaccagacgcatcgaaactgaacgaaaactactgccgcaacccagacgacgatgcacacggtccctggtgttacactggaaacccgctgattccttgggattactgtcctatttcgagatgtgagggagataccaccccaaccattgtcaaccttgatcatccagtcatttcctgcgctaagaccaaacagctgagagtggtcaatggaatacccacccggactaacatagggtggatggtgagccttcgataccgcaacaagcatatatgtggtgggtcgctgattaaggaatcgtgggtgctgaccgcacgacagtgctttccatccagggacctcaaagattacgaagcatggttggggattcacgatgtccacgggcggggcgacgaaaagtgtaaacaagtgcttaatgtgtcgcaactcgtgtacggaccggagggcagcgatctggtgctgatgaagctggcacgacccgcagttctggatgacttcgtttccactattgatcttccgaactacggatgtactattccagaaaagactagctgttccgtgtacggctggggttacaccggactcattaactacgatggcctgttgcgcgtcgcccatctttacattatgggcaacgaaaaatgctctcagcaccatcgtgggaaggtcacccttaacgagtcagagatctgtgccggcgcagagaaaattggaagcggcccttgcgaaggagactacggaggccctcttgtgtgcgagcagcacaagatgcggatggtgctcggcgtcattgttcccggtagaggatgcgcaattcccaatcgccctggaatctttgtgagggtggcgtactacgcaaagtggattcataagatcattctcacttataaggtgccgcaatcg

SEQ ID NO: 13413 - DNA, 2184 bp, Artificial Sequence
  derived and/or modified sequence
atgtgggtgactaaactgttacctgccctgctgcttcagcatgtgctcctccatctactgcttctgcctatcgcaatcccctatgccgagggtcagcgaaaacggagaaatactatccatgagttcaagaaaagtgccaaaaccacattgatcaagatagatcctgcgcttaaaataaaaacaaagaaggtcaacaccgcagaccagtgtgccaatcgctgcaccagaaataaagggctccctttcacttgcaaggctttcgtcttcgacaaagctaggaaacagtgtctgtggtttcccttcaatagcatgtcctccggcgtcaagaaggaattcgggcatgaattcgacttgtacgagaacaaggattatattcgcaactgtatcattggcaaggggcgttcttacaagggtaccgtgagtattacaaagtccgggataaaatgtcagccttggtccagcatgatacctcatgagcattcctttttgccaagctcatatcgggggaaagaccttcaggagaattactgcagaaatcctcggggcgaggagggggggccatggtgctttacgtcaaatccggaagtgaggtacgaagtatgcgatattcctcagtgttcggaagtggagtgcatgacgtgtaacggagagagctatcgcggtttaatggatcacacagaaagcggcaagatttgtcagagatgggaccaccagacgccacatcggcacaagtttctgcccgaacgataccccgataaaggctttgatgataactattgcaggaatcctgacggacagccccgcccatggtgttacaccctggacccccatacgagatgggaatactgcgcaattaagacctgcgctgacaacacaatgaatgatacagacgtccccttagaaaccaccgaatgtattcagggtcaaggcgaaggctaccgcgggactgtgaataccatatggaacggaattccatgtcaaagatgggattcacagtacccccacgagcacgacatgacaccggaaaatttcaagtgcaaagaccttagagaaaattactgtcggaaccctgatggaagtgagagcccgtggtgtttcactaccgaccctaatatacgggtgggatactgttctcagattcctaattgtgatatgtcacacggacaggattgctatcggggaaatggaaagaactacatggggaacttgagccaaacccgctctggcctgacttgtagcatgtgggacaagaatatggaggacctgcatcgacacattttttgggagcccgatgcatcaaagctgaacgagaattactgtcgcaaccctgatgatgatgcccatgggccgtggtgctacaccggcaatccactgatcccatgggactattgccccatctcgaggtgcgagggggatacaaccccgacgatcgtaaacctggaccaccccgtgatctcttgcgccaagaccaagcagctgagagtggtgaacggtatcccaacccggacaaatatagggtggatggtctcccttagatacaggaataagcacatctgcggtggatctcttattaaggaatcctgggtgctaaccgccagacaatgttttccgagccgggacttgaaggactatgaagcctggctcggcattcacgacgtgcatggaaggggggacgagaaatgtaaacaggtgctcaacgtcagccagctcgtctatggcccagagggatcagatctggtgctcatgaagttggcgaggccggcagtgcttgacgactttgtgtccacgattgacctgccaaactacggatgtactatccctgagaaaacttcctgctctgtctacggttgggggtacactgggctgatcaactatgacggattgctgagagttgctcatctgtatattatggggaacgaaaaatgctctcaacaccatcggggcaaggtgacgctgaacgaatctgagatatgtgcaggggctgaaaaaatcggctcgggcccatgtgaaggtgattacggcggtccactggtttgcgaacagcacaagatgcgtatggtgctgggggtgatagtacccggccgcgggtgcgcgattcccaacagaccgggcattttcgtacgagtcgcctactatgccaagtggatccataagatcatcctgacctacaaagttccccaatct

SEQ ID NO: 13414 - DNA, 2184 bp, Artificial Sequence
  derived and/or modified sequence
atgtgggtcactaaactcctgcccgctctgctcttgcagcacgttcttcttcacctgctgctgctacctattgccattccatatgcagaaggccagcggaaaagacggaatactatacacgaatttaagaagtcagccaagactaccctgatcaagatagatcccgcattgaaaattaaaaccaaaaaggtgaacacagccgaccagtgcgccaacaggtgcactcggaataaaggcctgcccttcacgtgcaaagcctttgtgttcgataaggcacgtaaacaatgcctgtggtttcccttcaactccatgagcagcggcgtgaaaaaggagttcggacacgagtttgacctctatgaaaacaaggactatataagaaattgcatcatcggtaaggggcgctcctacaaggggaccgttagcatcacaaagtccggaatcaaatgccaaccctggtcaagcatgatcccccatgaacatagttttctccctagcagctataggggtaaggacctgcaggagaattactgccgcaaccctcgcggagaggaaggcggaccttggtgcttcacatccaatccagaagtgagatacgaagtctgcgacattccacagtgtagcgaagtggaatgtatgacctgtaacggggaatcatatagggggctcatggaccacactgaaagcggtaagatatgtcagagatgggatcaccagaccccccatcgccacaaattccttccagagcggtatccagataaggggttcgacgataattactgtaggaatcctgatgggcagccgcggccttggtgctacacgctagatcctcatactagatgggagtattgtgccatcaagacgtgcgcagataacactatgaacgacacagatgtccccctggagacaacagagtgtatccagggccagggagaggggtatcgggggactgtgaatacgatctggaacggcatcccgtgtcagagatgggatagccaatatccccacgaacacgatatgacccctgaaaatttcaaatgcaaagatctgagggaaaactactgtcgcaaccccgatggtagcgaaagcccgtggtgctttacgaccgatcctaacatacgggtaggttattgcagtcagatccctaattgtgacatgtcacacggccaggactgttaccgcggcaacgggaagaattatatgggcaatctgtcgcagacccgctctgggttgacttgttcgatgtgggacaagaacatggaagatctgcacaggcacatcttctgggagccagatgccagcaagctgaatgaaaattactgtaggaacccagacgatgatgctcatgggccttggtgctatacgggaaatccattgattccttgggactattgtcccataagtcgctgtgaaggcgatacgacacctacaatcgtaaacctcgatcaccctgtgatctcgtgtgccaaaactaaacagctcagggtggtcaatggtatccccacacggacgaatatcggatggatggttagtttgcgatatagaaacaagcatatttgcggcggttccctgatcaaggagtcctgggttcttactgccagacaatgctttccaagcagagacctgaaagattatgaagcctggctcggaattcacgatgtgcacggaaggggtgatgagaagtgcaagcaggtgctgaatgttagccagctggtatatgggcctgagggatccgatctcgttctcatgaagttagccaggcctgctgtgcttgacgactttgtgtcgacaattgatctgccgaactatgggtgcactatccccgaaaaaacatcctgtagcgtgtatgggtggggttacactggcttaattaactacgacggactgcttagggtggctcacttgtacatcatggggaacgaaaaatgttcccagcaccaccgaggaaaagtcacattgaatgagtccgaaatctgtgctggcgctgaaaaaataggtagtgggccctgtgagggagattatggggggccactggtgtgtgagcagcataagatgaggatggtgcttggcgtgatagttcctggacgtgggtgtgccattccaaaccgccctgggatttttgtgcgtgtggcctactacgctaagtggatacacaaaatcattctaacttataaggttccccagtcc

SEQ ID NO: 13415 - DNA, 2184 bp, Artificial Sequence
  derived and/or modified sequence
atgtgggttacgaaattacttccggcgttactcctgcaacatgttttattgcacttgttactgttaccgatcgcgattccgtatgcagaaggacaaagaaaaaggcggaacacgattcatgaatttaaaaaatctgctaagacgaccctgatcaaaatagaccctgctcttaagataaaaacaaaaaaagtgaatactgcagatcagtgtgcaaacagatgtaccaggaacaagggccttccatttacttgcaaagcattcgttttcgataaggcacgtaaacagtgtttgtggtttccgtttaattcaatgagctcgggcgttaaaaaagaatttggacatgaattcgacctttatgaaaataaagattacataagaaactgcattattggcaagggtcgctcttacaaaggtacagtttcaatcactaaatctgggattaaatgccaaccgtggtcatcgatgatcccacatgagcacagtttcttaccgtcaagctatcgcggcaaagacttacaagagaactattgtcgcaaccctcggggcgaagagggtggcccctggtgttttactagcaatccggaagtgcgttacgaagtttgtgatattccccagtgctcagaagttgaatgcatgacctgtaacggtgaatcatatagaggactgatggatcacaccgaatcaggtaaaatttgccaacgatgggaccatcaaacaccgcatagacacaaattcctgcccgaacgttacccggacaaagggttcgatgataattattgtcgtaatcctgatggacaaccgcgtccatggtgttacacgttggatccacacacacggtgggagtattgcgcgatcaaaacttgcgcagataatacaatgaatgatacggacgttccgcttgagacaacagagtgcattcaagggcaaggtgaagggtatagagggacagtcaatacaatctggaatggcattccatgccaacgatgggattcccagtatccgcatgagcatgatatgacaccggaaaattttaaatgcaaagatttgcgagagaactactgtcgcaatcctgacggatctgaatctccttggtgttttaccaccgatccgaatatcagggtaggctattgttcacagataccaaattgcgatatgtctcatgggcaagactgttatcgtggtaatggaaaaaactacatggggaacttgtcacaaactcggtcgggtttaacctgcagcatgtgggacaaaaatatggaagatttacatagacatatcttttgggagccggatgcgtcgaaattaaatgaaaactactgtcgtaacccggacgacgatgcacacgggccttggtgttatactggcaatccgcttattccatgggattactgccctatctctcgctgcgaaggagatacaacgcccacaattgtcaatctcgatcatccagtcatctcatgcgcaaagacaaaacagctgcgggtggtaaatgggattcctaccaggacaaatattgggtggatggtaagtcttcgttaccgcaataaacatatttgtggtgggtctcttataaaagaaagttgggttcttacagcacggcaatgttttccaagcagagacttaaaagattatgaagcctggctggggatccatgacgtgcacggccgaggggatgaaaagtgtaaacaggttcttaacgttagtcagctggtctatggtccggagggatctgatttagttctgatgaaacttgcgcgccccgcagtgcttgatgactttgtgtcaacaattgatttaccaaactacggatgcaccatccctgagaaaacgtcctgtagcgtatatgggtggggttacacaggactgataaattatgacggactacttagagttgctcacttgtatatcatgggtaacgagaaatgtagccaacatcatcggggtaaagtgacacttaacgaatcggaaatctgtgctggcgctgaaaaaattggctcaggtccgtgcgagggcgactatggcggacctctggtttgcgaacagcacaagatgaggatggttttaggcgtcatcgtaccgggaagggggtgcgcaatcccgaaccgccctggtatctttgtccgtgtggcatattacgcaaaatggattcataaaattattctgacctataaagttccgcaatca

SEQ ID NO: 13416 - DNA, 2184 bp, Artificial Sequence
  derived and/or modified sequence
atgtgggtgaccaagcttctgccggcactgctacttcagcacgtgctgctgcatcttttgcttctccccatcgccatcccttacgccgaaggacaacgtaagaggagaaacaccatccacgagttcaagaaaagtgccaaaaccaccctgataaaaattgatcctgctctgaagattaagaccaagaaggtcaacactgcagaccagtgcgcaaaccggtgcactcgcaacaagggtctgccttttacttgtaaggcgtttgtgttcgataaggctagaaagcaatgtctatggttccctttcaattctatgtcctccggtgtcaagaaagagttcggacatgaatttgatctgtatgaaaataaggattatatcagaaattgcatcataggaaagggccgctcctataagggcacagtgtcaattactaaatctggcatcaaatgccagccttggtcatccatgatccctcatgagcatagttttctacccagctcctatcgcggcaaggatctacaggaaaactactgcagaaatccccgcggcgaagaaggaggaccctggtgcttcacatccaaccccgaggttcgctacgaggtgtgtgacatccctcaatgttccgaagttgagtgcatgacttgtaatggagaaagctaccgtgggcttatggaccacactgaaagcggcaaaatttgccaacggtgggatcatcagacgcctcatagacataagtttctgcccgagcggtatcccgacaagggctttgatgacaattactgtaggaatcctgatgggcagcctcgcccttggtgctacacactggacccacatacgaggtgggagtattgcgcaatcaaaacatgcgctgacaatactatgaatgacaccgatgtccctttggagaccaccgagtgtatacagggccagggcgagggatacagaggaaccgtcaatacaatttggaatggtattccatgtcagaggtgggattcccaatacccacacgagcacgatatgactcccgaaaacttcaaatgcaaggatctgagggaaaactactgccgcaatccagacgggtctgagtctccttggtgcttcaccactgacccaaacatccgcgtaggctactgctcacagatccccaactgcgacatgtctcatggccaggattgctaccgtggcaatggcaagaactacatgggaaacctgagccagacacgcagtggcctgacttgttccatgtgggacaaaaatatggaggatctgcatcgccatatcttctgggaaccagacgcatccaagctgaatgagaattattgtcgaaatccggatgacgacgcgcatggcccatggtgttataccggcaaccccctgatcccgtgggactactgtcctatttctcgatgtgaaggcgatactacgcccacaattgtgaatttggaccaccccgtaatctcttgcgccaaaacgaaacagctgcgagtggtcaatgggatcccaacccgaactaacattggatggatggtgagtctgcgttacaggaataagcacatctgcgggggctctctcattaaggagtcttgggtgctgaccgcccgccaatgctttccaagccgcgacttgaaggattacgaagcatggctagggattcacgacgttcacggcaggggagacgagaaatgtaagcaggtcctgaatgtatcacagctggtatacgggccagagggaagtgatctggttctgatgaagctcgcacgccccgccgtgctcgatgacttcgtctcaactatagacctccccaattacgggtgtacaatacccgagaaaacttcatgttcagtttacggatggggctacactggcctaattaattacgacggacttctgagggtcgcccacctttacatcatgggcaatgaaaagtgctctcagcatcaccgtgggaaggttacactgaatgagtctgagatttgtgccggcgccgaaaaaatcgggagtggaccttgcgaaggggattatgggggccccctggtttgcgagcagcataaaatgcggatggttttgggcgttatcgtgccgggtcgcggatgtgccatccctaaccgaccaggaattttcgtgcgggttgcatactacgccaaatggatccataaaatcatcctgacatacaaggtacctcagagc

SEQ ID NO: 13417 - DNA, 2184 bp, Artificial Sequence
  derived and/or modified sequence
atgtgggtgaccaagctgttgccagcacttctgcttcagcacgtgttgctccatttgctgctcctgcctatcgccataccctatgctgaggggcagaggaaaaggaggaacactatccacgagtttaagaaatctgcaaaaactaccctgattaagattgacccagcgctgaaaatcaagaccaagaaggtgaacacggccgatcagtgcgccaatagatgtacgagaaacaaaggactgcccttcacgtgcaaagcctttgtgtttgataaagcaagaaagcagtgtctgtggtttcccttcaattcaatgtcttcaggagtaaaaaaggagttcggccacgagttcgacttgtatgaaaataaggactacatccgcaattgcatcatcggaaaggggagatcatataaaggtacggtgtctattaccaaatcgggaatcaaatgccagccttggtctagcatgatcccccatgaacattccttcttgccgtcctcttaccgcgggaaagaccttcaggaaaactactgccgcaatccgagaggggaggagggcggaccatggtgttttacctccaaccccgaagtgcgttatgaagtttgtgacatccctcagtgtagtgaagtcgaatgcatgacatgcaacggagagagctaccgagggctgatggatcataccgaatctggaaaaatctgccagcggtgggaccaccagactcctcaccgacacaagtttcttcctgaaaggtatccagataagggcttcgacgacaactattgtcgaaaccctgacggtcagcctaggccatggtgttacaccctggatcctcacactcggtgggaatactgcgcgatcaagacctgcgcagataataccatgaatgatacagacgtaccattggaaacgacagaatgtatccagggccagggagagggctatcgggggacagtcaataccatttggaacggaatcccttgccaaagatgggactcccagtacccgcacgagcatgatatgactcccgagaattttaagtgcaaggatctgagagaaaactattgcagaaaccccgatggttcagagagtccctggtgttttacaaccgatccaaacatccgtgttgggtactgtagccagattcctaattgtgacatgtcgcatggacaggattgttatagggggaatgggaaaaattatatgggcaatctgtcccagacacgatcaggcctgacctgtagcatgtgggacaaaaacatggaggatctgcatagacatattttttgggagccagatgcgagcaagcttaatgagaattactgtaggaaccctgatgatgacgcacatggcccatggtgttatacgggtaaccctctcatcccttgggactactgcccaattagtcggtgtgaaggagataccaccccaactattgttaacttggatcaccccgttatctcatgtgccaaaaccaaacagctaagggtggtgaacggcataccaactaggacaaatatcgggtggatggtgtcactgcggtacaggaataaacatatttgcgggggctcactgattaaggaaagctgggttttgacggctcggcaatgcttccctagcagggacctcaaggattacgaggcgtggttgggtatccacgatgtgcatggccgcggagacgagaaatgcaagcaggtgctgaacgtctcccagctggtgtacgggcccgaaggaagcgatttagtcctgatgaaactagctcggccagcagtgctcgacgattttgtgtctaccattgacctgccgaactatggctgcactattcctgagaagacatcatgtagtgtgtacgggtggggctacaccggcttgatcaattacgacggcttactgagagtagcacatctttacatcatgggtaatgaaaagtgttctcagcaccacagaggcaaagttaccctgaatgaatcggagatatgtgccggagctgaaaagattggatctggcccttgcgagggggactatggagggccattggtctgcgagcagcacaaaatgaggatggttctgggagtgatcgtcccgggcaggggatgtgccattcctaacaggccggggatcttcgtgcgtgttgcatactacgctaaatggatccataagatcatcctgacttataaggttccccagagc

SEQ ID NO: 13418 - DNA, 2184 bp, Artificial Sequence
  derived and/or modified sequence
atgtgggtgaccaaactgcttccagccctgcttcttcaacacgtccttctccacctgcttttgcttccaatcgcaatcccatacgccgaaggacaacgtaagcgcaggaatacgatacacgaattcaaaaagtcagcaaaaactaccctgatcaaaatcgacccagcgcttaagattaagacgaagaaggtgaacactgctgatcaatgtgccaacaggtgcactcgtaacaaggggcttccctttacctgcaaggcctttgtgtttgacaaggcacgaaagcagtgtctgtggtttccctttaactccatgagctcgggagtgaagaaggaatttggccatgagttcgacctgtacgagaacaaagattacatccgaaactgcattattggcaagggtcgatcatacaagggaactgtctcaattaccaagtccggaattaagtgccaaccctggtcgtccatgatcccacatgaacattcattcctgccgtcatcgtacagagggaaagatttgcaagagaactactgtcggaacccccgcggcgaagaaggtggaccttggtgtttcacctccaatccagaagttagatacgaggtttgtgatatcccacaatgctccgaggtggagtgcatgacctgtaacggcgagtcatacagaggacttatggaccataccgagtcgggaaagatctgccaacgctgggaccaccagacgccccatcgtcataagttccttcctgagcggtaccctgataagggctttgacgacaattactgtcgtaatcctgatggacaacccaggccttggtgttacaccctggatcctcataccaggtgggagtactgtgcaattaagacttgtgccgataacactatgaatgacactgatgtcccgctggaaactactgaatgtattcaaggccaaggtgagggatacagaggaactgttaacaccatttggaatggtatcccatgtcaaagatgggatagccagtatccccatgagcatgacatgactcccgagaactttaagtgcaaagacctgagagaaaactactgtcgaaatccggatggatccgaatcgccttggtgcttcaccaccgaccctaacatcagggtgggctactgttcccagatacctaattgcgatatgtcgcacggacaggattgttacagaggaaatggaaagaattacatggggaacctgtcacaaactcgatcaggcctgacgtgctcgatgtgggataagaacatggaggatttgcatcgacacattttctgggagccggacgcgtcgaaactgaatgaaaactactgccggaatcctgatgatgatgcacatgggccctggtgttacacgggaaatcctcttattccctgggactactgtccaatctcacgctgtgaaggagataccactccaaccatcgtgaacctcgatcaccctgtgatctcgtgcgcaaaaaccaagcaactgagggtggtgaatggcattcccacccgcactaatatcggttggatggtgtcccttagatacaggaacaagcatatctgcggaggtagccttatcaaggagtcgtgggtgctcactgcgagacaatgttttcctagccgcgacctgaaagactatgaagcatggctgggtattcatgatgtccatggcagaggtgacgaaaagtgtaaacaagtccttaatgtgtcccagctggtgtacggccccgaaggaagcgaccttgtccttatgaaattggcacgacccgcggttctggatgattttgtcagcaccatcgatctgcccaattacggttgtaccattccagaaaaaacctcctgttcggtctacggttggggatacaccgggctcatcaactacgatggtctgctgcgggttgcacatctgtacataatgggtaacgaaaagtgttcacagcaccatcgggggaaagtgaccctgaacgaatccgagatttgcgctggagccgaaaagattggctccggcccatgcgagggcgattatggaggaccgctggtctgcgaacaacataagatgcggatggtcctgggagtgattgtgcccggtcgtggatgtgcaataccgaatcgtccggggattttcgtgcgtgtcgcgtattacgcaaagtggattcataagataattctgacctacaaggtgccacagtcg

SEQ ID NO: 13419 - DNA, 2184 bp, Artificial Sequence
  derived and/or modified sequence
atgtgggtcactaagctgctgcctgctcttctcctccaacacgtgctgctgcacctcttgctgctgcctatcgctattccatatgctgaaggccaaagaaagaggcgcaacacaatccacgaatttaagaagtctgccaagaccacactgatcaaaatcgaccctgcgcttaaaattaagacaaagaaggtgaacacagcggatcagtgcgccaaccgctgcacacgcaacaagggattgccttttacttgcaaggcatttgtcttcgataaggcgcgcaagcagtgcctgtggttccccttcaactctatgagctccggtgtcaagaaggaatttggccacgaatttgatctctacgagaacaaagactatattaggaactgcataattggtaaaggaaggtcatataagggtaccgtgtccatcactaaatcaggaatcaaatgccagccctggtcttcaatgattccccacgagcacagttttcttcctagctcatatcgcggcaaggatcttcaggaaaactattgccgcaatccacgcggtgaagaaggcggtccttggtgctttacttctaatccagaggtcaggtatgaggtctgtgatataccacaatgttccgaagtcgagtgcatgacctgcaacggagagtcatatagaggactgatggaccacacagagagcggaaagatttgtcagcgctgggaccaccaaactccccatagacacaagtttcttcctgaaaggtaccctgataaaggcttcgacgacaactactgtagaaaccctgatggtcaacctaggccgtggtgctacacgctcgacccccacaccagatgggagtactgtgccattaagacttgtgccgataacactatgaacgacactgacgttcctttggaaaccacagagtgtattcaaggtcagggtgagggttataggggcactgtcaatactatctggaacggaatcccatgccaaagatgggactcccaatatccgcacgaacacgatatgaccccagagaattttaagtgcaaggacctgagagaaaactactgcagaaatccagacggaagtgagagtccgtggtgctttacaactgatccgaacatcagggtgggatattgctctcaaatcccaaattgcgacatgagccacggccaagattgctatagaggcaatggcaagaactacatgggaaatctgtcacagacccgctccggattgacttgctcaatgtgggataagaatatggaggacctccatcgccacatattttgggagcctgatgctagcaaactgaacgagaattactgtcgcaacccagatgacgacgcccacggcccctggtgctatacaggcaatcctctgatcccttgggactattgcccaatctctcgctgtgaaggcgacacaactcctacaatcgtgaacctcgaccatcccgttatctcctgcgcgaagacgaagcaacttcgcgtcgtaaacggaatcccaactaggactaacattggttggatggtgtcccttcgctacaggaacaaacatatttgtggaggatctttgataaaggagtcctgggtgttgacagctcgccaatgcttcccttctcgcgatctgaaggactatgaagcttggttgggcatccacgatgtgcacggcaggggcgatgagaagtgtaaacaagttctgaacgtctcccagctggtgtatggtcccgagggctctgacttggtccttatgaagttggccagacctgccgtccttgacgatttcgtgtctactatcgacctcccaaactacggctgtacaatccccgagaaaacgtcctgttcagtttacggttggggatacaccggactgataaattatgacggccttctgagggtcgctcatctgtacatcatgggcaatgaaaaatgttcccagcatcatcgcggcaaggtcactctgaatgagtctgaaatctgcgctggcgccgaaaagatcggttcaggcccatgtgaaggcgactatggaggaccactcgtgtgtgagcagcataaaatgcgcatggtgctgggtgtaattgtacccggtcgcggctgcgcgataccaaatcgcccaggtattttcgttagggtggcgtactacgccaaatggattcataaaatcatcctcacatataaggttccccaatcc

SEQ ID NO: 13420 - DNA, 2184 bp, Artificial Sequence
  derived and/or modified sequence
atgtgggtgaccaagctcctccccgcactgcttttgcagcacgtgctgctgcacctcctgctgttgcctatcgctatcccctatgctgagggacaacgtaagaggagaaacacaattcacgagtttaaaaagagcgccaaaacaacattgataaagatcgacccggctctcaagatcaaaacaaagaaagtcaacaccgctgaccagtgtgccaatcgctgtactcggaacaagggactgcccttcacctgcaaggctttcgtgtttgacaaggctaggaaacagtgcctctggttcccttttaatagcatgtcgagtggggtgaaaaaggagttcgggcacgagtttgacctgtacgagaacaaggactatatcagaaactgcatcatcggaaagggcaggagttacaagggtaccgtgtcaatcaccaagagtgggatcaaatgccaaccttggtcttcaatgatcccacatgagcattcctttttaccctcttcttaccgggggaaagacctgcaggaaaactattgccggaacccacgaggcgaggaagggggcccctggtgtttcacatccaaccccgaagtccgatatgaggtatgcgatatcccacagtgcagcgaggtggagtgtatgacctgcaacggggagagctatcgtggactgatggatcataccgagtctggtaagatctgccaacgctgggatcaccagacaccacacagacataagtttctgcctgaaagataccccgacaaaggcttcgatgacaactactgcaggaatccagatggacagcccagaccctggtgttatacactcgaccctcacactcgctgggaatactgcgcgatcaagacttgtgctgataacaccatgaacgacaccgacgtgcccctggaaaccaccgagtgtattcaaggacaaggcgaggggtaccgggggactgttaacaccatttggaacggtatcccctgtcaaaggtgggattcacaatatccacatgagcatgacatgacccccgagaactttaaatgtaaggatctccgggagaattattgtaggaaccctgatggctctgaatccccatggtgcttcactacggaccctaacatcagggttgggtactgctcccagatccccaattgcgatatgtctcatggacaagattgctaccgcggaaacgggaagaactacatgggaaatcttagccaaactcggtccggcctgacctgctccatgtgggataagaatatggaggacttgcaccgccacatcttttgggaaccagacgcatctaagcttaacgagaattactgcagaaaccccgatgacgacgctcacggaccctggtgctacactggaaaccctctgatcccatgggattactgccccatttcccgttgcgaaggagacactaccccaaccattgttaacctggaccacccagtcatcagttgtgctaaaaccaagcagctgcgggtcgtgaacggcatcccaacaagaactaacatcgggtggatggttagcctccggtataggaacaagcacatctgcggcggcagcctgattaaagagtcttgggtgctcacggcgcgccagtgttttccaagccgggacttgaaagattacgaagcatggttagggatccacgatgtgcacggccggggagacgagaagtgtaaacaggtacttaacgtgtcccaattagtctatggaccagagggaagtgatctggtacttatgaagctcgcccgtcccgcagtcctcgacgactttgtctcaacaatcgacctccctaactacggatgcacaatccccgagaagacaagctgtagtgtttacggctgggggtatacaggattgatcaactatgacgggctgcttagggtagcccatctatatataatgggcaatgaaaagtgcagccaacaccacagaggcaaggtcacacttaacgaaagtgagatctgtgccggagctgaaaagattggctcaggaccttgcgagggtgactacggaggcccactggtgtgcgagcagcacaagatgagaatggtgcttggtgttattgtacccggacggggctgcgctatcccaaacagacctggaatctttgtcagggtggcttactacgccaagtggatccacaaaatcatactcacatacaaggtacctcagtct

SEQ ID NO: 13421 - DNA, 2184 bp, Artificial Sequence
  derived and/or modified sequence
atgtgggtgacgaagctcctccccgccctgttgttacagcacgtcctcttgcacctcctgttgctgcccatcgctatcccatacgccgagggccaacgtaaacggagaaacacgattcacgagttcaagaaatcagccaagaccacgctcatcaagatcgatccggctcttaagattaagacaaagaaggtcaacaccgccgaccagtgcgcaaaccggtgcacgcgtaataagggactcccatttacatgtaaggcttttgtgttcgacaaggcccgcaagcagtgcctgtggttcccttttaacagcatgtcttccggagtgaagaaggagttcggccacgagtttgacctctatgaaaacaaggattatatccgcaactgcatcatcggtaaggggcgctcgtacaagggcactgtgtcgatcactaagagcggtatcaagtgccagccgtggtcctccatgatcccgcacgagcacagcttcctgccgagcagttaccgtggcaaggacctccaagaaaactactgtcgtaatcccagaggtgaggagggtggaccctggtgctttacttccaaccccgaggtccgctacgaagtctgcgatatcccgcagtgttctgaggtcgagtgcatgacctgcaatggcgagtcgtacaggggtctcatggatcacactgaaagcggtaagatttgccagcgctgggaccaccagactcctcatcggcacaagttccttcctgagcgttaccctgacaagggcttcgatgataactattgtcgtaaccccgacggtcaacctcgaccgtggtgctacactctcgatccgcacactaggtgggaatattgcgctatcaaaacctgcgcagataacacgatgaatgacactgacgtgccactagaaacgaccgagtgtattcaggggcagggcgaaggctaccgcggcacggttaataccatctggaacggcatcccctgccagagatgggattcgcagtacccccacgagcacgacatgactcctgagaacttcaagtgcaaggacctccgtgagaactactgtcgcaaccctgacggctccgagtccccatggtgcttcaccaccgatccgaatatccgggtcggatactgtagccaaatccccaactgtgatatgtcccacggtcaggactgctaccgtggcaatggcaagaactatatgggtaatcttagtcagacgcgctcaggtttgacttgctccatgtgggacaagaacatggaggatctccaccgacatatcttctgggaacctgacgcttccaaattgaacgagaactattgccgcaatcccgatgacgacgcccacggaccctggtgctacaccggcaatccccttatcccttgggattactgcccgatctccagatgcgagggtgataccacgcccacgatcgtgaacctggaccacccagttatttcctgcgccaagacgaagcagctgcgtgtcgtcaacggtattccgactcgcacaaacattgggtggatggtgtccctccgatacagaaacaagcacatctgcggtggttcattgatcaaggaatcctgggtcctcacagcccgccagtgcttcccctccagggacctgaaggattatgaggcatggctcgggatccacgatgtgcacggtcgcggtgatgagaagtgcaagcaggttctgaacgtgagccagctcgtttacggtccggagggctccgacctggtcttgatgaagttggcgcgtccagctgtcctggacgactttgtgtccaccattgatctccccaactacggatgtaccatccccgagaagacctcttgttcggtgtacggttggggctacacgggattgatcaattacgatggtcttctgagggtcgcgcacctgtacatcatgggcaacgaaaagtgttcacagcatcaccgcggcaaggttaccctcaacgaatctgagatttgtgcaggcgcggagaagattggttccggaccgtgcgagggagattacggtggccctctggtttgtgaacagcacaagatgcgcatggtcttgggtgtcattgtacccggtcgtggttgcgcaatccctaaccggcccggtatattcgtacgagttgcctattatgccaagtggatccacaaaatcatcctcacgtacaaagtgcctcagagt

SEQ ID NO: 13422 - DNA, 2184 bp, Artificial Sequence
  derived and/or modified sequence
atgtgggtgacaaaactcctgcctgcactgctcctgcagcacgtcctactccatctacttctcctaccaatcgctatcccctatgccgaagggcagagaaaacgccggaacactatccatgaattcaaaaaatcggctaaaactacgctcatcaaaatcgatcccgcactgaagatcaaaactaaaaaagtgaatacagccgatcagtgcgccaacagatgcacacggaacaaaggactgccattcacgtgcaaagccttcgtcttcgataaagcaagaaagcagtgcctttggttccccttcaattcaatgagttctggagttaaaaaagaattcgggcatgaattcgatctgtacgaaaacaaagattatataagaaactgcattatcgggaaggggcggtcatataaaggaactgtgtctatcactaaatccggaataaagtgtcagccctggtcttctatgatcccccacgaacattcttttctgccctcttcatatagggggaaagacctacaggagaactattgtcgcaacccacggggggaggaaggaggaccctggtgctttactagtaatcctgaagtgagatatgaagtgtgcgatatccctcagtgctctgaggtcgagtgtatgacatgtaacggggagagttatcgggggctgatggatcacactgagtccggaaaaatctgtcagaggtgggatcaccagactccacatcgccataaatttttgcctgaacggtatcccgataaagggtttgacgacaactattgccggaatccagatgggcagcctaggccctggtgctatactttggatccccatacgcggtgggaatattgcgcaattaagacatgtgcagataacactatgaacgatacagatgtgccactcgaaacaacagaatgtatccaggggcagggagaagggtataggggaacagtaaacactatttggaatggaataccttgtcagaggtgggattcccagtaccctcacgagcacgatatgacaccagaaaactttaagtgcaaagatcttcgggaaaattattgtagaaatcccgacgggtctgaatcaccttggtgcttcactactgaccctaatatcagggttggatattgttcgcagatccctaattgtgatatgtcccatggacaagattgctaccgggggaatggaaaaaactacatgggaaacttgtctcagacgcggagtgggcttacatgctctatgtgggataaaaacatggaagatctgcatcgccatatcttctgggaacctgatgcttctaagctgaacgaaaactactgccgaaatcctgatgatgatgcgcatgggccctggtgctatactggaaatcccctgatcccttgggactattgccccatctctaggtgtgaaggagacacaactcctacaatcgtgaaccttgatcaccctgttatttcttgtgccaaaactaaacagctgagagtagtgaatggaatacctacacgcacaaatatcgggtggatggtaagtctcagatataggaacaaacatatatgtggggggtcattgattaaagaatcatgggtgctgactgccaggcaatgctttccctctagggatctgaaggattatgaagcttggttaggaatccacgatgttcacgggcggggagatgaaaagtgtaagcaagtgctaaacgtttctcagctcgtatatggaccagagggatctgatctagtactcatgaaactggctaggccagccgtgttggatgattttgtttctacaattgacttgccaaattatgggtgtactatccccgaaaaaacttcatgctcagtgtacggatggggatatacagggttaatcaattacgatggacttcttagagtggcacatctttatattatgggaaatgaaaaatgttctcagcaccaccgcggaaaagtgactctaaacgaatccgaaatttgtgccggagccgagaaaatcggatccggaccctgcgaaggagattacggagggccccttgtgtgtgaacagcacaaaatgcgaatggtgctaggagtgatcgtgcctgggcgcggatgtgccatccccaatcgccccgggatctttgtcagagtagcttattacgcaaaatggatccataaaataatcctaacttataaagtacctcagtct

SEQ ID NO: 13423 - DNA, 2184 bp, Artificial Sequence
  derived and/or modified sequence
atgtgggttaccaagctcctcccagcactcctgcttcaacacgtgctgcttcatctcctgctgcttccaattgcgattccttacgcagaaggtcaacgaaagagaaggaataccatccatgaattcaagaagtccgccaagaccaccctgattaagatcgaccctgccctgaagattaagactaagaaggttaacactgcagatcaatgtgcaaacagatgtactagaaataagggacttcctttcacctgcaaggcttttgtgtttgataaagcaagaaagcagtgtctttggtttccatttaacagcatgagctccggtgtgaaaaaggaattcggccatgaattcgacctgtacgagaacaaggactacatcagaaactgtattatcggtaagggtagatcctacaagggtaccgtgtcgattactaagtccggaattaagtgtcagccctggagctctatgatacctcacgaacactcgtttctgccgtctagctatcggggaaaggacttgcaagaaaactactgcagaaatcccagaggggaggaaggaggaccctggtgcttcacctccaaccccgaagtcagatacgaggtctgtgacatccctcagtgttccgaagtggagtgtatgacctgtaacggagaatcgtacaggggactgatggatcacaccgagagcggaaagatctgtcaaaggtgggaccatcagaccccacataggcataagtttctgcctgaacgatacccagacaagggttttgatgataactactgtcgcaatccagacggacaaccccgcccttggtgttacacgcttgatcctcataccaggtgggaatactgtgcaatcaagacttgcgcggataacaccatgaatgataccgacgtgccactggaaacgactgaatgtatacaaggacaaggcgaaggttacagaggcactgttaacactatttggaacgggattccatgtcaaagatgggactcccaataccctcacgaacatgatatgaccccagagaactttaagtgcaaggatcttcgagagaattactgtcgcaacccggatggctccgaatccccatggtgttttactactgacccgaacattcgcgtcggatactgttcacagatcccaaattgtgacatgagccatggacaggattgttaccgagggaacggaaagaattacatgggaaacctgagccagacccgatcagggcttacctgttcgatgtgggacaagaatatggaagatctgcataggcacatattctgggaaccagacgccagcaaacttaacgagaactactgccgtaaccctgacgacgatgcacacggcccgtggtgctatactgggaaccctcttataccttgggattactgccccatttcgcggtgtgagggagacactacccctactatcgtgaatctggatcacccggtgatctcatgcgccaaaactaagcaattgcgggtggtcaatggcattccgactagaaccaatataggctggatggtgtcacttagatacagaaacaaacacatatgtgggggctcgcttatcaaggaatcctgggtgctgaccgcaagacaatgctttccctcccgagacttgaaggattatgaagcatggctgggtattcatgatgttcatgggcgtggagatgaaaagtgtaagcaggtccttaacgtgtcccaacttgtgtatggtccagagggttccgatctggtgcttatgaagctggcaaggcctgctgtccttgacgatttcgtgtccaccatcgatctgccgaattacggttgtactattccagaaaagacctcgtgttcagtgtacggctggggctacactggcttgattaactacgatggactcctgagagtggcacacttgtacatcatgggaaatgaaaagtgctcgcagcatcaccgagggaaggtgactctgaatgaatccgaaatctgcgcaggtgcagagaagattggctccggaccttgcgaaggtgattacggtggtccactggtgtgtgaacaacacaaaatgcggatggtccttggcgtcattgtgccaggtcgtggatgtgcaattcctaacagaccaggtattttcgtgagagtggcatactatgcaaaatggattcataagatcattctgacgtacaaagtccctcagtca

SEQ ID NO: 13424 - DNA, 2184 bp, Artificial Sequence
  derived and/or modified sequence
atgtgggttacaaaattactacctgcactgctacttcaacacgtccttctgcatctgctgctactgccaattgccatcccatacgcagaaggccaacgtaagcgcaggaatacaattcatgagtttaagaagagtgccaagaccacacttatcaaaattgacccggccttgaaaataaagaccaaaaaagtgaacaccgccgatcagtgcgccaacagatgcaccagaaacaaagggctcccttttacatgtaaggcgttcgtttttgataaagcccggaaacagtgtctttggttcccctttaacagtatgagtagcggagtcaaaaaagagtttggccacgaatttgatctgtacgagaataaggactacatcaggaattgtattatcggcaaagggaggagctataaaggcacagtgtccattaccaagtccggcattaaatgccagccttggtcttccatgattcctcacgaacattccttcctgccttcttcttaccgtggcaaggatctgcaggaaaattattgtcggaatccacggggcgaggagggtggcccctggtgctttacttctaatcctgaggtgaggtacgaggtgtgcgatatcccccagtgctctgaggtagagtgcatgacctgcaatggggaatcatatcggggacttatggatcatactgagagtggcaagatatgtcagagatgggaccatcagactccccatagacacaagttcctacctgagaggtatccagataaaggctttgacgataactactgccgaaacccagatggacagccaaggccatggtgctacaccctggaccctcacacccgctgggagtactgtgctatcaaaacctgcgcggacaatacaatgaacgacactgacgtgccactggaaactacagagtgtatacaggggcagggcgagggctacagaggaactgtcaataccatatggaacggcattccatgtcagcggtgggattctcaataccctcacgaacacgacatgacacctgaaaacttcaagtgtaaggaccttagggaaaactactgccgcaacccggatggaagcgagagtccctggtgcttcactacggacccaaatattagggtgggctattgttctcaaatccccaactgcgatatgtcacatggtcaggactgttaccgagggaatggcaagaactatatgggcaacttgtcccaaaccagatctgggctgacttgcagcatgtgggacaaaaacatggaggaccttcataggcacattttctgggaaccagatgcctctaaactgaatgagaactactgtcggaacccagatgacgatgctcacggcccttggtgttacaccggaaatcccctcatcccctgggattattgccccatatcccggtgcgaaggggatactacccccacaatcgtgaatctggatcaccctgttatctcttgtgccaaaaccaagcagctgcgcgttgtcaacgggatccctactcgaaccaacattggatggatggtgagtctcagatatcgcaataagcacatctgtggcgggtctcttattaaggaaagttgggtacttacggcacggcagtgtttcccctcccgggatctgaaagactacgaggcttggctcggcattcacgatgtgcatggcaggggagatgagaagtgtaagcaggttttaaacgtaagccaactggtatatggccctgagggctcagatctggtcctaatgaagctagcccgacctgcggtcctggacgatttcgtctcaactatcgatctgcctaactatgggtgtactatccccgagaaaacaagctgttccgtttacggatggggatacacagggttgattaactatgatggcctactgcgagtggctcacctgtacataatgggtaatgagaagtgttcccagcaccaccgaggaaaggtcacactgaacgaatccgaaatatgcgccggtgccgagaagattggaagcgggccttgcgagggagactatggtggccctctcgtctgcgagcagcataaaatgaggatggtgctgggagtgatcgtgccagggcgggggtgtgcaatacccaaccggccaggtatatttgtgcgagtggcatactacgccaagtggattcacaaaatcatccttacttacaaagtgccccaatct

SEQ ID NO: 13425 - DNA, 2184 bp, Artificial Sequence
  derived and/or modified sequence
atgtgggttacgaaattgttgcctgccctgcttctgcagcacgtcctcctgcacctgttattgctacccattgcaatcccctatgctgaggggcagaggaagcgacggaacaccatccatgagttcaaaaagtccgctaagaccactttaatcaaaattgaccctgctctgaaaattaagaccaaaaaggtgaacactgccgaccagtgtgcaaatcggtgcactagaaacaaagggttgccgttcacatgcaaggccttcgtctttgataaggctcgcaagcagtgcctgtggttcccctttaattcaatgtcatctggagtgaagaaggaattcggacatgagttcgatctttacgaaaataaagattatattcgcaactgcattatagggaagggacggtcctataagggcactgtctccattaccaaaagcggtataaagtgtcagccctggagcagtatgatcccacacgaacatagcttcctgccaagttcatacagaggaaaggacttacaggagaattactgtcgtaatcccagaggcgaggaaggcggcccatggtgttttacctccaaccccgaggtccgctatgaggtgtgtgatattccgcagtgcagcgaggtggaatgtatgacatgcaacggcgaaagttatagaggtctgatggaccatacagagtctgggaaaatctgccaacggtgggatcatcagacaccacatcgccacaagtttctgcccgagaggtacccagataagggtttcgacgacaactattgccgaaaccctgatgggcagcctaggccctggtgttataccctggaccctcatactcggtgggagtattgtgcgatcaaaacatgcgctgataacaccatgaatgataccgatgtaccactggaaacaaccgaatgcatccaaggccagggcgagggatacagagggacagtaaacacgatctggaatggcatcccctgtcagcgatgggatagtcaatacccccacgagcacgacatgacccctgaaaactttaaatgtaaggacttgcgcgagaactactgtagaaaccccgatggaagtgaatccccttggtgcttcaccacagatccgaatatcagggttgggtattgctctcagatccctaattgtgacatgagccacgggcaggattgctaccgcggaaacgggaagaattacatgggcaatttgagccagactcggagcggactaacatgcagtatgtgggataagaacatggaagacctgcaccgtcatattttttgggaacctgacgccagcaaactgaatgagaactactgccgcaaccctgacgatgatgcccacgggccttggtgttatacaggaaaccccttaatcccgtgggactattgccccatttcaaggtgcgagggtgacactaccccaaccatcgtcaacctggatcaccccgtgatttcttgcgcaaaaacaaagcagctgagagtcgtgaacggtattcctactagaaccaatataggctggatggtctctctgcggtatcgcaacaaacacatatgtggaggttccctgatcaaggagtcctgggtccttaccgcacgtcagtgcttcccaagtcgcgaccttaaggattacgaggcatggctggggattcatgacgttcacgggaggggagacgaaaaatgtaagcaggtgcttaatgtgtcccagctggtctacggacctgaagggtctgatctggtgctgatgaaactggcccggcccgccgtcctggatgattttgtgagcaccattgatctgcctaactatggttgtactattccagagaagacatcatgttccgtgtatggctggggatataccggcttgattaactacgatggactgctccgcgtggcacatctctacataatggggaacgaaaagtgcagccagcatcaccggggcaaggtgaccctcaacgagtcagagatctgcgcaggagccgagaagatcggtagcggaccctgtgagggggattatgggggtcccctggtgtgcgaacagcacaagatgcggatggtcctgggagttattgtgccgggtcgtggttgcgccattcctaatagacctggtattttcgtacgcgttgcttattacgccaagtggattcacaaaataattctcacttacaaggtaccccagtcc

SEQ ID NO: 13426 - DNA, 2184 bp, Artificial Sequence
  derived and/or modified sequence
atgtgggtcaccaagctcctccctgcactgcttcttcaacatgtgctgcttcaccttctgcttctgccaatagcgatcccttacgcggaagggcagcggaaaaggaggaataccatccatgaattcaagaagtcagcaaagacgaccctcattaagattgaccccgcactgaagattaagactaagaaggtgaataccgccgaccagtgcgcaaaccgatgcactcgcaataaggggcttccttttacttgtaaggcttttgtgttcgacaaagcaaggaaacaatgcctctggtttcctttcaacagcatgtcctcgggcgtgaagaaggagtttggacacgagtttgatctctacgaaaacaaggactacattcggaattgtatcattggaaagggtaggtcgtataagggtaccgttagcatcactaagtctggaattaagtgtcagccttggtcctcgatgatcccacacgaacactcatttctgccatcaagctaccgtggaaaggaccttcaggagaactactgtaggaacccgcggggggaggagggtgggccatggtgttttacgtcgaaccctgaagtgcgttacgaggtttgcgatattccacagtgttccgaggttgagtgtatgacctgtaatggagagtcatacaggggcctcatggatcataccgaatcaggaaagatttgtcagcggtgggatcatcaaactcctcatcgccataagtttctgccggaaagataccccgataaagggtttgacgataactactgtcgcaaccctgatggccagccccgcccgtggtgctacacccttgatccacacaccagatgggaatactgcgcaattaagacttgtgccgataataccatgaacgacaccgatgtgcctcttgaaaccaccgaatgtatacaaggacaaggagaaggttacagaggtaccgtgaacacgatctggaacgggatcccttgtcagagatgggactcccagtaccctcacgagcatgatatgactcctgaaaactttaagtgcaaagaccttagagagaattactgtcgaaatcccgacggcagcgaatcaccctggtgctttacgaccgatcctaatatcagagtgggctattgttcgcaaatccccaactgtgatatgtcgcatggacaggattgctatcggggcaacggtaagaactacatgggaaatctgagccaaaccagatcaggacttacttgttcaatgtgggataagaacatggaggacctgcaccgacatatcttttgggagccagatgcatccaaactcaacgaaaactactgcaggaaccctgacgatgatgcacatggaccatggtgctacactggaaatccactcattccatgggattactgccctatttccaggtgtgagggggatactacccctactatcgtgaacctggaccaccccgtcatctcttgcgcaaagacgaagcaactgcgcgtcgtcaacggaattccaacccggactaacattggctggatggtgtccctgagataccgcaataaacatatctgtggaggtagcttgattaaggagtcgtgggtgctcactgcacgtcaatgcttcccctcgcgcgatctcaaagattacgaagcctggttgggaattcatgacgtgcacgggcgcggcgatgaaaaatgtaagcaagtgctcaacgtctcgcaacttgtctacggacctgaagggtcggaccttgtgcttatgaagctggcgcgccctgccgtccttgacgattttgtgtcaacgatcgacctgcctaattacggatgcaccattcctgaaaagaccagctgttcagtgtacggttggggttacaccggactgataaactacgacggacttttgcgggttgcacatctgtacattatgggtaacgaaaagtgtagtcaacatcatagaggaaaggtgactctgaacgaatccgaaatctgcgcaggagcagagaaaattggaagcggcccatgtgagggtgattatggaggacctctggtctgtgaacagcataagatgagaatggtgctgggcgtcattgtgccaggaagaggatgtgcaatccccaaccgtccaggaattttcgtgcgcgtggcttactatgccaaatggattcataagattatactcacctacaaggtgccccaaagc

SEQ ID NO: 13427 - DNA, 2184 bp, Artificial Sequence
  derived and/or modified sequence
atgtgggtgactaagctgctgccggctttactgttgcagcacgtgctcctccacctcctgctgttgcccatcgccattccgtacgctgaaggtcagagaaaacgacgaaacacaattcacgagttcaagaagagcgctaagacaaccttaatcaagattgatccggccctgaagattaagacaaaaaaggtcaatacggctgaccaatgtgccaaccgttgcacccgcaataagggcctgcccttcacgtgtaaggcattcgtcttcgacaaggcgcggaaacagtgcctgtggtttccatttaactctatgagtagcggcgtgaagaaggagtttggacacgagtttgacttgtacgagaacaaggactatatacgaaattgcattatcggcaagggtcgctcctacaaaggcacggtgtcgataacgaagtccggtattaaatgtcagccgtggtcctccatgataccccacgagcactcatttcttcccagctcatacagaggcaaggacctacaagagaactattgtcgcaaccctcgcggtgaggagggcggcccatggtgctttacgtctaaccccgaggtgcgctatgaggtatgcgatattccacagtgctcggaggtggagtgcatgacatgcaacggtgaatcctaccgcggactgatggaccacacggagtccgggaagatttgtcaacgttgggaccatcagaccccccaccgacataaattcctacccgagcgttatccagataaaggattcgatgataattattgcagaaatccagatggtcaaccacggccctggtgctacaccctggatccacacactcgttgggagtactgcgctataaaaacatgtgccgataacactatgaacgataccgacgtgcccctggagacaactgaatgcatccagggacagggcgagggttataggggcacagtcaataccatctggaacggcattccgtgccagcgctgggatagccagtatccacatgaacacgacatgacacccgaaaatttcaagtgcaaagatctgcgagagaattactgtaggaaccctgatggttcagagtcgccatggtgcttcaccactgaccccaatatccgtgttggctattgcagccagatccctaattgcgatatgagccacggccaggactgctatagaggaaacggcaagaactacatggggaatctgagccaaaccaggtccggactgacttgctccatgtgggataagaatatggaggatctacaccgccacatattctgggagcctgatgcgtccaagctcaacgagaattactgtcgtaaccccgatgacgatgcgcacggaccctggtgctacacgggtaacccactaatcccttgggattactgcccaatttccaggtgcgagggcgacaccaccccaacgattgtgaacctggaccaccccgtcattagctgtgccaagactaaacaactgcgggtcgtgaatgggattcctacccgcacgaatattggatggatggtttcgttacgttatagaaacaagcatatttgcggtggcagcctgattaaggaatcttgggttctgacggcccgacagtgcttcccgtcccgcgacctgaaggactatgaggcatggctgggcattcatgacgtgcatggtcggggcgatgaaaaatgcaagcaggtcctgaatgtgtcccagctggtgtacggaccggagggcagcgacttggtcctgatgaagctcgcgcgaccggcggtgctcgacgactttgtgtcgaccattgatctaccgaactatggatgcacgataccagagaagacatcgtgcagcgtatacggatggggctacacgggcctgattaattacgatggactgctgcgtgtcgcccatttgtacattatgggtaacgagaagtgttcccagcaccacaggggtaaggtcacgctcaatgaatctgagatatgcgctggcgctgagaaaatcgggagtggaccatgcgagggcgactatggtggcccccttgtgtgtgagcagcacaaaatgcggatggtcctcggtgttattgtaccaggccgcggctgcgctataccgaaccgcccgggaattttcgtcagggttgcatactacgccaagtggatccacaagatcattctgacatacaaggttccacagagc

SEQ ID NO: 13428 - DNA, 2184 bp, Artificial Sequence
  derived and/or modified sequence
atgtgggtcactaagctgctgccggcactcctgcttcaacatgtgctgctgcacctcttgttgctgccaatcgcgatcccttacgccgaagggcaacggaagcgacggaatactatccacgagttcaagaaatcagccaagactactctgatcaagattgatccagctctgaaaatcaagactaagaaggtgaacaccgcggaccaatgcgcgaataggtgcaccagaaataagggacttccgttcacctgcaaggcattcgtgttcgataaagcacgcaaacaatgcctgtggttcccatttaactctatgagcagtggggtcaagaaggagtttggccatgagttcgatctgtacgagaacaaggactacatcaggaactgtataatcggaaagggtcggtcctataaaggcactgtcagcatcactaaatcaggaattaagtgtcaaccttggtcgtcgatgattccgcatgaacatagctttctgccctcctcttataggggaaaggatctccaggaaaactactgtcgtaatccacgaggagaagaaggaggcccatggtgcttcacctccaacccggaagtgcggtacgaggtctgtgacatcccccaatgcagcgaagtggaatgtatgacttgcaacggagaatcttacaggggcctgatggaccacaccgaatccggcaagatctgtcagagatgggaccaccaaaccccacatcggcacaagttcttgccggaacgatatccagataagggtttcgatgacaactactgtcggaaccctgacggacaaccgcggccctggtgctacaccttggatccgcatacccgctgggaatactgcgctatcaaaacttgcgccgacaacaccatgaatgacaccgacgtgccactcgagacgacggaatgcatccagggacaaggagaaggataccgcggaaccgtcaataccatttggaacggaatcccatgccagcggtgggattctcagtacccgcacgaacacgacatgaccccagagaactttaagtgcaaggacctgagggagaactactgcaggaacccagatggatccgaatccccgtggtgcttcactactgaccctaacatacgggtcggatactgctcccagattccgaattgtgatatgtcgcatggccaggattgctacagaggcaacggaaaaaactacatgggaaatctctcgcaaactagatcaggactgacgtgtagcatgtgggacaagaacatggaagatttgcatcgtcacatcttttgggagccggacgctagcaaactgaatgagaattactgcagaaaccctgacgacgatgcccatggaccgtggtgctacactggaaacccgctcatcccatgggactactgtccgatctctcggtgcgagggagatactaccccgactatcgtgaacctggaccacccggtgatctcgtgtgcgaaaaccaaacagctgcgcgttgtgaatggaatccctacgcgcaccaatatcggatggatggtcagcctccggtaccgcaataagcacatctgtggcggaagccttatcaaggaatcgtgggtgctgacggcgaggcagtgtttcccgtcccgtgatttgaaggactacgaggcatggttgggtatccacgacgtccacgggcggggtgacgagaaatgcaaacaagtgttgaacgtgagccagctggtgtacggacccgagggatccgacctggttctgatgaaactggcgcggccagcagtgctggacgacttcgtgtcaactatcgacctgcctaactacgggtgcaccatcccggaaaagacttcgtgctcggtgtacggctggggatacacgggcctcataaactacgacggtctgcttcgggtggcgcacctctacatcatggggaatgagaagtgcagccagcatcacaggggaaaagtcactctcaatgaatcggagatctgcgcaggcgcggagaaaattggttcaggaccctgcgagggtgactacggaggccccttggtgtgcgaacaacataagatgcgcatggttctgggagtgatcgtgcccggccgcggctgtgctatcccgaacagacctggaatcttcgtccgcgtcgcttactacgccaagtggattcacaagatcatcctcacctacaaggtcccacagtcc

SEQ ID NO: 13429 - DNA, 2184 bp, Artificial Sequence
  derived and/or modified sequence
atgtgggtgaccaagctgctgcccgcactcttactgcagcacgtactcctgcacttgctgctgctgccaatcgctattccttatgccgagggacaacggaagcgacgaaataccattcatgaattcaaaaaatctgccaagacaaccctaattaagatcgatcccgcgctcaagattaaaactaaaaaagtgaacaccgcagaccagtgtgctaatcggtgcacccgcaacaaggggctgccatttacctgcaaggcgtttgtcttcgataaggcacggaaacagtgcctgtggttcccgttcaactcaatgtccagcggtgttaagaaggagttcggtcacgaatttgatctctatgagaataaggactacatacggaattgcattatcgggaaaggacgatcgtacaaagggaccgtgagcatcacaaagtccggaattaaatgccagccatggagctccatgattccacatgaacactcgtttctgccatcatcctacagaggcaaggatctgcaagagaattactgtcgcaaccccaggggcgaagagggaggcccttggtgcttcaccagtaatcccgaagtgaggtacgaagtgtgtgatatccctcagtgttcagaggtagaatgtatgacctgtaatggcgagagctaccggggactgatggaccacactgagtcaggtaagatttgtcaacgctgggaccaccagactccccacagacacaaattcttgccagagaggtatccggacaagggcttcgacgacaattactgccgcaaccctgatgggcagccacggccttggtgttatactcttgatccacacacccggtgggagtactgcgctattaagacctgtgcagacaatacaatgaacgacacagacgtcccccttgagacgacggaatgcattcagggacagggtgagggctatcgcggtaccgttaacactatttggaatggtattccttgccagaggtgggacagtcagtatccccacgaacacgatatgacaccggaaaacttcaagtgtaaagacctgcgcgaaaactactgtcgaaatccagatggcagcgagtccccttggtgcttcaccacggatcctaacattagggtggggtactgtagtcagatccccaactgtgatatgtcccacggtcaggactgttaccggggcaacgggaagaactatatggggaacctcagccaaacccggtcagggttgacctgctccatgtgggacaaaaacatggaggatttacatagacatatcttctgggagccagatgcctccaagcttaatgagaattactgtcgcaaccccgacgatgatgcccatggtccctggtgttacaccggcaatccgctgatcccctgggattactgccccatatcccgctgcgagggggataccactcctacaattgtaaacctcgatcaccccgttatcagttgtgccaaaacgaaacagctgcgtgttgtcaatggtattcccacgagaaccaatattggctggatggtctcccttcggtatcgtaataaacatatctgtggtgggtcactgataaaagaaagttgggtgctgacggctcgccagtgcttcccttccagagacctcaaagattacgaggcatggttagggattcatgatgtccatggaagaggcgacgagaaatgcaaacaagtactaaacgtaagtcaactcgtgtacgggcctgaaggcagcgacctcgtgctcatgaagctggccaggccagcggttttggacgactttgtatcaaccattgatctgccgaactacggctgcacaattccggagaagaccagttgcagcgtgtatggctggggatacacagggcttattaactacgatggcctattgcgggtcgcccatttatatataatgggcaacgagaagtgctcacagcaccaccgaggaaaggtgacgctcaacgagagcgaaatctgcgctggcgcggagaaaattgggagtggcccctgcgagggggactatggcggcccgctggtgtgtgaacagcacaagatgcggatggtgctgggagttatagtgcccggcaggggttgcgctatcccaaatcgtcctggtatttttgtcagggtggcctactacgccaagtggatacataagatcattttgacatataaggtcccccagtcg

SEQ ID NO: 13430 - DNA, 2184 bp, Artificial Sequence
  derived and/or modified sequence
atgtgggtcaccaaactcctgccagctctgctgctgcagcacgtgctactccacttgttgttactgcctattgccataccgtacgccgagggacagagaaagagacggaacactatccacgagtttaagaagagcgcaaagaccacgttgatcaagatcgatcctgcgctgaaaataaagaccaagaaagtcaatacggcagatcagtgcgcgaatcggtgcacccgcaacaaggggctgccatttacctgtaaggcctttgttttcgacaaggcaagaaagcagtgtttgtggtttccatttaattctatgtcatccggagtgaaaaaagaatttggacacgaatttgacctatacgaaaacaaggactacattcgcaactgcattatcggcaaggggcgtagctacaaagggacagttagtatcactaaatctggcattaaatgccagccgtggtcttcgatgattccgcacgaacactcgtttcttccaagcagttaccgcgggaaagacctccaggaaaactattgtcgtaacccgcgaggagaagagggagggccttggtgtttcaccagcaatccagaagtgaggtacgaagtgtgcgatatcccacagtgctcagaagttgagtgtatgacctgtaacggcgaatcctaccggggacttatggaccatacagagagcggaaagatctgtcagaggtgggatcatcagaccccacatcgtcacaagttcctaccggagcgctaccccgataaggggtttgacgacaattactgccgcaatcctgatggacagcctcgtccttggtgctacacgctcgaccctcataccagatgggagtactgcgccataaagacttgcgctgacaataccatgaatgacaccgatgtgccactagaaaccactgaatgcatccagggtcagggcgagggctacagaggtaccgtgaacacgatctggaacgggattccttgtcagagatgggatagtcagtatccccatgagcatgacatgacccccgaaaacttcaagtgtaaagatctgcgagaaaattattgccggaatccggacggaagcgaatctccgtggtgcttcacgacagatccgaatatccgggtcggctactgctcccagattcccaactgcgatatgtcacatgggcaagattgctatcgtggcaacggcaagaattatatgggtaatctgtcacaaacaagatctggcctgacatgcagcatgtgggataagaacatggaggacctgcaccgacacatcttttgggaacccgatgccagcaagctcaatgaaaattactgccgaaaccccgacgacgacgctcatgggccttggtgttataccgggaatcccctcatcccttgggactactgccctatttctagatgcgagggagacacaactccaaccatcgtaaacctggatcacccagtgatctcttgtgccaagactaagcaactgagggtcgtaaacggcattcctactcggaccaacatcggctggatggtgtctttacgctaccggaataaacacatatgcggaggctccctgatcaaagagagctgggtgctgacggcaaggcagtgctttccgtcgagggatcttaaagactacgaggcctggctgggaatacacgacgtacacggcagaggtgacgagaagtgcaaacaagtcctgaatgtatcccagctagtctatgggcccgaaggaagcgatctggtgctgatgaaactggcccgaccggctgtcctggacgactttgtatccaccatcgacctacccaattacggttgcactattccagaaaagacatcttgttccgtctatggctggggttatacaggtttgattaactacgacggacttctcagagtggctcatctttacatcatgggtaatgagaagtgtagtcagcaccatcggggcaaggttaccctgaacgagtccgaaatctgcgccggagccgagaagatcggaagcggcccctgtgaaggggactatggcggaccgctggtatgtgagcagcataagatgcgcatggtcctcggagtgattgtgccagggcggggctgtgccattcctaacagaccagggatctttgtgcgcgtggcgtattatgcgaagtggatacataagattatacttacctataaagtacctcagtca

SEQ ID NO: 13431 - DNA, 2184 bp, Artificial Sequence
  derived and/or modified sequence
atgtgggttacgaaactattaccggcgctattattacaacatgtattattacatttactactactaccgatagcgataccgtatgcggaaggtcaacgtaaacgacgtaatacgatacatgaatttaaaaaatcggcgaaaacgacgttaataaaaatagatccggcgttaaaaataaaaacgaaaaaagtaaatacggcggatcaatgtgcgaatcgttgtacgcgaaataaaggtttaccgtttacgtgtaaagcgtttgtatttgataaagcgcgaaaacaatgtttatggtttccgtttaattcgatgtcgtcgggtgttaaaaaagaatttggtcatgaatttgatttatatgaaaataaagattatatacgaaattgtataataggtaaaggtcgatcgtataaaggtacggtttcgataacgaaatcgggtataaaatgtcaaccgtggtcgtcgatgataccgcatgaacattcgtttctaccgtcgtcgtatcgtggtaaagatttacaagaaaattattgtcgtaatccgcgtggtgaagaaggtggtccgtggtgttttacgtcgaatccggaagtacgatatgaagtttgtgatataccgcaatgttcggaagtagaatgtatgacgtgtaatggtgaatcgtatcgtggtttaatggatcatacggaatcgggtaaaatatgtcaacgttgggatcatcaaacgccgcatcgtcataaatttctaccggaacgttatccggataaaggttttgatgataattattgtcgaaatccggatggtcaaccgcgtccgtggtgttatacgctagatccgcatacgcgttgggaatattgtgcgataaaaacgtgtgcggataatacgatgaatgatacggatgttccgctagaaacgacggaatgtatacaaggtcaaggtgaaggttatcgaggtacggtaaatacgatatggaatggtataccgtgtcaacgttgggattcgcaatatccgcatgaacatgatatgacgccggaaaattttaaatgtaaagatctacgtgaaaattattgtcgtaatccggatggttcggaatcgccgtggtgttttacgacggatccgaatatacgtgttggttattgttcgcaaataccgaattgtgatatgtcgcatggtcaagattgttatcgtggtaatggtaaaaattatatgggtaatctatcgcaaacgcgatcgggtctaacgtgttcgatgtgggataaaaatatggaagatctacatcgtcatatattttgggaaccggatgcgtcgaaattaaatgaaaattattgtcgaaatccggatgatgatgcgcatggtccgtggtgttatacgggtaatccgttaataccgtgggattattgtccgatatcgcgttgtgaaggtgatacgacgccgacgatagtaaatttagatcatccggtaatatcgtgtgcgaaaacgaaacaattacgtgtagttaatggtataccgacgcgtacgaatataggttggatggtatcgttacgttatcgtaataaacatatatgtggtggttcgttaataaaagaatcgtgggtattaacggcgcgtcaatgttttccgtcgcgagatttaaaagattatgaagcgtggttaggtatacatgatgtacatggtcgaggtgatgaaaaatgtaaacaagtattaaatgtttcgcaactagtttatggtccggaaggttcggatttagttctaatgaaattagcgcgtccggcggtattagatgattttgtatcgacgatagatttaccgaattatggttgtacgataccggaaaaaacgtcgtgttcggtatatggttggggttatacgggtttaataaattatgatggtctattacgagttgcgcatctatatataatgggtaatgaaaaatgttcgcaacatcatcgtggtaaagtaacgttaaatgaatcggaaatatgtgcgggtgcggaaaaaataggttcgggtccgtgtgaaggtgattatggtggtccgttagtatgtgaacaacataaaatgcgaatggtattaggtgttatagtaccgggtcgtggttgtgcgataccgaatcgaccgggtatatttgttcgtgttgcgtattatgcgaaatggatacataaaataatattaacgtataaagtaccgcaatcg

SEQ ID NO: 13432 - DNA, 2184 bp, Artificial Sequence
  derived and/or modified sequence
atgtgggtgactaagctgctgcccgccctgttactccagcacgttttacttcatttgctgctactgcccattgctattccctacgcagagggtcagcggaaaaggaggaataccatccatgaattcaaaaagtcggctaaaacaactctaataaaaattgatccggccctcaagattaaaaccaagaaggttaacaccgcggaccaatgtgctaacaggtgcaccaggaataaagggctgccgttcacctgcaaagcttttgtgttcgacaaagcccgcaaacaatgtctgtggttccccttcaactccatgagctccggggtgaaaaaggagtttgggcatgaattcgacctgtatgaaaataaagattacatccgtaattgcattataggaaagggacggagttataaggggactgtctcaattaccaaatccggcattaagtgccaaccttggtcaagcatgatccctcacgaacactcatttttgccgagttcttatagggggaaagatttacaggagaactactgtcggaacccaagaggagaagagggagggccttggtgtttcacctctaacccagaggtccgctacgaagtgtgtgatataccacaatgtagtgaagtggagtgtatgacatgtaatggggagtcctaccgcgggctgatggaccacacagaatcggggaagatttgccaacgttgggaccaccagacaccacacagacacaagttcctgcccgagagatatccggataaagggtttgacgataattattgccggaatcccgacgggcagccaagaccctggtgctatacgcttgatccacacacgagatgggagtattgcgccatcaaaacgtgcgctgacaatacaatgaacgacactgacgtaccactcgagacgaccgagtgcatccagggacagggcgagggctaccgtggcaccgtaaacaccatctggaatgggatcccctgccagaggtgggactcccagtacccccacgagcacgacatgacacccgagaattttaagtgcaaggacctaagggaaaactactgtcgaaaccccgacgggtccgagagcccatggtgttttacgaccgacccgaacattcgagtggggtactgctcccagatcccaaactgcgatatgtcccatggtcaggactgctaccgcggaaatggaaaaaactatatggggaatctttcgcagaccagaagcggcctaacatgtagcatgtgggataagaacatggaagacctacatagacacatcttttgggaaccagacgcaagtaagcttaacgaaaactattgccgaaaccctgatgatgacgcccacggcccctggtgctatacaggcaatcctctgatcccatgggactattgtcctatctctcgctgcgagggcgacacgactccaacaattgttaatctggaccaccccgtaatttcctgtgccaagaccaagcagctcagagttgtaaatggcataccaactcggactaatatcggatggatggtgagtttgagatatagaaacaaacacatatgtggcggttcactgataaaagaaagttgggtattgactgcacgccagtgttttccgtcccgagacctgaaagattacgaggcttggctggggatccatgatgtgcacggaaggggggacgagaagtgcaaacaagtgctgaatgtgtcgcagttggtgtacgggccagaggggtccgatctcgtgctgatgaagttggccagacccgccgtgctggacgacttcgtgagcacaatcgacctgcccaactatggctgcactattcccgagaaaacatcatgtagcgtctacggatggggatacacagggctgattaactacgatggcctgcttcgtgtagcccacctttatattatgggcaatgagaaatgcagccagcaccaccgcggcaaagtcaccctgaacgaaagcgagatatgcgcgggagcagaaaagattggctcgggtccttgcgaaggcgactacggcggtccactggtgtgcgagcaacacaagatgcgcatggtgctgggggtaattgtgccgggtcggggttgcgccattcctaacagacccgggattttcgtccgggtggcctactacgcaaaatggatccacaagattattctcacgtacaaagtccctcagagc

SEQ ID NO: 13433 - DNA, 2184 bp, Artificial Sequence
  derived and/or modified sequence
atgtgggtgaccaagcttttaccagcactccttctgcaacacgtacttctacacctcctcctcctccctattgctatcccctacgctgaagggcaacgcaagcggcgtaatactatccatgaattcaaaaaatctgccaagacgacactaattaagatcgacccagctttaaagatcaaaacgaagaaggttaacaccgctgatcagtgcgccaatcggtgtacacgtaataagggcctgccatttacttgcaaagcttttgtgttcgataaggcacgaaaacagtgcctgtggttcccattcaacagcatgtcttctggggtaaaaaaggaattcggccacgaatttgacctgtacgaaaacaaagattatattagaaattgtattatcggaaagggcagaagctataaaggaaccgtgtcaatcacgaaatcagggatcaagtgtcagccttggtcttccatgatcccacatgagcactcgttcctaccttcctcctaccggggtaaggatttacaggagaattattgtcgtaatccaaggggtgaagagggcgggccctggtgtttcacaagtaatccggaggtgcgctacgaggtctgtgacatcccccagtgcagcgaagttgagtgcatgacttgcaatggcgagtcatatcgggggctcatggaccacaccgaatccggcaagatctgtcagagatgggaccatcagacgccacaccggcacaagttccttcctgaacgctatcccgataagggattcgacgataattactgtagaaatcctgatggccagccgagaccctggtgctatacactggacccacacacgaggtgggagtactgcgccataaaaacgtgcgcagacaatactatgaacgataccgacgtaccacttgagaccactgaatgtattcaggggcagggcgagggctataggggcacggtcaacaccatttggaacggcataccttgccaaagatgggatagccagtacccacacgaacacgatatgacccctgagaacttcaagtgcaaagatctgagggaaaactattgccgcaatcctgatggctccgagtcgccttggtgcttcaccacagatccaaatatccgtgtggggtattgcagccagattcccaattgcgatatgtcccatggccaggattgctacagaggaaatggcaagaattatatgggcaacctgtcacagacccggagtggcctgacctgttcgatgtgggataaaaatatggaagacttgcatcggcacattttctgggaacccgacgcctctaaactgaatgagaactactgtcgcaaccccgatgacgatgcccatggaccctggtgttacactggcaatcctctgattccctgggactactgccccatcagcagatgtgaaggagacaccactcccactatcgtcaacctggaccacccagtgatcagctgtgccaaaaccaagcagctgagggtggttaacggcattcccactcggacaaacataggctggatggtgagcctgcgctaccgcaacaaacatatctgcgggggttccctgattaaggagtcctgggtgctgacagcccggcagtgtttcccctcacgagacctcaaagattacgaagcatggctgggtatccacgatgtacacgggaggggcgatgagaagtgtaagcaggtactgaacgtgagtcaactggtttatggccccgaaggctccgatctcgtgcttatgaagctggctagacccgctgtgctggatgacttcgtgtctacaatagacttgccaaactatggctgtacaatacccgagaagacttcctgttctgtctatggttggggatacaccgggttgattaactatgacgggctgttgcgagtggcccacctgtacattatgggcaatgaaaaatgtagtcagcatcatcgcggcaaggtaacactcaatgaatctgaaatctgcgctggcgccgagaagattgggtctggcccttgcgagggtgactacgggggcccgctagtgtgtgagcagcacaaaatgagaatggtcttgggggtaattgtgcccgggcgcggttgcgccatccccaacagaccgggtatctttgttcgcgtggcctattacgcgaaatggattcacaagatcatccttacatataaggtgcctcagtct

SEQ ID NO: 13434 - DNA, 2184 bp, Artificial Sequence
  derived and/or modified sequence
atgtgggtcaccaaacttctgccggctctcctgctgcagcatgttctgctccacttgttgctccttccaatcgccatcccatatgcagaagggcaacgtaaacgtcgaaacaccattcacgaattcaagaagtcggcaaaaacgaccctgatcaagatagatcctgcccttaagatcaagaccaagaaggtcaacactgcagatcaatgtgcgaaccggtgtacccgaaacaagggacttcctttcacctgtaaggcctttgtgtttgacaaggcgcgtaagcagtgtctctggtttcccttcaattccatgtcctctggagtaaagaaagaatttggtcatgagtttgatctgtacgagaataaggactacattcgtaattgcatcatcggaaagggtcggtcgtacaaaggcaccgtgtcaataactaagagcggaattaagtgtcaaccatggtcatcgatgatacctcatgagcactctttccttccctcgtcctaccggggcaaggaccttcaggaaaactactgccggaatccacgaggggaagagggtggaccctggtgtttcacctctaacccagaagtcagatacgaagtgtgcgatattcctcagtgtagcgaagtcgaatgcatgacttgtaacggagaaagctacagaggtctgatggaccatactgaatcagggaagatttgtcagcgttgggaccaccagacccctcaccgacacaaattcctccctgaaaggtaccctgataaaggttttgacgacaattactgcaggaatccagatggacaacctagaccttggtgttacacccttgacccccacactaggtgggagtactgcgcaattaagacctgcgccgacaatacgatgaacgacaccgatgtgcctctggagactactgagtgtatccaaggacaaggagagggatataggggaaccgtgaacaccatttggaacggtattccttgtcaacggtgggactcccaatacccccatgaacatgatatgacccccgaaaactttaagtgtaaggacctgcgcgaaaactactgtcggaacccagatggttccgaatccccttggtgctttactactgatcccaatattcgagtggggtattgttcacaaatcccgaactgcgatatgagccatggacaagactgttaccggggtaatggaaaaaactatatggggaaccttagccagacccgtagcggactgacgtgttcgatgtgggacaaaaacatggaagatcttcatcgccacattttctgggaaccagacgcgtctaaactcaacgagaactactgtagaaaccctgatgatgatgcgcacggaccatggtgctacactggaaacccactcattccatgggattactgccccatttctcgctgtgaaggagacactaccccgactattgtcaacctggatcatcccgtgatttcctgtgccaaaaccaagcaactgcgggtcgtcaacggtatcccaactcgcactaacatcggatggatggtgtcgctgcgataccgcaataaacacatctgcggcgggagtcttatcaaggaatcatgggtgcttaccgcacggcaatgtttcccctcacgtgatcttaaggactacgaggcttggctgggaatccatgatgtgcacggcaggggggatgagaagtgtaagcaagttctgaacgtctcacagcttgtgtacggcccagaaggatccgatctggtcctcatgaagctggcaagacctgcggttctggacgactttgtttccaccattgatcttcccaactacggatgtaccattcctgagaaaacgtcatgctcggtgtacgggtgggggtacactggcctgataaactacgacgggcttctgcgagtcgcacatctttacatcatgggaaatgaaaagtgttcgcaacaccataggggcaaggtgacgctgaatgaatcagagatatgtgcgggcgcagagaaaattggttcaggaccctgtgaaggtgattacggaggcccgctggtgtgtgaacagcacaagatgcggatggtgctcggtgtcattgtcccaggacggggatgcgcaattcctaatagacctgggatatttgtgcgggtggcttattacgcaaaatggattcataagattatcctcacttataaggtgccacagagc

SEQ ID NO: 13435 - DNA, 2184 bp, Artificial Sequence
  derived and/or modified sequence
atgtgggtgacaaagcttctccccgctcttctgttgcaacacgttttgctgcacctcctactcctgcctattgctatcccctatgctgagggacagcgcaaaaggcggaacaccatacacgagtttaaaaagtccgccaaaaccaccctgataaagatcgatcccgcgctcaagatcaaaactaaaaaggtgaatacggccgatcagtgtgctaatcggtgcactaggaataaggggttaccgtttacatgcaaggcattcgtctttgataaggccaggaagcagtgtctgtggttcccgttcaactcgatgagctctggggtaaagaaggagttcggccatgaattcgacctctatgagaacaaggactacatcagaaattgtatcattgggaaagggaggtcctataagggcacagtctcgatcacaaaatcaggcattaagtgccagccatggtccagcatgattccacacgagcacagctttcttccctcttcctacagaggcaaagacctgcaggaaaattattgtcgcaacccccgcggggaggaaggaggaccatggtgtttcacgtcaaatccggaggtcagatacgaggtgtgcgatatcccccagtgtagtgaggtcgagtgtatgacctgtaacggagaaagttataggggactgatggatcataccgaatctgggaagatttgtcagaggtgggatcaccagacaccacataggcacaaattcttacctgaaagataccccgataaaggttttgatgataattattgtaggaacccggacgggcagccccgtccctggtgttatactttagatccccacacccggtgggaatactgcgctatcaagacctgtgccgataataccatgaatgacactgatgttcctctggagactacagagtgcatacaggggcagggcgaggggtacaggggaactgttaacaccatttggaatggcataccctgtcagagatgggattcccaatatccccacgagcacgacatgacacctgagaactttaagtgcaaggacctgagagaaaactactgtagaaaccctgacggctcggagtctccatggtgctttaccaccgaccccaacattcgggtaggttactgtagccagattccaaactgtgatatgtcccacgggcaggattgctaccggggaaacgggaagaactatatgggcaatttgagccagacacgctctgggctgacctgctctatgtgggacaaaaacatggaggatctccatagacatatcttctgggagcctgacgctagcaagttgaatgaaaactactgccgcaatccagacgatgatgcacatggcccatggtgctatactggcaatcctctcattccttgggattattgtccgatttcgcgctgcgaaggtgacacaacaccaaccatcgtcaatcttgatcaccctgtcattagttgcgcgaaaactaaacaactccgagtggtcaatgggattcccacgcgaacgaatattgggtggatggtgtctctacggtaccgtaataagcacatctgcgggggcagcctgatcaaggaatcttgggttcttaccgctaggcagtgtttcccctcccgtgacttaaaggactacgaagcatggctgggaatacatgacgtgcacggtcgtggggatgagaaatgtaagcaggtgcttaacgtgtcccagcttgtctacggccctgagggatcagacctggttctgatgaagttagcccgacctgctgttctggatgactttgtttctactattgatctgcccaactacgggtgcacaatacctgagaagaccagctgttccgtatacgggtgggggtacacaggcttgattaactatgatgggctgctccgagttgctcacctctatattatggggaacgagaagtgctcccagcaccaccgtggtaaggtgactctcaatgagagcgaaatttgtgctggcgctgaaaagattggttccggcccctgcgagggagattacggcgggccgctggtctgcgagcaacacaagatgcgcatggtactcggggtcattgtcccgggccgcggttgtgccatccctaataggcccggcattttcgtgagagtcgcctattatgccaaatggattcataagatcatcttaacgtataaagtgccacaatcc

SEQ ID NO: 13436 - DNA, 2184 bp, Artificial Sequence
  derived and/or modified sequence
atgtgggtaactaagctcctcccagcactgctcttgcagcatgtgcttctgcacttgctcctgctcccaatcgcgataccatacgctgaaggccaacggaagagaaggaacaccatccatgaattcaagaaatcggcgaagaccactctgattaagatcgacccggcactgaagataaagactaagaaagtgaacaccgctgatcaatgtgccaaccgctgcacccgcaacaagggcctccctttcacttgcaaggcttttgttttcgacaaagcccgtaagcagtgcctgtggttcccgttcaattccatgtcatctggagtgaagaaggagtttgggcatgaattcgacctgtacgagaataaggactacattagaaactgtataatcggcaagggacgatcgtacaaaggaactgtgtcaattactaagtcggggatcaagtgccagccatggtcctcaatgattccgcacgagcacagctttctcccgtcaagctaccggggcaaggatctgcaagagaactattgtaggaacccccggggcgaagagggaggtccgtggtgcttcacctcaaacccagaggtgagatacgaagtctgtgacatcccgcaatgtagcgaggtggaatgcatgacctgcaatggagagtcctatcggggactcatggaccacaccgaatcaggcaagatttgccagcggtgggatcatcagaccccacaccgccacaagttcctgccagaacgatacccggataaggggttcgacgacaattactgccgcaaccctgatggacagcctcgcccgtggtgttacaccctggacccacatactcgctgggagtactgcgccatcaagacctgcgccgataatacgatgaacgataccgacgtgccgcttgaaaccaccgaatgtatccaggggcagggagagggatacaggggcactgtgaatactatctggaatggcatcccatgccagagatgggactcgcagtatccgcacgaacatgacatgaccccggaaaactttaagtgtaaagacctgagagaaaactattgtcggaacccagatggctcggagtcaccatggtgcttcactaccgacccgaacatccgcgtcggttattgttcgcagattcctaactgcgacatgtcccacggacaggattgctacaggggaaacgggaaaaactacatggggaacctgtcccagaccaggtctgggctgacttgctcaatgtgggacaagaacatggaagacctgcatcgccacatcttctgggaaccggacgcaagcaaactgaatgagaactactgtagaaaccccgacgatgatgctcacgggccgtggtgctacaccgggaaccctcttattccttgggactactgtccgatctcacggtgtgagggagacacgacccctaccatcgtgaatcttgatcacccagtcatttcgtgcgctaaaacgaaacaactgcgggtcgtgaatgggatcccaacccgcactaacatcggttggatggtcagcctgcgctaccgtaacaagcacatctgcggtggctcgctcatcaaagagagttgggtgctgaccgcccgccagtgttttccctcccgggatctgaaagattacgaggcatggttgggaatccatgacgtgcacggacggggagatgagaaatgcaagcaggtgctgaatgtgtcacaactggtgtacggaccagagggatcggatctggttctgatgaagctggcgcgccctgcggtgcttgacgacttcgtcagcacgattgacctcccaaactacggatgcacgatcccagaaaaaacttcatgttccgtgtatgggtggggatacactgggttgatcaattacgacggactgctgagagtggctcacctctacattatgggcaacgagaagtgttcgcaacatcacagaggaaaagtcactctgaatgaatccgagatctgtgccggtgccgagaagattggaagcgggccgtgcgagggagactacggagggcctctcgtgtgcgagcagcacaaaatgcggatggtgttgggtgtcatcgtccctggacggggctgcgcaatcccgaaccggccgggaattttcgtgcgggtggcctattacgcgaagtggatccacaagattattctcacttacaaggtgccacagtcc

SEQ ID NO: 13437 - DNA, 2184 bp, Artificial Sequence
  derived and/or modified sequence
atgtgggttaccaagctgctgccagccctgctgcttcagcacgtcctcctgcatctcctgctgctgcctattgccatcccatacgcggagggacaaagaaagcgcaggaacaccatccacgagttcaaaaagagcgctaaaaccactctcatcaagatcgacccggcgctcaaaatcaagaccaagaaagtgaatactgccgaccagtgcgccaatcgatgcactcgcaacaagggtttgccattcacttgtaaggcgttcgtgttcgataaggcccggaagcagtgcctttggttccccttcaactcgatgagctccggggtcaagaaggagttcggccatgagttcgacctctacgagaataaggactatatccgtaattgtatcattggaaagggaagaagctacaagggcacggtgagcatcaccaagtccgggatcaagtgccagccgtggtcgtcgatgattccgcacgaacattcatttcttccttcatcataccgcgggaaagacctgcaagaaaactactgccggaacccacgcggagaagagggagggccttggtgcttcacctcgaacccagaagtccggtacgaggtgtgtgacattcctcaatgctcagaggtagaatgcatgacctgcaatggcgagtcttacagaggactgatggatcacacggaatcaggcaagatctgccaacggtgggaccaccagactccgcaccgccacaagttcttgcccgagaggtatccggacaagggattcgacgataactactgtcgcaatcctgatggacagccacgcccttggtgttacaccttggatccgcacactcgctgggaatactgcgcgatcaagacctgcgccgacaatactatgaacgacactgacgtgccgctggaaacgaccgagtgtatccaaggccagggagaagggtacagaggaacggtgaacactatctggaacgggattccatgtcagagatgggatagccagtacccccacgagcatgacatgaccccggagaacttcaagtgtaaagacttgcgcgaaaactactgtagaaatcctgacggctccgagtcgccgtggtgctttactactgatccaaacattagggtggggtactgctcgcaaatcccaaactgcgatatgtcacacggtcaagactgctatcgcggaaacggaaagaactacatgggcaacctcagccagacccggagcggcctcacctgctctatgtgggacaagaatatggaggacctccaccggcatatcttctgggagccggacgcctcgaagttgaacgaaaactattgtcggaacccagacgacgatgcccacgggccatggtgttacactggaaaccctctgataccatgggactactgcccgatctcacggtgcgagggagataccacgccgaccatcgtcaatctggaccatccggtgatctcgtgcgccaagaccaagcagttgcgggtggtgaacggcatccccactaggactaacattggatggatggtcagcctgcgttacaggaataaacacatctgcgggggcagcctgatcaaggagtcatgggtgctgaccgcgcgccaatgttttccgtccagggacctgaaagactacgaggcatggctcggaatccacgacgtgcatggaaggggagacgaaaagtgcaaacaagtgctgaacgtgtcccaattggtgtatgggccagaaggatctgatctggtgctcatgaaactggccagaccggcagtgctggacgacttcgtcagcactattgaccttccgaattacggctgcacgatcccagagaaaacctcatgttcggtgtacgggtggggctacaccggactgattaactacgacggtctgctgagagtggcacatctgtacattatgggaaacgagaaatgctcgcaacatcaccggggaaaggtcactctgaacgaatccgaaatctgcgcgggggcggagaagatcggttccggaccttgcgaaggcgattacggcggaccactcgtgtgtgaacagcataagatgagaatggtcctgggagtcatcgtgccggggcggggttgtgcaatccctaataggccaggaattttcgtccgggtggcctactacgctaagtggattcacaaaatcattctgacctacaaagtgccccagtcg

SEQ ID NO: 13438 - DNA, 2184 bp, Artificial Sequence
  derived and/or modified sequence
atgtgggtgaccaagctgctccctgccctgctgcttcagcacgtgctccttcatctgcttctgcttcccattgcaattccttacgcagagggacaacgaaaaaggcggaacaccattcacgaattcaagaagtcggcaaagaccaccctcattaagatcgatccagcacttaagatcaagaccaagaaggtcaatactgcagatcaatgtgccaaccggtgtactagaaacaagggccttcctttcacttgcaaggcatttgtgtttgacaaggctcgcaaacagtgcttgtggtttccatttaacagcatgtcgagcggagtcaaaaaggagtttggacatgagtttgatctttatgagaacaaagattacattagaaattgcattattggcaagggtaggtcgtacaagggcaccgtgtcgatcacgaaatcaggcattaagtgccaaccctggagctccatgattccacacgaacactcctttttgccctcctcctaccgagggaaagacctgcaagaaaactactgcagaaaccctcgcggtgaagagggtggcccgtggtgttttacgtccaacccagaagtgcgatacgaagtgtgtgatattcctcaatgttcggaagtggaatgcatgacctgcaatggggaatcctacagagggttgatggaccataccgaatcggggaagatttgccaacggtgggaccatcagacccctcatcgccataagttcttgcccgaaagatacccagataaaggtttcgatgataactattgccgcaatccagatggtcaacctcgaccttggtgctacacccttgatcctcataccagatgggagtactgcgccataaagacctgtgctgataacactatgaatgataccgatgtgcctctggagactactgaatgtattcagggacaaggcgagggctaccggggtactgtgaacaccatttggaatgggataccctgtcagcgttgggattcccagtacccccatgaacacgacatgactccggagaatttcaaatgtaaggacctcagggagaactattgccgaaacccagacggctccgaatcaccttggtgctttactacggaccctaatatcagagtgggttactgtagccaaataccgaattgtgacatgtcgcatggacaggattgctatcgggggaacggaaaaaactacatgggcaatttgtctcaaactcgctcgggacttacgtgctcgatgtgggataagaacatggaagatctgcatcgtcatatcttctgggaacctgatgccagcaaacttaacgagaattactgccgcaatcctgatgacgacgcccacggaccctggtgttacactggtaaccctttgatcccatgggactactgtcctatctcgaggtgtgagggcgatactactcctactattgtgaatctcgaccaccctgtgatctcgtgtgcaaagactaagcaactgcgcgtggtcaacggaattccgacccgaactaacatagggtggatggtttctctgcgctataggaacaagcatatctgtgggggatcgctcattaaggaatcctgggtgctcactgcaaggcaatgctttccatctcgggacttgaaagattatgaggcgtggcttggtattcacgatgttcatggacgcggcgatgaaaagtgtaagcaagtgctgaacgtctcgcaacttgtctacggtccagaaggatccgacctcgttcttatgaaactggcaagaccggctgtgctggacgattttgtgagcactattgatctgcccaactacggatgtactatccccgagaaaaccagctgttcggtgtacggttggggatacactggactcatcaactacgatggacttctccgcgttgcacatctgtacattatgggaaatgagaagtgtagtcaacatcacagaggtaaggtgactttgaatgaaagcgaaatatgtgccggagcagagaagattggttccggcccatgcgaaggagactacggcggcccactggtctgtgaacagcacaagatgagaatggtgctcggtgtcatagttccaggaagaggatgtgcgattcccaatcgaccagggattttcgtcagagtggcttactacgcaaagtggatccataagatcatactgacctacaaggtccctcaatcg

SEQ ID NO: 13439 - DNA, 2184 bp, Artificial Sequence
  derived and/or modified sequence
atgtgggtgaccaagttgctaccggcgctgcttttgcaacacgtcctcctacacctcctgctcctacctatcgcgataccgtatgccgaagggcaacgcaaaaggcgcaataccatacatgaatttaagaagtccgctaaaacaacgcttatcaagatagatccggccctcaaaatcaagactaagaaagtcaatacggctgaccagtgcgccaatcggtgtacgcgtaataaaggcctcccctttacatgcaaggcatttgtgttcgataaggctcgtaaacagtgcctgtggttccctttcaacagtatgtcgtccggagttaagaaagagttcggccatgaatttgacctatacgaaaacaaggattacatccgcaactgcattatcgggaaaggtcgaagctataaaggcacggtctcgattacaaagtccgggattaagtgccaaccatggtcctctatgattccgcatgaacactcgtttttgccttcttcttacagagggaaggatctccaggaaaactactgtcgaaaccctcgtggcgaggagggtggcccctggtgcttcacgtcgaaccccgaagtgcggtatgaagtatgcgacatcccacagtgctccgaggtcgagtgcatgacctgtaacggtgaatcctatcgtggtcttatggaccacacagagagtgggaaaatttgtcaacgctgggatcatcagacaccacaccgtcacaagtttctgcccgaaagatatcccgataagggcttcgatgataactattgccggaacccagatggccaacctcgcccatggtgctatactctggaccctcatacacggtgggagtactgcgccatcaagacctgcgctgacaacacaatgaacgacacagatgttcccctcgaaaccacagagtgtattcagggtcagggagagggctatcggggtacggtcaatacgatctggaacggaatcccctgccagaggtgggactcacagtaccctcatgaacacgatatgacacccgaaaactttaagtgtaaggatttgcgagagaactattgtcgaaatcctgatggcagtgagtccccatggtgctttactacggaccctaatatacgtgtcggatactgcagtcagatccctaactgtgatatgtctcatggacaggattgttatcgcgggaacggtaaaaattatatggggaacctgtcgcaaacacgatccggcttgacctgtagcatgtgggataagaatatggaggatctgcaccgacacatattctgggaacctgatgctagtaagttaaatgaaaattactgtcggaacccagatgacgacgctcacggtccgtggtgctatacaggaaacccccttatcccttgggactattgtcccatctctcgttgtgagggtgataccaccccaactatcgttaatctagatcatcccgtcatatcctgcgctaagaccaaacaattgagggtggttaacggaataccaacgaggacaaacattggttggatggtgtccctgcgatatagaaataaacacatttgtgggggttctctgattaaggagtcgtgggtacttaccgcgcgccagtgctttccgtcccgagacttgaaggactacgaggcctggctcggaattcatgatgtgcatggtcgcggggacgaaaaatgtaaacaagtccttaacgtttcgcagctcgtgtatggccccgaaggttcggacttggtgctgatgaagcttgcgagacctgctgtactagatgatttcgtgtctaccatagacttgccgaactatggctgcactatccccgagaagacctcttgtagcgtttacggttggggctatacgggattgataaactacgacggtctgcttagagtggcgcacctctacatcatggggaatgagaagtgctcacagcatcaccgaggcaaggtcactctcaacgagagcgaaatctgcgccggcgctgaaaagattggaagtggcccctgtgaaggagactacggtggcccgttggtttgcgagcaacataagatgcgtatggtccttggggttattgttcccggtcggggttgcgcgatcccaaaccgccctggcatctttgttcgcgtcgcctactacgctaagtggatccataaaatcatcctaacctataaagtcccgcaatct

SEQ ID NO: 13440 - DNA, 2184 bp, Artificial Sequence
  derived and/or modified sequence
atgtgggtaaccaaactgcttcctgcactgctgctgcaacatgtgctcctgcatctgctcctgcttcctatcgcaatcccatacgctgagggacaaaggaagcgcagaaataccattcacgaattcaagaaatccgcgaaaacaacactcatcaaaatcgatccagctcttaagattaagaccaaaaaggtcaacaccgcggaccagtgcgctaacagatgcacaaggaacaaaggattgccatttacctgcaaagcttttgtctttgacaaggcgaggaaacaatgtttgtggttcccttttaacagtatgtcatcaggcgttaaaaaagagttcggccatgaatttgatctgtacgaaaacaaggactacatcaggaactgtatcataggtaagggcaggtcttataaagggacagtctctatcacaaagagtggcattaagtgtcagccgtggagcagcatgatcccgcacgagcatagttttctgccctccagttatcgcggcaaggatctgcaggaaaattactgccgtaatccacggggagaagaaggaggtccttggtgtttcacctctaacccagaggtcaggtatgaagtttgcgacatcccccagtgctcagaagttgagtgcatgacctgcaacggtgagagctaccgcgggctgatggatcacacagagtctggaaagatctgccagcgctgggaccaccaaactccacatcgccacaaatttctgccggaacgttatcccgataagggatttgacgataactattgcaggaacccagatggtcagcccaggccatggtgttacaccctggatccgcacaccaggtgggagtactgtgccataaaaacatgcgctgataacaccatgaatgataccgatgtgcctctcgaaaccaccgaatgtatacaaggccagggcgagggctacaggggaacagtgaacactatttggaatggaatcccctgccagcgttgggattctcagtacccccacgagcacgacatgacacccgagaactttaagtgcaaagacctgcgcgaaaattactgcaggaacccagacggttccgagtctccctggtgcttcaccacagacccgaacattagagtgggctattgttctcagattccaaattgcgatatgagccacggacaagattgctacaggggaaatgggaaaaactacatgggcaacctgtcccagactcgaagcggcctaacgtgcagcatgtgggataaaaacatggaagatcttcacagacacattttttgggagccagatgcatctaaactgaatgaaaactactgcagaaaccctgatgatgatgcccatggcccatggtgttacaccggcaaccctttgattccttgggactattgcccgatcagcagatgcgaaggagataccacccccaccattgtgaacttagaccatcctgtgatctcatgcgccaaaaccaaacaattgagggtggttaacggaatccctacccgcactaacataggctggatggtcagtcttaggtaccgcaataaacatatatgtgggggcagtctcattaaggaaagttgggttctcacagctagacaatgttttcctagccgtgaccttaaagattatgaagcttggctgggaatccatgacgtgcatggtagaggagacgagaaatgcaagcaggtgcttaacgtgagccagctcgtatacggtcctgaaggctctgatctcgtactgatgaaactggccaggccagcagttcttgatgactttgtgagtacaatagacctgccgaactacggctgcacaattcctgaaaaaacatcgtgttctgtgtacggatggggttacaccggactgattaattacgatgggttgctccgcgtggcacacctgtacattatggggaacgaaaaatgttcccaacaccacagagggaaggtgaccctgaacgagtctgagatttgcgctggagcagaaaagattgggagcggaccttgcgaaggggattatggaggtcccttagtgtgtgaacagcataaaatgcgcatggttctgggagtaatcgtgccaggccgaggctgcgctatccccaaccggccaggtatcttcgtaagggtcgcttattatgcgaaatggattcataagattatactcacatacaaagtgccacagagc

SEQ ID NO: 13441 - DNA, 2184 bp, Artificial Sequence
  derived and/or modified sequence
atgtgggtgaccaagctgctccccgcgctcctgctccagcatgtgctgcttcaccttctgctgttgccgattgctatcccgtacgccgaaggccaacgcaagcgccgcaacactatccacgagtttaagaagtcggcaaagaccactctcatcaagattgaccctgccctgaaaatcaaaacgaagaaagttaacactgcagaccaatgcgctaatcgctgcacccgcaataagggcctgccatttacctgcaaggcgttcgtgttcgataaggcccgtaaacagtgtctgtggttcccgttcaattcaatgtcatccggagtcaagaaggagtttggacacgaatttgacctttacgagaataaggactacattcgcaattgcatcattggtaaagggagatcttacaagggaacggtgtccattactaaatcgggaattaagtgccagccgtggtcgagcatgatcccgcatgagcactcattcctgccttctagctacagaggaaaagatctgcaggaaaattattgccgcaacccgaggggtgaagaaggagggccttggtgtttcacgtcgaaccctgaagtgcgctacgaagtgtgcgacatcccccaatgctcagaggtcgaatgcatgacctgcaacggagagtcgtacagaggactgatggaccataccgagtcgggcaagatctgccagaggtgggaccaccagactccgcacagacacaagttcttgccagaacggtacccagataagggattcgatgacaattactgtcgcaatcctgatggtcaacctcggccgtggtgctatacgctggaccctcatactcggtgggaatactgcgcaatcaagacttgcgctgacaacaccatgaatgacactgacgtgccgttggagactactgagtgcatccagggccaaggagaaggataccgcggaactgtgaacaccatctggaacggaataccgtgccaacgctgggacagccagtacccccatgaacacgatatgaccccggagaacttcaagtgcaaagacctgcgggagaactactgccggaacccggacggatcagaatcgccctggtgcttcaccaccgatccaaatatcagagtcggatactgttcccagatcccaaactgcgatatgagtcacggccaggattgttacagaggcaacggaaagaattacatggggaacttgtcgcaaacccgaagcggtctgacctgtagcatgtgggataaaaatatggaagatctccacaggcacatcttctgggaaccggatgcctccaaactcaatgaaaactactgcaggaatccggatgatgacgcccacgggccctggtgttacaccggaaacccgctgatcccttgggattactgcccgatatccagatgcgaaggcgacaccaccccaactatcgtgaacctggaccatccagtgatctcctgtgccaaaaccaaacagctgcgcgtggttaacggcatcccaactagaaccaacatcgggtggatggtgtcccttcggtacagaaacaagcatatctgcggcggcagcctgattaaggaaagctgggtcctgaccgctcggcagtgctttccatcgcgggacctgaaggactacgaggcgtggctggggatccacgacgtgcatggacggggagacgaaaagtgtaagcaggtcctgaacgtgtcccagttggtgtacggaccagagggaagcgacctggtgctgatgaagctcgcccgcccagcagtcctcgacgatttcgtgtcaactatcgatttgcccaactatggctgtactatcccggagaaaacctcgtgctccgtctacgggtggggatacactgggctcatcaattacgacggtctgcttcgggtggcgcacctctacatcatgggaaacgagaagtgctcgcaacaccatcgcggaaaggtcactctcaacgagagcgaaatctgcgcaggtgccgaaaagatcggctcaggtccctgcgagggagactacggaggaccactcgtgtgtgagcaacacaagatgcggatggtgctcggtgtcatcgtgccgggaaggggctgtgcgattcctaaccggccggggatcttcgtgcgagtcgcctactatgcgaagtggatccataaaatcatcctcacgtacaaagtcccgcagtcc

SEQ ID NO: 13442 - DNA, 2184 bp, Artificial Sequence
  derived and/or modified sequence
atgtgggttaccaagctgctacccgccctcctgctacagcacgtgctcttgcatctgttactgctgccgatagcaattccctatgccgaaggccagcgcaagagaagaaacacaatccacgagtttaagaaatcagccaagaccaccctaataaagattgacccagctctcaagattaaaacaaaaaaagtgaatacagccgaccagtgcgccaacagatgtactaggaataagggtctgcccttcacttgtaaagccttcgtctttgataaagcccggaaacagtgcctgtggtttccctttaatagtatgagcagtggagtaaaaaaggaattcgggcacgaatttgatctgtatgagaacaaggactatattcgtaattgcatcatcggcaagggccgctcctataagggaaccgtttccataacgaagtccggcatcaagtgtcagccctggtccagcatgatcccccacgagcacagttttcttccttccagctaccggggcaaggatctgcaggaaaattactgtagaaaccccaggggggaggagggtggcccttggtgctttacaagtaacccggaagtaaggtatgaggtctgtgacattccacagtgctcggaggtggaatgcatgacgtgtaacggagagtcctatagaggcttaatggaccacacggagtccggcaagatttgccagagatgggaccaccagacaccccacaggcacaagttcctccccgaacgctaccccgacaaaggtttcgatgacaattattgccgcaatcctgatggccaaccgcgcccttggtgctacacccttgatccacatacccgctgggagtactgcgctatcaagacttgtgcagacaataccatgaacgataccgacgtgccactcgaaacaacagagtgcatacagggccagggggaaggatatcgtgggaccgtgaacactatttggaatgggatcccttgccaaagatgggattcgcagtacccacacgaacatgatatgactcccgaaaatttcaagtgcaaagacttaagggaaaactattgcagaaaccccgatgggtcagagagcccttggtgtttcacgacagacccaaacatcagggtcgggtattgttcccagatccctaattgtgatatgtcgcacggccaagattgctatagaggaaacgggaagaattacatgggtaatctctcacagaccagaagcggcctcacctgcagcatgtgggacaagaatatggaggacttacaccggcacatattctgggagcctgatgcctctaagcttaatgagaattattgcagaaaccctgatgacgacgctcatggcccctggtgttatactggtaacccgctcattccctgggactactgtcccatctccaggtgcgagggagacaccacacctaccatcgtgaatctggaccaccccgtaatatcttgtgccaagacaaaacagctgagggtcgtcaacgggatcccaacaagaactaatatcggatggatggtgtcacttcggtatcgcaataaacacatctgtggtggctccctgatcaaggagtcatgggtcctgacagccagacagtgctttcctagcagggacttgaaagactacgaggcctggctgggaatccacgatgttcacggcaggggcgatgagaaatgcaaacaggtgctcaatgtgagtcagctggtgtacggccctgaaggaagcgacctcgtcctcatgaagctggctcgtccagcagtcttagacgattttgtgagtactatagatcttcctaactatggttgtactatccctgagaagacctcatgctcagtatacggttggggatacaccggcctcataaactatgatggtctattacgagttgcccacctctacataatggggaacgaaaagtgttcccagcaccatcggggtaaggtgacgctgaatgagtctgaaatatgtgccggtgcggaaaaaatcgggagtggtccgtgtgagggcgactatggcggcccacttgtatgcgaacaacataaaatgcggatggtgctaggcgtgattgtgcccgggagagggtgcgccatacctaacagaccaggcatattcgtacgcgttgcatattacgcgaagtggatccacaagatcatattaacctataaggtcccgcagtcc

SEQ ID NO: 13443 - DNA, 2184 bp, Artificial Sequence
  derived and/or modified sequence
atgtgggtcaccaagctgctgcctgcactgcttctccaacacgtcctgcttcatcttctccttctgcccatcgcaattccatatgcagaaggacaaagaaagcgaagaaacactattcatgagttcaaaaagtcagccaaaactaccttgatcaagatcgatccagcactgaagattaagactaagaaggtgaataccgcagatcagtgtgccaatagatgtaccagaaacaaggggctgccctttacttgcaaggcctttgtttttgataaggcaaggaagcaatgtctgtggttcccattcaactccatgtcgtcgggcgtgaagaaagaatttggtcatgagttcgacctgtacgaaaacaaagactacatacggaactgcataattggaaagggacggtcctacaagggaactgtctccattactaaatcgggtattaagtgccagccctggagctcaatgattcctcatgaacatagctttctgccttcaagctaccggggtaaggatctgcaagaaaactattgtagaaatcctcgcggggaagaaggcggcccatggtgttttacctcaaaccctgaagtgagatatgaggtgtgcgatatcccgcaatgctcagaggtcgaatgtatgacttgcaatggggagtcgtaccgcggactgatggaccacactgagtccgggaagatttgtcagaggtgggaccaccagaccccccatagacataagtttctgcctgagaggtacccagacaagggttttgatgacaactactgtcgcaatcccgatgggcagcctcggccgtggtgctacactcttgatccacatacgagatgggaatactgtgcgataaagacttgtgcagacaacactatgaacgacaccgatgtccctcttgaaaccaccgaatgtattcagggacagggagagggataccgaggaaccgtgaacactatctggaatggcattccatgccaaagatgggattcccagtacccgcatgagcacgacatgacgccagaaaactttaagtgcaaagacctgagagaaaactactgccgaaaccccgacggaagcgaatcgccttggtgctttaccactgatcccaacattagggtcggctactgctcccaaatacctaattgtgatatgtcccatggtcaggactgttatagagggaacggaaagaactacatgggaaacctttcccaaactagatcggggttgacctgttcgatgtgggataagaacatggaagatcttcatagacatatcttttgggaaccagatgcatccaagctgaacgagaactactgtagaaacccagatgatgatgcacatggtccttggtgttacaccggcaatcctcttattccttgggattactgcccgatttcccgctgtgaaggagataccactcctacgatcgtgaatcttgatcatccagtgattagctgtgccaagacgaagcagctgcgggtcgttaatggaatcccaactcggaccaatattgggtggatggtcagcttgcggtaccggaacaagcatatctgtggagggtcgctgattaaagaatcttgggtgttgaccgccaggcaatgtttcccctcaagggatctgaaagactatgaggcatggttgggtatacatgacgtgcatggtcgcggtgatgagaaatgcaaacaggtgctgaatgtctcgcaactcgtgtacggtcctgaaggatcagacctggtcttgatgaaactggcacggccagcggtgctcgacgatttcgtctccactattgatctgcctaactatggatgtactatccctgaaaagacctcctgttcggtctacggatggggttacactggtctgattaactacgatggtctgctgagagtggcccacttgtacataatgggaaacgagaaatgttcccagcatcatcgcggtaaagtgaccctgaatgagagtgagatttgcgcgggggcagaaaagattgggtcgggaccttgtgaaggcgactacggcggcccactggtctgcgagcaacataagatgaggatggtgcttggcgtcatcgtgcctggacggggctgcgccattccaaacagacccggaatctttgtgagagtggcgtactatgcgaagtggatccataagataattcttacgtacaaggtgccccagagc

SEQ ID NO: 13444 - DNA, 2184 bp, Artificial Sequence
  derived and/or modified sequence
atgtgggtgaccaaactcttgccggccctgcttcttcaacatgtgctgctgcacctcctgctcctgcccattgctatcccatacgctgaaggccagcgcaaacgcaggaataccatccatgagttcaaaaagtcagcgaaaactaccctgatcaaaatcgatcctgctctgaaaatcaaaactaaaaaggtgaataccgcagaccaatgtgctaataggtgcaccagaaataagggcctcccattcacgtgcaaggctttcgttttcgataaggcccggaagcagtgtttgtggtttccgttcaactcgatgtcatccggtgtcaagaaggagttcgggcatgaattcgatctgtacgaaaacaaagactacatccgcaactgcatcatcgggaaaggacggagctacaagggaactgtgagcattaccaagtcgggcatcaagtgtcagccctggtcctcaatgatcccgcacgagcactcattcctcccgagctcgtatagagggaaggacctccaagagaactactgccgtaacccgcggggagaggaaggaggaccatggtgcttcacctcgaaccctgaggtgcggtacgaggtgtgcgatatccctcagtgctcagaagtggagtgtatgacttgcaatggtgagtcctaccgggggctcatggaccacaccgaatcggggaagatctgccagcgatgggatcaccaaacgcctcatcggcacaagttcctccctgaacgatatccggacaaggggttcgacgacaactactgtcgaaacccggacggccagccccgcccatggtgttacaccttggatccgcacactcggtgggaatactgcgcaatcaagacttgtgcggataacactatgaacgacactgacgtgcctcttgaaacgaccgaatgtatccaaggacaaggagaaggttacaggggaactgtcaataccatttggaacggtatcccgtgccaacgatgggactctcagtaccctcacgagcatgatatgactccggagaacttcaaatgtaaggacctcagggaaaactactgcaggaacccagacggatccgagtcaccgtggtgctttactactgaccccaacattcgtgttgggtactgctcccagatcccaaactgtgatatgtcccatggtcaggactgctacagaggcaacggaaaaaactatatgggcaacttgagccaaacccgctcggggctgacgtgctccatgtgggataagaacatggaggacctgcacagacacatcttctgggaaccggacgcatccaagctcaatgagaattactgccgaaatccagatgatgacgctcatggaccgtggtgttatactggcaatccattgattccatgggattactgtccgatctcaagatgcgaaggcgacacgaccccaaccatcgtaaatctggatcacccagtgatctcgtgtgccaagactaagcaactgcgggtggtgaatggcataccgacccgcaccaatatcggctggatggtgtcgctgcggtatcgcaataaacacatttgtggcggatcgctgattaaagaaagttgggtgctgacggcccgccagtgctttccgtccagagatctgaaggattacgaggcttggcttggaattcacgatgttcatggtcgcggggacgagaaatgcaagcaggtgctgaacgtctcgcagctggtgtacggtccggaagggagtgacctcgtgctgatgaagttggcccggccggccgtgttggacgactttgtgtcgactatcgacctccccaactacggatgcactattcctgagaaaaccagctgctcagtctacggatggggctatacgggactcatcaactacgacggactcctgcgcgtcgcccatctctacatcatgggaaacgaaaagtgcagccagcaccatcgcggcaaggttacgctgaatgaatcggagatctgcgccggagccgaaaagattggctctggcccgtgtgagggggactacggaggaccgctcgtgtgtgaacagcacaagatgagaatggtgttgggagtcatcgtgccaggtcgcggatgtgcaatcccgaacagacccggaatcttcgtgagggtcgcatactatgccaagtggatccataagattatacttacctacaaagtgccccagtca

SEQ ID NO: 13445 - DNA, 2184 bp, Artificial Sequence
  derived and/or modified sequence
atgtgggttaccaagttactcccagcgctgcttctgcaacatgttttgctgcacctgctgctgttgccaattgctatcccatacgctgaaggacagcggaagaggcgcaataccatccacgagtttaaaaaatctgctaagacgactttgattaagattgaccctgccttgaagattaaaacgaagaaagttaacactgcagaccagtgtgctaataggtgcacgcgtaataagggtctgccgttcacctgcaaagcgtttgtatttgataaggctcgcaagcagtgcctgtggttcccattcaactccatgagcagcggtgtgaagaaagagtttggtcacgagttcgacctgtatgaaaataaggattacatccgaaactgcatcataggcaagggtaggagctataaaggtaccgtttcaattaccaagagtgggattaaatgtcagccgtggtcttctatgatccctcatgaacactcattccttccaagctcctatcgcggcaaggacctgcaggagaattactgccgcaacccacgtggcgaggagggtggaccttggtgtttcacttccaatccggaggtgagatacgaggtgtgcgatatccctcaatgctcggaggttgagtgtatgacttgtaacggagagtcgtaccgcggtctgatggaccataccgaatccgggaaaatctgccagagatgggatcatcagaccccccatcgccataaattcctgcccgaacgctaccctgacaaaggcttcgatgataattactgtagaaacccagacggtcagccacgcccgtggtgttacaccctggatcctcacacccggtgggagtattgtgccataaagacgtgtgccgataataccatgaacgacactgatgtgccactggaaaccacggaatgtatccaaggtcaaggggagggttaccgaggcacggtcaatacgatctggaatggtatcccttgccagcgctgggatagccaatatccacatgagcacgacatgacccctgagaattttaaatgcaaagatctccgcgaaaactactgtagaaatcctgatggtagcgagagcccgtggtgtttcacgaccgatccgaatatccgagtcggttattgtagccagattccaaactgcgatatgagtcatggacaggattgctacaggggcaacggcaagaactatatgggcaatctgagccagactcgcagcggcctcacctgtagcatgtgggataagaatatggaggacttacaccgccacattttttgggagccagacgccagcaaactgaacgagaactactgccggaatccagacgatgatgcccacggaccatggtgttatacggggaatccattgatcccatgggattactgcccaattagccgatgtgaaggtgatacgaccccgactatcgtgaatctggatcatccagtcatcagctgtgctaaaacaaaacaacttcgcgtagtgaacggtatcccgacacgcacgaacattggctggatggtgagtctgcgctatcgaaataagcacatttgcggtggcagcctgatcaaggagagctgggtcctgaccgcacgccaatgctttccgtcgcgcgatctgaaagattatgaggcatggctgggaattcatgacgtgcatggccgtggagatgaaaagtgcaagcaggttctgaatgtctctcagctcgtgtacggtccggaggggagcgacctagtgttgatgaaacttgcgcgcccagcggtcctggatgactttgtgagcacaatcgatctgccgaactatggttgcacgataccagagaaaacgagctgttctgtttacggatggggttatacgggcctaatcaactatgacggactgctgcgagtcgcgcatctctatataatgggcaatgaaaaatgcagccagcatcaccgcggtaaagtgaccctgaatgagagcgagatttgcgcaggtgcggagaaaatcggttccggtccctgtgagggtgactacggtggccctctcgtctgtgagcagcacaagatgcgcatggtgcttggggtaattgtaccgggtaggggctgcgcgatccctaatcgcccgggtatctttgttagagttgcgtattacgcgaagtggattcacaaaattattttgacgtacaaggtcccacaatca

SEQ ID NO: 13446 - DNA, 2184 bp, Artificial Sequence
  derived and/or modified sequence
atgtgggtgactaagctgctgccagctctactcctgcagcacgtcctcctgcatcttctgctcctgcctatcgctattccctatgctgaaggacagagaaaaaggcggaacactatacatgaattcaagaagtctgctaagacaactttaataaagatagatcccgcgctaaaaatcaagacaaaaaaagtgaatactgccgatcagtgtgccaatcgctgcactcggaacaaaggactccctttcacttgtaaagccttcgtgtttgataaggctagaaaacagtgtctctggtttccatttaactcgatgagttctggagtgaaaaaagaattcgggcatgagtttgacctgtacgagaataaagattatataagaaattgcatcatagggaaagggcgatcctataaaggaacagtgtccataactaaatctggaatcaagtgccaaccctggtcttcgatgatccctcatgaacattctttcctgccctcctcctatcgagggaaggatctgcaggaaaactattgtcggaaccctaggggggaggaaggagggccctggtgctttacttctaatccagaagttcgatatgaggtgtgtgatatcccacagtgctccgaagtcgaatgcatgacttgtaacggggagtcttataggggactgatggatcatactgaaagtgggaaaatctgtcagcggtgggatcatcagactcctcatcggcacaaatttctgccggaacgctatcccgataaaggattcgatgacaattactgtagaaaccctgatggacagccccggccctggtgctatacacttgatccacatactcgatgggaatattgcgccatcaagacttgtgctgataatactatgaacgacacagatgtccctctggaaacaacagaatgcatacagggacagggggaaggatacagaggaacagttaatacaatctggaacgggataccatgtcagcgatgggacagtcagtatccccatgaacacgatatgacacccgagaatttcaaatgcaaagatcttcgagaaaattattgtaggaatcctgatggatctgaatctccatggtgttttacaacagatcccaatataagagttgggtattgtagtcagatccccaactgcgacatgagtcatgggcaggattgttatcgggggaatggaaaaaattatatgggaaatctttcccagacacgttcaggactaacatgtagtatgtgggacaaaaatatggaagacctacaccgacatatcttttgggagcctgatgcctccaagttaaatgaaaattattgtagaaaccccgatgacgatgcacatggaccctggtgttatacagggaaccccttaattccctgggattactgccctatatcaaggtgcgaaggagatacgactcccacaatcgtgaacctggatcatcctgtgatttcttgtgcaaaaacgaagcagctcagagttgttaatgggataccaactagaacaaacatcgggtggatggtgtcgctccgataccgaaacaaacatatctgtgggggatctctcataaaagaatcatgggtgctgacagctaggcagtgctttcccagtcgcgacctgaaagattatgaagcgtggctgggaatacatgatgtgcatggaaggggagacgagaagtgtaagcaggttctgaacgtgtcccagttagtatatgggcctgaagggtcagatctcgtgctcatgaaacttgcaagaccagccgtcctggatgatttcgtatcaacaatcgatctgccaaactatgggtgtacaatacctgaaaaaactagttgttccgtctatgggtggggatatactggactcatcaactacgacggactactccgggttgcacatttgtatatcatggggaacgaaaaatgcagtcagcaccatagagggaaagtgacactcaatgaatccgagatatgtgccggagccgaaaaaatcggatcaggaccatgcgaaggggattatggggggcccctcgtgtgtgaacagcacaaaatgaggatggtgctgggggtgatagtgcctgggcggggatgcgctattcccaacaggcctgggatattcgttagagttgcgtactatgctaagtggatacacaagatcatactaacttataaagttccccagtcg

SEQ ID NO: 13447 - DNA, 2184 bp, Artificial Sequence
  derived and/or modified sequence
atgtgggtcacgaagctcctccccgcactcctgctccagcatgtgctcctgcatctcctcctgctgccgatcgcaatcccatacgcagagggacagcgcaagagaagaaacaccatccacgagttcaagaagtcagccaagactacccttatcaaaatcgaccctgcgctgaagatcaagaccaaaaaggtgaatactgcagatcagtgcgctaataggtgcactcggaacaaaggcttgcccttcacttgcaaggcgttcgtctttgataaagcccgcaagcaatgtctgtggttccctttcaactcgatgtcgtccggcgtcaagaaggaatttggacacgagttcgatctgtacgaaaacaaagattacattagaaactgcatcatcggcaagggaaggtcctacaaaggaaccgtgtctatcaccaagtccggaatcaaatgtcagccatggtccagcatgatcccccatgagcatagcttcctgccatcgtcctatagagggaaggacctgcaagagaactattgccggaatccgcgcggagaggaaggcggaccgtggtgcttcacttccaacccagaggtgcggtacgaagtgtgtgatatcccacaatgctcggaagtggagtgcatgacttgcaatggagagtcctaccgcgggttgatggatcataccgagtccggcaagatctgccaacgctgggaccaccagaccccacataggcacaaattcctgcccgagcggtacccagacaagggattcgatgataactattgcagaaacccggacgggcagccacgcccttggtgttacaccttggacccgcacacccggtgggagtactgcgcaatcaagacgtgcgccgacaataccatgaatgacactgatgtgccactcgagactaccgagtgcatccaagggcagggcgagggataccggggaactgtcaacaccatctggaatggcatcccgtgccagaggtgggattcccagtacccgcatgaacacgatatgactcccgagaatttcaagtgtaaagatctcagagagaactactgtcgcaatcccgacggttcggaatcgccatggtgttttactactgaccccaacatccgcgtcggctactgctcacagattccaaattgtgacatgtcgcacggtcaggattgttaccggggaaatggtaagaactacatgggcaatctttcgcaaaccagatcaggcctgacctgttcgatgtgggacaaaaacatggaggacctccaccgccatatcttttgggagcccgacgcgtcaaaactcaacgaaaactactgtcggaatccggacgatgacgcacatggaccttggtgctataccgggaatcctcttatcccatgggactactgccccatttcccggtgcgaaggcgacaccaccccgaccattgtcaacctggatcatccggtgatctcgtgcgccaaaactaagcaattgagagtggtaaatggcatccccactcggacgaacatcggttggatggtttcactgagatacaggaataaacatatctgcggaggaagccttatcaaggaatcttgggtcctgaccgctcgccagtgcttcccgagccgggatctcaaggactacgaggcatggttgggcatccacgacgtgcacggtcggggcgacgagaaatgcaagcaagtcctgaacgtcagccaactggtgtacggaccggagggatcggatcttgtcctgatgaaactggccaggccggcggtgctggatgatttcgtgtctactatcgacctgcctaactacgggtgcaccatcccggagaaaacctcctgttccgtctacggatgggggtataccgggttgattaactacgacggtcttttgcgagtggcccacctgtacatcatgggaaacgaaaagtgcagccaacatcaccgcggaaaggtcacgctgaatgagtccgaaatttgcgcgggcgccgaaaagatcggaagcggaccctgcgaaggagactacggtggaccgttggtgtgcgaacaacacaaaatgaggatggtcctgggcgttatagtgccgggacgcggttgcgcaatcccgaaccggcccgggatcttcgtcagagtcgcctactacgcaaagtggatccacaaaatcatcctgacctacaaggtcccgcagagc

SEQ ID NO: 13448 - DNA, 2184 bp, Artificial Sequence
  derived and/or modified sequence
atgtgggtgaccaagctgctgccggccctccttctgcaacacgtgcttctccatctcttgcttctgccgatcgcgatcccttacgccgaaggacaaagaaaacggcgcaacactatacatgagtttaagaagagcgcaaagaccaccctgatcaagatcgatcctgccctgaagattaagacgaagaaagtgaacaccgcagaccaatgcgcgaatcggtgcacccggaacaagggacttccgttcacctgtaaagcgttcgtgttcgataaagctaggaaacaatgcttgtggttccctttcaactcgatgagcagtggtgtgaaaaaggagttcggacatgagttcgacctgtacgagaacaaagattacatccggaactgtatcatcggaaagggacggagctacaagggcaccgtgagcatcactaaatccggaataaagtgccagccctggtccagcatgattccgcatgaacactccttcctcccctcatcctacagagggaaggatcttcaggaaaactattgcaggaatccgcggggggaggaaggggggccgtggtgcttcacgtctaaccccgaagtgcgctacgaggtgtgcgatatcccgcagtgctcagaggtcgaatgtatgacctgcaacggtgaatcatatcgcgggctcatggatcataccgaatcgggaaaaatctgccagcgctgggatcaccaaaccccacaccggcataagtttctgccagaaagatacccggacaaaggtttcgacgataactactgtcgaaacccagacggtcagccgaggccctggtgctatacgctggaccctcatactcggtgggagtattgtgctattaagacttgcgcagacaatactatgaatgacactgatgtgccgctggaaaccaccgagtgcatccagggccagggggagggataccgcggaaccgtgaacactatctggaatggcatcccttgccagagatgggattcccagtacccgcacgagcacgatatgacccctgaaaactttaagtgcaaggacttgcgcgagaactattgccgcaacccagacggctccgagtcaccgtggtgctttactaccgatccgaacatccgagtgggttactgctcgcaaattccgaattgtgacatgtcgcacggacaggactgctaccgcgggaatggaaagaattacatgggaaacttgtcacagacgcggagcggattgacttgttcgatgtgggataagaatatggaggacctgcaccgccacatcttttgggaaccggacgccagcaagctgaatgagaactactgccggaatccggacgacgacgcgcacggaccctggtgctacactggaaacccactcatcccctgggattactgtcccatctcacgctgcgagggagataccaccccaacgatcgtgaatctggaccacccagtcatctcctgtgcaaagaccaagcaattgagagtggtaaacggcatcccaacccgaaccaatataggatggatggtgtcgctccgctaccggaacaaacacatttgcggtggatcgctgatcaaggaatcctgggtcttgactgccaggcaatgcttcccatcgagagatctgaaagactacgaagcgtggctcgggatacacgatgttcatggtagaggcgacgaaaaatgcaagcaagtcctcaatgtttcccagctcgtgtacggaccggaaggttctgacctggtgcttatgaaactggcccgccctgcagtgttggatgatttcgtcagtactattgacctgccaaactatggctgcactatccccgaaaagacttcgtgctcggtgtacggttggggatacaccggactgatcaattacgatggactcctccgagtggcccatctgtacatcatggggaacgaaaagtgttctcagcaccatcgcggtaaagtgactctgaatgaatcggaaatctgtgcaggcgccgaaaagattggctccggcccgtgcgagggcgactacggaggaccacttgtctgtgagcagcacaagatgaggatggtcctgggcgtgatcgttccggggagaggttgtgcgatcccgaaccggcctggcatcttcgtgagagttgcctactacgcaaagtggattcacaaaatcattctcacctataaggtcccacagtcc

SEQ ID NO: 13449 - DNA, 2184 bp, Artificial Sequence
  derived and/or modified sequence
atgtgggtgaccaagctcctgccggccctacttctgcagcatgttcttctccacctactccttctgcccatagccatcccctacgctgagggtcagcgcaaaagacggaacaccattcatgagttcaagaaaagcgccaaaacgaccctgatcaaaattgatcccgcactgaagatcaagaccaagaaggttaataccgctgaccagtgcgcaaaccgctgtaccaggaacaaagggctacccttcacttgtaaggcctttgtttttgacaaggcaaggaagcagtgcctgtggtttccattcaattctatgtcatccggagtgaaaaaggagttcggtcacgagttcgacttgtacgagaataaggactacattaggaattgtatcattggtaagggacggtcatataaggggactgtgtccatcaccaagagcgggatcaaatgccagccatggtcaagcatgattccacacgaacactcctttttgccaagcagctatcggggtaaagatctgcaggagaattattgccgaaatccaaggggagaggaaggcgggccgtggtgctttacctctaaccccgaagttaggtacgaggtttgtgacattcctcaatgctctgaggtcgaatgcatgacatgtaacggagaaagttatcgcgggctcatggaccacaccgaatcaggaaaaatctgccaacggtgggatcatcagaccccccaccgccataagtttctacctgagagatatcctgataagggattcgatgacaactattgcagaaaccccgatggacagccacgaccttggtgctatacattggatcctcataccagatgggagtattgcgcaatcaagacttgtgccgacaacaccatgaacgacactgacgtgcctctggagacgaccgagtgcatccaggggcagggagagggctaccggggaacagttaacacaatatggaatgggataccctgccagaggtgggatagtcagtatccccatgagcacgatatgacccccgagaatttcaaatgtaaggacctccgggaaaactactgcagaaaccccgacggcagcgagtctccttggtgctttacaacagaccccaatatcagggttggttattgttctcagattcctaactgcgacatgagccacggacaggactgctatcggggaaacgggaaaaattacatgggcaatctgagtcagacacgaagcggtctcacatgtagcatgtgggataagaacatggaggacttgcaccggcacatattctgggagcccgatgcaagtaagcttaacgagaactactgcagaaatcctgacgacgacgcacatgggccttggtgctatactggcaatcccttgattccttgggattactgccccatctctaggtgtgagggcgatactacacccaccattgtgaatttggaccacccagtgatctcctgcgctaaaaccaagcagctgagggtcgtgaacggtatacccacaaggacaaatatcggatggatggtgtccttgcgctatcggaacaaacacatttgtgggggatctcttatcaaggagtcctgggtcctgacagcgaggcagtgcttcccttcccgcgatctcaaggattatgaggcctggctgggtatacacgacgtgcacggccgaggggatgagaaatgtaagcaagtactgaacgtcagccagctggtctacgggcctgagggatctgacctggttctcatgaagctcgcccggccagctgtcctcgacgatttcgtgtccacaatcgatcttccaaactacggatgcaccatacctgaaaagacatcttgctcagtttatggctggggctacacaggcctaatcaactatgacgggctactcagagtggcacatctgtacataatggggaatgagaagtgctcccaacatcaccgcggtaaagttacactgaacgagtcggagatttgcgcaggcgcagagaaaatcggcagcggcccatgtgagggcgactacggaggcccgctggtctgcgaacagcacaagatgcgcatggtgctgggggtaattgtgcccggcagagggtgtgccataccaaaccggcctggcatattcgtcagagtggcctactacgcaaaatggattcataagataatcctgacctataaagtcccgcagtct

SEQ ID NO: 13450 - DNA, 2184 bp, Artificial Sequence
  derived and/or modified sequence
atgtgggtgaccaagctgctccctgccctgctgctgcagcatgtgctcctgcacctactgctgttacccatagcaatcccatacgctgaaggtcaaaggaaacgcagaaacactattcacgagttcaagaaatctgctaagacaacgctgatcaaaatcgatcctgcactaaaaataaaaacaaagaaagtgaacaccgcagatcagtgcgctaacaggtgcacccgtaacaagggtcttccttttacatgcaaggcatttgtattcgataaggctagaaagcaatgcctgtggttcccctttaacagcatgagctctggcgtgaaaaaagagttcggccatgagtttgacctgtacgaaaacaaagactacataaggaactgcataataggcaagggtcggtcctacaagggaaccgtgagtatcactaagagcggaatcaagtgtcagccttggagcagcatgattccgcatgagcactcatttctgccctctagctataggggtaaggatctccaagaaaactactgccggaaccctaggggagaggaaggtgggccttggtgctttaccagcaacccagaggtccggtacgaggtgtgtgacattccccaatgctccgaagtcgagtgcatgacgtgcaacggagaaagctatagaggcctaatggaccataccgagagcgggaagatatgccaaagatgggatcaccagactccgcatcgccacaagttcttaccggagagatatcccgacaaagggttcgacgacaattattgcagaaacccagatggccagcccagaccctggtgttataccctggacccacataccaggtgggagtattgtgctattaagacgtgtgctgataacactatgaacgacacagacgttcctctggaaacaactgaatgcatccaaggtcagggagagggatatcgtggcacagtgaatacaatctggaatggcatcccgtgccagcggtgggattctcagtatccccatgagcatgacatgacccccgaaaattttaagtgcaaggacttaagggaaaattactgccgaaaccccgatggctccgaatccccctggtgtttcactaccgaccctaatatcagggtaggatactgctcccagatccctaactgtgacatgagtcacggccaggattgttaccgggggaacggaaagaactatatgggcaatctcagccaaacacggagtggtcttacatgttccatgtgggacaaaaacatggaagatctgcacaggcatatcttctgggagccagacgcgtccaaactgaacgaaaattattgtcgcaatcccgacgatgacgctcacggtccgtggtgttatacaggcaatcccctcatcccctgggactattgtccgatctcacgatgtgagggagatacgactcccacaatcgtaaatttggaccaccccgttatctcttgcgcaaaaaccaaacagctgcgcgtggtcaacggcatccctaccaggacaaatataggatggatggtctcactcaggtatcgaaataaacatatctgtggtggatcgctcattaaggaatcctgggtgctgaccgcccggcaatgcttcccctcccgcgacctcaaggattacgaagcatggctcggcattcacgacgttcacgggcgtggcgacgaaaagtgcaaacaggtcttgaacgtaagccagcttgtgtatgggcctgaggggagtgatctcgtcctcatgaagttagcgcgacctgccgtgctcgacgattttgtttctacaatcgacttacccaactacgggtgcactattcctgaaaagactagctgtagcgtctacgggtggggttatacagggctcattaattacgatggccttttgagggttgcccacctgtacatcatggggaatgagaaatgctcccagcatcacaggggcaaagtgacactaaacgagagcgagatttgtgccggagccgagaaaatcgggtccggaccttgcgagggtgattatggtggccctttggtctgcgaacagcacaagatgcgtatggtcctcggagtgatagttcctggcaggggctgtgccatcccaaatcgcccaggtatatttgttcgagtggcctattacgcaaaatggatccataaaatcatactgacctacaaagtgccacagagc

SEQ ID NO: 13451 - DNA, 2184 bp, Artificial Sequence
  derived and/or modified sequence
atgtgggttacaaagcttctgcctgcccttctgctgcaacacgtcctcctccatcttctgctcctgcctatcgccattccatatgcggaaggccagcgaaagaggagaaacaccatccatgagtttaaaaagtcagcgaaaactacgctcataaagattgacccagcactgaagatcaagacaaaaaaagttaacactgccgaccagtgcgccaatcgctgtactcgtaataagggactaccattcacctgcaaggcctttgtatttgacaaagccaggaaacagtgcctatggtttcctttcaactccatgagtagcggggtgaaaaaagaattcgggcacgagttcgacttatacgagaacaaggattatattaggaactgtatcattggcaaaggcaggagctacaaaggtactgtgtctatcacgaaatccggcataaagtgccagccttggagcagcatgatcccccatgaacacagtttcctcccgagtagctatagaggaaaagatctgcaagagaactactgccgaaatccaaggggtgaggaaggaggcccctggtgctttacctccaaccccgaagtcaggtatgaagtttgtgacatccctcagtgttccgaggttgagtgcatgacctgtaatggagaatcctataggggactcatggaccataccgagagcgggaaaatatgccagaggtgggatcaccagactccgcatcgacataagtttctgcccgaacgctacccagataaaggtttcgacgataattactgtcgaaacccagacggtcagccccggccgtggtgctacacattggatcctcacactcgatgggaatactgtgctatcaagacttgtgccgacaacaccatgaatgataccgacgtgcctctcgagaccacggagtgcatccaaggacaaggcgagggataccgtggcactgttaacaccatctggaatgggatcccatgccagagatgggattctcagtacccacacgaacatgatatgacaccagagaatttcaagtgcaaggatctccgggagaactactgtcggaaccctgacggctcagagtctccatggtgttttaccactgacccaaacatccgcgtgggttactgctctcagatcccgaattgtgacatgtctcacggccaggattgttacaggggaaatggtaaaaactatatgggaaacctgtcgcagacacgatccggcctcacatgttctatgtgggataaaaatatggaggatctacacaggcatatattctgggagcccgatgcttcaaagctgaatgaaaattactgtagaaatcctgatgatgatgctcacggcccctggtgctataccgggaatccactgatcccatgggattactgcccaattagcagatgtgagggagatacaaccccaaccatagttaatctggatcacccagtgattagctgtgcaaagactaaacaactcagggtggttaatgggatcccgacaagaaccaatatcggttggatggtgagcctgcggtataggaacaaacacatttgtggaggatctctgattaaggagagttgggtcctgacagccaggcagtgctttcctagcagagatctaaaggactacgaagcttggttggggattcacgacgtgcatggaaggggggacgagaagtgcaaacaggtgctaaatgttagccagctggtctatggaccagagggttccgacttggtacttatgaaactggcccgcccggcggttctcgatgactttgtttccacaattgatctgcctaattacggctgcactattcccgaaaaaacctcctgtagcgtgtacggttggggatacacaggcctgatcaactacgatggcttactcagagttgcacacctctatattatgggaaacgagaaatgttcccagcaccataggggcaaagtcacgctcaatgagtctgaaatctgcgccggcgccgaaaagatcgggagcgggccttgcgagggggattacggcggcccacttgtttgtgaacaacacaagatgcgaatggtgctgggggtcatagtgccaggaagggggtgtgcgattcctaatagacctgggatttttgtccgagtggcttattacgccaaatggatccacaagattatccttacatacaaagtccctcagtcg

SEQ ID NO: 13452 - DNA, 2184 bp, Artificial Sequence
  derived and/or modified sequence
atgtgggtgaccaaattgctgcccgcgctcttgctccaacacgttttattgcatctacttctgttgccaatcgcgattccctacgccgaggggcagcgtaaacgacggaacacgatacatgagtttaagaagtctgccaagaccacgttgatcaagatagaccccgctctcaagattaagacaaagaaggttaatacagccgatcaatgcgcaaaccgatgtacaaggaataaaggtctcccattcacctgcaaggctttcgtatttgacaaggcacggaaacaatgtttatggttcccattcaactcgatgagttcgggtgtgaaaaaggagttcgggcatgagtttgacctgtacgagaacaaggattacattagaaattgcattatcggaaagggccgctcttacaaggggactgtctcaatcaccaaatccggaatcaagtgccagccatggtcatcaatgatcccccatgagcactccttcctcccaagctcctatcgtggcaaggatctgcaggagaattattgccgaaacccccgcggcgaggagggcggcccatggtgtttcacatctaatccagaagtgcggtatgaagtgtgcgacatccctcagtgttcggaggtcgaatgcatgacgtgtaacggcgaaagctaccgcgggctcatggatcataccgaatcagggaagatatgccagcgttgggatcatcagaccccccaccgacacaagttcttgccagagcgatacccagacaaggggttcgatgacaattattgcagaaacccagatggccagccccgtccatggtgctacacattggatcctcacacgaggtgggaatactgtgctattaaaacatgtgctgataacacaatgaatgataccgacgttccccttgagaccacggagtgcattcaaggccaaggggaaggttatcgtggaacagtgaacactatctggaatggcataccatgccaacgatgggacagccagtacccccacgagcatgatatgacacctgagaatttcaaatgtaaggacctacgagagaattattgcagaaatccagatgggagcgaatctccttggtgcttcactaccgaccctaacattcgggtcgggtattgttctcagattccaaattgtgacatgagtcatggccaggactgctacaggggtaatggcaaaaattatatggggaacctctcacaaacgcggtctggcttgacatgctccatgtgggataagaatatggaggatctgcatcgtcacattttctgggagcctgatgctagcaaactcaacgagaactactgcaggaacccagatgatgatgctcacggaccatggtgctatacaggaaatccccttataccttgggactactgtcccatttcccgttgtgagggagatactacgcccacgatcgttaacctggaccaccccgttattagctgcgcgaagactaaacagcttcgtgtagtgaacggaatacccacacggaccaacattggctggatggtaagccttcgataccgaaataaacatatttgcggcggaagtttgattaaagaaagctgggtgctgaccgcccgccagtgtttcccgtcaagagatttgaaggactacgaggcctggctcggtatccatgacgtacatgggcgcggcgatgaaaagtgtaagcaggtacttaacgtttcccagctcgtctacggcccagagggatcagacctagtgctcatgaagcttgcccgacccgctgtattggacgattttgtgtccactatagatctgcccaactacggctgtacaattccagagaaaacctcatgctccgtatacggctggggctatacagggctgatcaactacgatggactcctccgcgttgcacatctgtacattatgggcaacgaaaagtgttctcagcatcacagagggaaggtgaccctgaatgaatccgagatctgcgcaggggccgagaaaatcgggagcggcccctgcgagggggattatggaggcccactggtgtgcgagcagcacaaaatgagaatggttttgggggtgattgtgcccggtcgtggttgtgccatccccaatcgccctggcatcttcgttagagttgcatactatgcgaagtggatccataaaattatcttaacctacaaagtcccgcaaagt

SEQ ID NO: 13453 - DNA, 2184 bp, Artificial Sequence
  derived and/or modified sequence
atgtgggtgaccaagctccttccggccctgttgctccagcacgtactgctgcacctcttgctgctcccgatcgccatcccttacgcggaggggcagcggaagagaagaaacaccatccatgagttcaagaagtcagcgaaaacgaccctgatcaaaattgacccagccctgaaaatcaagactaagaaagtaaacaccgccgaccagtgcgcaaaccgctgcaccagaaacaaaggactcccgttcacctgtaaggctttcgtgttcgacaaggcaaggaaacaatgcctctggttccccttcaacagcatgtcatcaggcgtgaagaaggagttcgggcacgaattcgacctttacgaaaacaaagactacatcagaaattgtattatcggtaagggacggtcctacaagggtactgttagcattactaagtctggaatcaaatgtcaaccttggagcagcatgatcccacatgagcacagctttctgccatcctcctatagaggcaaggacctccaggagaattactgccgcaacccgcggggggaggaaggtggcccatggtgtttcacctcaaacccggaggtgcggtatgaagtgtgtgatattccccaatgcagtgaagttgaatgcatgacttgcaacggagaaagctaccgcggacttatggaccatactgagtcgggtaagatctgccaacgctgggaccaccaaactcctcaccgacataagttcttgccggagagatacccagataagggatttgatgacaattactgccggaaccccgacggccaaccgcgcccgtggtgctacaccctcgacccgcacaccaggtgggaatactgcgcaattaagacttgtgccgataacactatgaacgataccgacgtgccgctcgaaactactgaatgcatccagggacagggggaaggctaccggggtaccgtgaatacgatctggaacggcatcccgtgccagcgctgggatagccaatatccacatgagcatgacatgactccagaaaacttcaagtgcaaggacctcagagagaactactgtagaaacccagatgggtccgagtccccgtggtgttttacgaccgaccctaatatccgcgtcggatactgctcacaaatcccaaactgcgatatgtcccatgggcaggactgctatcggggaaatgggaagaactacatgggcaatctgtcgcagactcgctccggtctgacctgttcaatgtgggacaaaaacatggaggacctccaccggcacatcttttgggaaccggacgcatcaaaacttaatgagaactattgccggaacccggatgatgacgcgcacggcccctggtgttacacgggaaaccctctgatcccttgggattactgcccgatctccaggtgcgagggagataccaccccgaccatcgtgaacctggatcatccggtcatcagttgtgcaaagaccaagcagctcagggtggtgaacggcattccgactcggactaacattggatggatggtgtcgctgagataccggaacaaacacatctgcggagggtccctcatcaaggagagctgggtgttgactgctagacagtgcttcccaagccgcgatctgaaggactatgaagcctggctcggtattcatgatgtgcacggaaggggggacgaaaagtgcaaacaggtgctgaacgtgtctcagcttgtgtacggaccggaggggtcggacctcgtcctgatgaagctcgcccgcccggcggtgctcgacgacttcgtttcaactatcgacctgcctaattacggctgtaccattcctgaaaagaccagctgctccgtgtacggctggggctacactggattgatcaactacgacggcctgctgcgggtggctcacctctatatcatgggaaatgagaagtgctcccaacaccaccgcgggaaggtgactctgaacgagtccgagatctgcgcaggtgccgaaaagatcggatcgggaccctgtgaaggggattatggaggtccgcttgtgtgcgagcagcacaaaatgcggatggtcctgggcgtcattgtgccaggcagaggatgcgccatcccgaaccggcctggcatcttcgtccgcgtcgcgtactacgcaaagtggatccacaagattatcttgacgtacaaggtgccccagtcg

SEQ ID NO: 13454 - DNA, 2184 bp, Artificial Sequence
  derived and/or modified sequence
atgtgggtgacgaagctcttgccggcgctgcttttgcagcatgtccttctgcacctgctcctcctgccgatcgccattccgtatgctgagggacagcgcaaacggcggaacaccatccatgaattcaagaagtcagcaaagaccactctgatcaaaatcgatccggcgctcaagatcaaaactaagaaggtgaataccgcagaccagtgcgctaacaggtgcactagaaacaaaggactcccattcacgtgcaaggctttcgtgtttgataaggcgcggaaacagtgcctctggtttccattcaatagcatgagctcaggtgtgaagaaagaatttggtcatgagttcgatctctacgagaacaaggactacatccgcaattgcatcatcggaaagggacggtcatacaagggcactgtcagcattaccaagtctgggatcaagtgccaaccttggtcgtcaatgatcccacacgagcactcgtttctgccaagctcctaccgtggcaaggacctccaagagaactattgccgcaatccgcgaggggaggaaggcggaccgtggtgcttcacgtccaacccagaagtccgatacgaggtttgcgatattcctcaatgctcggaggtggagtgtatgacctgcaacggagaatcctaccggggactcatggaccacactgagtcgggcaaaatctgtcagaggtgggaccaccagacgccacatcgccacaagttcctgccggaacggtacccggacaaagggttcgatgataactattgcagaaaccccgacgggcagccgcggccctggtgttacactctcgacccgcatactagatgggaatactgcgccatcaaaacgtgcgcggacaacaccatgaacgacactgatgtccccttggaaaccaccgagtgtatccagggacagggagaaggctatcgcggaactgtgaacaccatctggaatgggattccatgccagcgctgggatagccaatacccccatgaacacgatatgaccccggaaaacttcaaatgcaaagaccttagggaaaactactgccgcaacccggacggatccgaaagcccgtggtgttttacgactgacccaaacatcagagtcggctactgctcacaaatcccgaattgcgacatgagccacggacaagactgttaccgcggaaacggcaagaactacatgggtaacctgtcacaaacccgctcgggcctgacttgctcaatgtgggacaagaatatggaggatctccacagacacatcttctgggaacccgatgcatcgaagctgaatgagaattactgccggaatccagatgatgacgcgcatgggccttggtgctacaccggaaatcccctgataccttgggactactgccccatcagccggtgcgagggtgacaccactccaaccatcgtgaacctggatcacccagttatctcgtgcgccaagactaaacaacttcgtgtggtgaacggaatccctactcgcacgaatatcggatggatggtgtccctccggtaccgaaacaaacatatttgcgggggatcgctgatcaaagagtcatgggtgctgaccgcacgccagtgcttcccgtcccgagacttgaaggactacgaagcctggttgggaatccatgacgttcatgggcggggtgatgagaagtgtaagcaagtgttgaacgtgagccaattggtgtacggaccagaagggtcggacctggtcctgatgaagctcgctcggccggcggtgctggacgacttcgtgtctactattgatctccccaattatggttgtactatcccagaaaagacctcgtgcagcgtgtacggatgggggtacaccgggctgatcaattacgacggactgctccgcgtggcccatttgtacattatgggtaacgaaaagtgctcccagcaccaccgcggaaaggttaccctgaacgaatcggagatctgcgccggcgcggagaagatagggagcggcccttgtgagggagattacggagggcctctggtgtgtgaacagcacaaaatgagaatggtcctgggtgtcatcgtcccgggtcggggatgtgcgataccgaatcgccccggaatcttcgtcagagtggcgtattacgccaagtggatccacaagattatcctgacctacaaggtgccgcagtcc

SEQ ID NO: 13455 - DNA, 2184 bp, Artificial Sequence
  derived and/or modified sequence
atgtgggtgacaaagttgctgccagctctgctgttgcagcacgtcctcctgcacctcctgttgctgcccattgctatcccgtacgctgagggtcaaagaaagaggcgcaacacaatccatgaatttaagaagagtgccaagacaactctcatcaaaatcgaccctgcccttaagatcaagaccaaaaaagtcaacaccgccgaccagtgcgccaacagatgcacccgcaacaagggtctgcctttcacatgcaaggcattcgttttcgacaaagctcgcaaacagtgtctctggttcccatttaactccatgagttcgggggtaaagaaggaattcggacatgagttcgacctgtatgaaaacaaggactatataagaaactgtattatcgggaagggccggagctacaagggcaccgtgtcaataacaaaatctgggattaagtgtcagccatggagctccatgatcccccacgaacatagctttttacccagcagctatcgcggaaaggaccttcaggagaactattgcagaaatcctcgcggagaggaggggggaccttggtgtttcacgagtaaccccgaggtacgatacgaggtgtgtgacattccacagtgcagcgaggtcgagtgtatgacctgtaacggcgagagttacagaggtttgatggaccataccgagtccggcaagatatgccagagatgggatcaccaaaccccgcatcgccacaagtttctgcctgaaaggtaccctgataaaggttttgatgacaattattgccgtaaccccgacggacagccccgtccttggtgctacacactggatccacatactcgatgggagtactgcgcaattaagacgtgtgccgataacaccatgaatgacaccgacgtgccattggagaccactgaatgcatccaaggccagggtgaagggtaccgtggaaccgtcaataccatctggaatgggattccctgtcagaggtgggattcccagtacccacacgagcatgacatgacaccagaaaactttaagtgtaaagatcttagagaaaattactgtcggaacccggacggaagtgagagtccatggtgtttcacaactgatcctaacatccgagtgggatattgttctcagatacctaactgtgatatgagtcacggacaggattgctaccgcggaaatggtaagaactacatgggcaatctgtcccagaccagatctggcttgacttgcagcatgtgggataaaaacatggaggacctccaccgacacatcttctgggagccggatgcatctaaactgaacgagaactactgccgaaacccagacgatgacgcccatggaccgtggtgctacacaggcaacccactaataccgtgggattactgtccaattagccgatgcgagggggataccactcctacaatagttaaccttgatcaccccgtcatctcttgtgccaaaaccaagcaactgagagttgtaaacggcatccccacccgtactaatatcggatggatggtgtctttacgttatcgcaataagcacatatgtggcggaagtctaataaaggaaagctgggttctgacagcgcggcagtgcttcccatcgcgggacttaaaagactatgaagcctggctcggtatccacgatgtgcatggaaggggagatgagaaatgtaagcaggtgcttaatgtgagccaactggtttacggtcccgagggcagcgacctggtgctaatgaagctggctcgtcctgcggtgttggacgactttgtcagcacgattgacctgcctaactatggatgcacgatcccggagaaaactagttgttccgtgtatggttggggctacaccggcttgatcaactatgacggtttgctgcgagtggcccatctgtatatcatgggcaacgagaaatgcagtcagcatcaccgtggaaaggtgacacttaatgagagtgagatctgtgccggcgctgagaaaattggctcggggccatgtgaaggggactatgggggtcctctagtgtgtgagcaacacaagatgagaatggtcctaggcgtgatcgtgccaggacggggatgtgcaatccccaatagacctgggattttcgtcagggttgcttattatgccaaatggattcacaaaatcatcctcacatacaaggtgcctcagagc

SEQ ID NO: 13456 - DNA, 2184 bp, Artificial Sequence
  derived and/or modified sequence
atgtgggtgacgaaattgctcccagcactgctcctgcagcatgtcctgctgcacctgttattgctgcctattgccatcccctacgcggaaggacaacgtaagagacgaaacactattcacgagttcaaaaagagcgcaaaaacaactctgattaagattgacccagccctaaaaattaagaccaaaaaagtgaataccgccgatcagtgcgccaacagatgcacgcgcaataaaggattaccttttacttgcaaggccttcgtcttcgacaaggcgagaaagcagtgtctgtggtttcccttcaatagtatgagttcgggagtgaagaaagagtttggtcatgagtttgacctctatgaaaacaaagattatatccgtaattgtataataggtaaaggccggtcttataagggcaccgtcagcattacaaaaagtgggatcaaatgtcagccctggtccagcatgattccgcacgaacattcttttctgccatcaagctaccggggaaaagatttgcaagagaactactgcaggaacccacgcggcgaagaaggcggcccctggtgttttaccagtaatccggaagtacggtacgaagtgtgtgacattccacagtgttctgaggtcgaatgcatgacatgtaatggcgagagctacaggggcctgatggaccataccgaatcaggaaaaatatgtcagcggtgggaccaccagacgcctcacaggcataagtttcttccagagaggtatccagataaagggttcgatgataactactgccggaaccccgatggtcagcccagaccctggtgctacactctggatccccatacccggtgggagtactgcgctataaagacatgcgcagataacaccatgaacgatacagacgtccccctggagaccaccgagtgcattcagggacaaggagagggttatcgaggtactgtcaatacaatctggaacggcattccttgccagaggtgggattcgcaatacccccatgaacacgatatgactcccgagaacttcaagtgcaaagatctgcgggaaaactattgccggaacccagatggaagcgaatccccctggtgttttaccacggatcctaatattcgggtgggttactgcagccaaattccgaactgtgacatgagccacggtcaggattgctaccgggggaacgggaagaattacatggggaatctcagccaaacacgaagcggcttaacctgcagcatgtgggacaagaacatggaggacctgcaccggcacatattctgggagcctgacgcaagtaaactgaacgaaaattactgccgaaacccagatgatgacgcccacggaccttggtgttacacagggaacccacttattccctgggattactgtcccatcagcagatgcgaaggagatactacccctactatcgtcaacctagaccaccccgtgatatcatgcgcgaagaccaagcagctccgagtagtgaacgggattccaacccggactaacatcgggtggatggtgagcctgcgctatcggaacaaacacatttgcggcggatcactgatcaaggaaagttgggtgctgactgcacggcagtgttttcctagcagggacttgaaggattacgaggcatggttaggcattcatgatgtgcacgggcgtggggacgaaaaatgcaagcaagtgctgaacgtgtctcagctggtatacggtcctgaggggagcgacctggtccttatgaaattggcgcgacccgccgtgttggatgactttgtatcaacaatagacctgcccaactacgggtgtactatccctgaaaagacttcatgtagcgtttatggctggggctacaccggactcattaactacgacgggctgcttcgagttgcacacctgtacatcatgggcaatgaaaagtgcagtcaacaccacagagggaaagtgactttgaacgaatccgagatttgtgctggtgcggaaaaaatcggcagcggcccttgtgagggggattacggcgggccgctcgtgtgcgaacagcacaaaatgaggatggtcctgggggtcatcgtgcctgggcggggctgcgcaatacccaatcggcctgggatttttgttagggtggcatattatgccaaatggatccacaagattatcttaacgtacaaggtgccacagtca

SEQ ID NO: 13457 - DNA, 2184 bp, Artificial Sequence
  derived and/or modified sequence
atgtgggtaacaaagcttttacctgcgctgctgctacagcacgtactgttgcacttgctacttctgcccatagccattccttatgccgaaggccagcggaagcggcggaacacaatccacgaattcaagaaatcagccaagaccacccttataaaaatcgatccagcactcaaaatcaagaccaagaaagtcaataccgcagaccaatgcgcaaaccggtgtactcgaaacaagggcttgcctttcacatgtaaagctttcgtcttcgacaaagcgagaaagcagtgcttgtggtttccctttaacagcatgagcagcggcgtgaaaaaggaatttggccacgagtttgatttatacgagaataaggactatattaggaattgcattatcggcaaggggcgcagctacaagggaaccgtttccataactaagtctggcatcaagtgccagccttggagcagcatgatcccacatgaacattcgttccttccaagtagctacagggggaaggacctgcaggaaaactactgtagaaatccacggggagaggagggggggccttggtgttttacctcgaatccagaggtccgatacgaggtttgcgatattccgcagtgcagcgaagttgagtgcatgacctgcaacggagagtcctaccgaggtctgatggaccatacagagagcggcaagatctgtcagcgatgggaccatcagaccccccataggcataagttccttccagagcgatacccagacaagggattcgacgataactattgccgcaatcccgacggacagccccgaccatggtgctacacattggacccccatacgaggtgggaatactgtgcgattaagacctgcgctgataataccatgaatgatacagatgttccactggagactaccgaatgtatccaggggcagggggagggatatagggggacggtgaatacaatctggaacgggataccctgccagcgctgggacagccagtatccccacgagcacgatatgactcccgaaaacttcaaatgcaaagatttgcgggagaactactgccgcaaccccgatggcagcgaatctccctggtgttttacaacagatcctaatattcgcgtcggatactgctctcagatacccaattgtgatatgagccacggtcaggattgttatagagggaacggcaagaattacatgggtaatctctcccagacccgttccggcctgacttgtagcatgtgggataagaatatggaagacctgcatagacacatcttttgggagccagatgctagcaaacttaacgagaattactgtcgaaaccctgatgatgatgcacatgggccgtggtgctatacagggaacccactgatcccctgggactattgcccaatttccaggtgtgagggggatactactcccacgatagtaaatctcgatcacccagtcatttcatgtgccaaaacaaaacaactgagagttgttaacggaattccgactcgaaccaatattggctggatggtaagcctgagatacagaaataagcacatctgtggaggtagtctgatcaaagagagctgggtgctgacagccaggcagtgtttccccagcagggatctgaaagattatgaggcctggctcgggattcacgatgtccacggacgcggcgacgagaagtgcaaacaggtcttgaatgtcagccagctggtgtatggacctgagggcagcgacctggtcctaatgaagctggcgcggccagcggtcctggatgactttgtatcaaccatcgacctgccaaactatggatgtaccatccccgagaagacgtcgtgctccgtgtacggatggggctacaccgggcttatcaactacgacgggctgctcagagttgcacacctgtatattatggggaacgagaagtgttctcagcaccacaggggtaaggtgactctgaacgaaagtgaaatctgtgccggtgccgaaaagatagggtccggaccttgcgaaggggactatggtggccctttggtgtgtgaacagcataaaatgagaatggtgctgggcgtcatcgtaccagggcggggatgtgctatacctaatcgccccggcatctttgtcagggtcgcctattacgctaaatggattcacaagattattttgacctacaaggtgccccaaagc

SEQ ID NO: 13458 - DNA, 2184 bp, Artificial Sequence
  derived and/or modified sequence
atgtgggttacgaaactcctgcctgcgctgctcctgcagcatgtgctcctgcatctccttcttcttccaattgcaattccttacgcagaaggccaacgtaagaggaggaacaccatccatgagttcaagaagtcggcaaagactactctgattaagattgaccctgcacttaagatcaagaccaagaaggtcaacacggctgaccagtgcgcaaaccgatgtactaggaacaaaggtctgccttttacctgtaaggcattcgtctttgataaagcaagaaaacaatgtctgtggtttccttttaactcgatgtcaagcggggtgaagaaggaatttggtcacgaattcgacttgtacgaaaacaaggattacattcggaattgcattattgggaaaggtagatcgtacaagggaaccgtttcgataactaagtcaggaataaagtgtcaaccttggagctccatgattccacatgaacattcatttctcccgtcctcctacagggggaaggatctccaagagaactactgtaggaaccctcggggtgaggaaggtggtccctggtgttttacctcgaacccggaagtccgctacgaagtctgtgacatccctcagtgttcggaagtggaatgcatgacgtgtaacggggaatcctaccgtggactgatggaccacaccgagtccggaaagatctgtcagcgttgggatcaccagaccccacatcgccacaagtttcttcccgaacgttaccctgacaagggattcgatgacaactattgtcggaatcctgatggccagccacgcccttggtgctatactcttgacccacacaccagatgggaatactgtgccattaagacctgcgcagataacactatgaacgacaccgacgtgcctcttgagactaccgaatgtattcagggccaaggtgaaggataccgcggaaccgtgaacaccatatggaacggaattccatgtcaacggtgggactcgcagtacccgcatgaacatgatatgactcccgaaaacttcaaatgcaaggacttgcgcgaaaactactgtagaaacccagatggctccgaatcaccttggtgttttacgactgatcctaacatccgcgtcgggtactgttcacagattcctaattgcgatatgagccacggtcaagactgctaccgtgggaatggcaagaattacatggggaacctcagccagactcgttcaggactgacttgtagcatgtgggacaaaaacatggaagatctgcacaggcatatcttctgggaaccggatgccagcaagttgaatgagaactattgccgaaatcccgatgatgatgcgcatggaccgtggtgttatacgggtaatccccttattccttgggactactgcccaatttcgcggtgcgaaggtgataccactcctaccatcgtgaatttggatcatccagtgatttcctgtgcaaagactaaacaacttcgggtggtgaacggaataccaacccggaccaacattgggtggatggtgtcactgaggtacaggaacaagcatatctgtgggggatcacttatcaaagagtcgtgggtgctgaccgcacggcagtgtttcccctccagggacctcaaggattacgaagcatggcttggtattcacgacgtgcatggaagaggagatgaaaagtgtaagcaggtgcttaacgtgtcacaactggtgtacggtcctgaaggctcggatcttgttctgatgaaacttgcacgacctgccgtcctcgatgattttgtctccacgattgatcttcccaactacggctgtacgatacctgagaaaacctcatgctcagtgtacgggtggggttacactggactgatcaactacgacggcctccttagagttgcccatctgtatatcatgggaaacgaaaagtgttcgcagcatcaccgagggaaggtgactttgaatgagagcgagatttgcgccggagcagagaaaatcggctccggaccttgtgaaggggattacggaggcccacttgtgtgtgaacaacacaagatgaggatggtgcttggtgtgattgtgcccggtagggggtgtgcaattcctaatcgtcccggtatcttcgtgagggtcgcgtactacgcgaaatggattcacaaaatcattctgacctacaaggtgcctcaatcc

SEQ ID NO: 13459 - DNA, 2184 bp, Artificial Sequence
  derived and/or modified sequence
atgtgggtcactaaactccttccagcacttttattacaacacgtcctcttgcacttgcttttgcttccaattgctataccatatgcagaggggcaacgtaaacgtagaaatactatccatgaatttaaaaagtccgctaaaactacgcttattaaaatcgatcccgcactcaaaattaagactaaaaaagttaatactgcagaccagtgtgctaacagatgcacgagaaacaaagggttaccatttacatgtaaagcgttcgtcttcgataaagcaagaaaacagtgtttgtggttccccttcaattccatgtcctctggggtgaaaaaagagtttggacacgagttcgatctctacgaaaataaagactatattaggaattgcattatcggaaagggtagaagctacaagggaactgtgtcaattacaaaaagcggtataaagtgccaaccctggtctagcatgattccgcacgaacatagtttcttgccaagctcttatcgtggaaaggacttgcaagaaaattattgtcgaaaccctcgaggagaagaaggcggcccatggtgctttacttcgaatcctgaagttagatacgaggtgtgtgacattccacagtgttcagaggttgagtgtatgacttgtaatggtgaatcatatagaggtcttatggatcatacagaaagtggaaaaatttgccaacgttgggatcaccagactcctcatagacataaatttcttcccgaacgatacccggataaagggttcgacgataattactgtcggaatccggatgggcaaccacgtccgtggtgttacacattagatcctcatacgcgctgggaatattgcgctatcaagacatgcgctgacaatacaatgaatgatacggatgtcccacttgagactaccgaatgtatccaagggcaaggtgaaggctatcgaggaacagttaatactatctggaacggtattccatgtcaacgctgggattctcagtatccacatgagcacgacatgacgcctgagaactttaagtgcaaagacttacgggagaattattgtcgaaatcctgatggatctgaaagcccatggtgttttaccacagacccaaacattcgggtgggatactgctctcaaatcccaaactgcgatatgtcacacggacaagattgttatcgaggtaatgggaagaattatatgggaaatctttcgcaaaccaggtcaggactaacatgctctatgtgggataagaatatggaagatctacaccgacatatattctgggaaccagacgcgtccaaacttaatgaaaactattgcagaaatccagatgacgatgctcatggtccgtggtgctatacaggaaatccacttatcccatgggactactgccctatcagtcgatgcgaaggagatacgacacccacaatagtcaatcttgatcatcccgtgatttcctgtgcaaaaactaaacagcttagggtggtgaacggtataccaacaagaaccaatatcggttggatggtgagtctccgatatcgcaataagcatatctgcggaggcagtctcattaaggagtcttgggttcttacggcacggcaatgttttccgtccagagacctgaaagattatgaagcttggttaggcatacacgatgttcatggacgtggggacgagaaatgtaagcaagttttaaatgtgtcgcagctcgtgtatggaccagaaggttctgatctggtgctaatgaagcttgcgcgtccagcagtgcttgacgactttgtatccactattgatttaccaaattacggttgtacaataccagagaaaacaagctgcagtgtttatggatggggttataccggattgattaattatgatggtctcttgcgtgttgcccatttatacatcatgggaaatgaaaaatgctcacagcatcacagaggaaaggtgactcttaacgaatctgaaatttgcgcaggagctgaaaagattggttctggaccttgcgagggtgattacgggggtcctctggtttgtgagcagcacaagatgagaatggtgctgggagttattgtgcccgggagaggctgtgccatccctaaccgtcccggtatctttgtaagggtcgcttactatgcgaagtggatacataaaatcattcttacatataaggtcccacaaagt

SEQ ID NO: 13460 - DNA, 2184 bp, Artificial Sequence
  derived and/or modified sequence
atgtgggtgaccaagctccttcccgcgctcttgttgcaacacgttcttctccatctgctcctcctgcccattgccataccatatgctgagggccagagaaaaagacgaaacacaatacacgaatttaaaaaatccgcaaagaccaccctgatcaagatcgatcctgcactcaagataaagacaaaaaaggtaaacactgcagaccagtgtgccaatagatgcacgaggaataagggccttccctttacttgtaaggccttcgtcttcgacaaggctcggaaacagtgtctctggttcccctttaattcgatgagttctggagtaaaaaaggagtttggccacgagtttgacctatatgaaaataaagattacattcgcaattgcattatcggcaagggccgctcttacaaagggaccgtttcaatcactaagtcaggtattaagtgccagccttggagctctatgataccacacgagcacagtttccttccttcctcctaccggggcaaggacttacaggagaactactgtcggaacccaagaggggaggagggaggaccatggtgcttcacaagtaatcctgaagtgaggtatgaagtctgtgacatccctcagtgcagtgaggtggagtgcatgacgtgcaacggcgaatcttatcggggcctcatggaccacactgagtccggtaaaatctgccaacgttgggaccatcagacgcctcatagacataagttcctccctgaacgctaccctgacaagggatttgatgataactactgtcgcaacccggatggtcagcccaggccttggtgctatacactggatccccacacgcggtgggagtactgcgcaataaaaacgtgtgcggacaataccatgaacgacacagatgtacccctggagaccaccgaatgtatccaaggtcagggtgagggctatagaggaactgtcaacaccatttggaatggcataccatgtcagcgatgggattcgcagtacccacatgagcacgacatgacaccggagaatttcaagtgcaaggaccttagggaaaactattgccgcaaccccgatggtagcgagagtccttggtgcttcaccacagaccccaatattagggtaggctactgtagccagatcccgaattgcgatatgtctcatggccaggactgctacaggggcaacggcaagaattacatgggtaacctgtcacagacgcggtccggtcttacatgttcaatgtgggacaaaaatatggaggatctccataggcacatcttctgggagcctgacgccagcaagctcaacgagaactactgtcgcaaccctgacgacgacgcccacgggccttggtgttatacagggaatccattgatcccatgggactattgtcctatctcgcgctgtgagggcgacaccactcctaccattgtgaacctggatcatcccgtcatctcctgcgccaaaaccaagcaactgagagtagtgaatggcatcccgactaggaccaatatagggtggatggtgtcactgaggtacaggaacaaacacatttgcggtggaagcctgatcaaggagagttgggtcctaactgcgcggcaatgtttcccaagtcgggatctgaaagattatgaagcctggctgggcatccatgacgtgcatgggaggggggatgagaagtgtaagcaggtgctaaatgtttcacagctggtatacggtccagaaggaagtgacctcgtgcttatgaagctcgcccgccctgcagtgctggacgatttcgttagcacaatcgatctgccaaactatggctgcactatcccagagaagaccagctgcagcgtttatggttggggctacacaggattaattaattacgacggtctgctgagggtggcccatctgtacatcatgggcaatgaaaaatgttcccagcaccaccgtgggaaagtaaccctaaatgagagcgagatctgcgccggcgccgagaagattggtagcggaccctgtgaaggtgattacggcggccctttggtgtgtgagcaacacaagatgaggatggttctaggggtgattgtgcctgggcgcggatgtgccattccaaatagaccagggattttcgtgagagttgcgtattatgcgaagtggatacacaagatcatcctgacgtataaagtgccacaatcg

SEQ ID NO: 13461 - DNA, 2184 bp, Artificial Sequence
  derived and/or modified sequence
atgtgggttaccaaacttttaccagcattattattacaacatgtattacttcatcttttattactaccaattgctattccatatgctgaaggacaacgaaagagaagaaatactattcatgaattcaaaaaatcagctaaaacaactttaattaagattgatccagcattaaaaataaaaactaaaaaagttaacacggctgatcaatgtgcaaatagatgtaccagaaataaaggtttaccatttacttgtaaagcatttgtttttgacaaagcacgaaagcaatgtttatggtttccatttaattctatgtcatcaggagttaaaaaagaatttggacatgaatttgatttatatgaaaataaagattatataagaaattgtattattgggaaaggtagaagctataaaggtacagtttcaataacaaaatcaggtattaaatgtcaaccatggtcttcaatgatacctcatgaacattcatttttgccttcaagttatagaggaaaagatttacaagaaaactattgtagaaatccaagaggagaagaaggaggaccatggtgttttacctctaatccagaagttagatatgaagtatgtgatataccacaatgtagtgaggttgaatgtatgacatgtaatggagaatcatatcgtgggttaatggatcatactgaaagtggtaaaatttgccaaagatgggatcatcaaactccacatcgacataaatttcttccagaaagatatccagataagggatttgatgataactattgtcgtaatccagatggacaaccaagaccttggtgttatactcttgatcctcatactcgatgggagtattgtgctattaaaacatgtgctgataatacaatgaatgataccgatgtaccacttgaaacaacagaatgtattcaaggacaaggagaaggatatagaggaactgtaaatacaatttggaatggaattccatgtcaaagatgggactcacaatatccacacgaacatgatatgaccccagaaaatttcaagtgtaaggatttaagagaaaattattgtagaaatcctgatggaagtgaatcaccatggtgttttacaacagatccaaatattagagtaggttattgtagtcaaattccaaattgtgatatgtcacatggtcaagattgctatagaggaaacggaaaaaattatatgggaaatcttagtcaaactagatcaggattgacatgttcaatgtgggataaaaatatggaagatcttcatagacatattttctgggaaccagatgcttctaaattaaatgaaaattattgtagaaatccagatgatgatgcacatggaccttggtgttatacaggtaatcctttaattccatgggattattgtccaatatcaagatgtgaaggagatacaacaccaacaatagtaaatttggatcatccagtaatttcatgtgcaaaaactaaacaattaagagttgtaaatggaatcccaactcgaactaatattggatggatggtaagtttgagatatagaaataaacatatttgtgggggaagtcttattaaagaaagctgggttcttactgccagacaatgtttcccatcaagagatcttaaagattatgaagcatggttaggtattcatgatgttcacggaagaggagatgaaaaatgtaagcaagttttaaatgttagtcaattagtatatggaccagaaggatcagacttagttcttatgaaattagcaagaccagcagttttagacgattttgttagtactatagatcttccaaattatggatgtacaattccagaaaaaacaagttgttcagtatatggatggggatacacaggtcttatcaattatgatggactacttagagtcgctcatttatatattatgggaaatgaaaaatgtagtcaacatcatagaggaaaagtaactttaaatgaatcagaaatttgtgctggtgcagaaaaaataggtagtggaccatgtgaaggagattatggaggaccattagtttgtgaacaacataagatgagaatggttcttggagtaatagtaccagggagaggatgtgcaattccaaatagaccaggtatttttgttagagtcgcatattatgcaaaatggattcataagattattttaacttataaggttccacaaagt

SEQ ID NO: 13462 - DNA, 2184 bp, Artificial Sequence
  derived and/or modified sequence
atgtgggtgactaagctgcttcctgcacttcttctccaacacgtgctgctccaccttttgctgctgccaattgcaattccctacgccgaaggacaacgtaagagacggaatacgatccatgagtttaagaaatcagcaaaaaccacgctgataaagattgaccctgccctcaaaatcaaaactaagaaggttaatactgcagatcaatgcgccaatagatgtacgcggaataagggacttcctttcacctgtaaagcgtttgtctttgacaaggcacggaaacagtgtctgtggtttccatttaactcgatgagctcgggtgtgaagaaggaatttgggcatgaattcgacctgtatgaaaacaaagattacataaggaattgcatcattggaaagggaagatcgtacaagggtactgtatctatcaccaagagcggaattaagtgtcagccatggtcgagcatgatcccacatgagcattccttccttccctcctcctaccgggggaaggatcttcaggaaaactactgcagaaatccacggggcgaggaaggtggcccttggtgttttacctcgaaccccgaggtgaggtacgaggtgtgtgacatcccgcaatgctcggaggtggaatgcatgacttgtaacggcgagagctaccggggcctcatggatcacactgaatctggtaagatttgtcagaggtgggatcaccaaaccccgcatagacacaaatttcttcctgaacgttacccagacaaaggattcgacgataactattgtagaaatccagatggccagcctagaccttggtgctacactcttgacccacacactcgttgggagtactgcgccatcaagacctgcgccgataacactatgaacgataccgacgtcccccttgaaactactgaatgcatccaaggtcagggagagggatatcgcggaactgtgaataccatctggaatggcatcccatgtcaacgttgggatagccagtaccctcacgaacacgatatgaccccagaaaacttcaagtgtaaggatctgcgtgagaactattgtcgaaaccctgatggtagcgagtcaccatggtgtttcaccaccgacccaaacatccgggtcggatactgttcgcagataccaaactgcgatatgtctcatggacaagattgttaccgtggaaatggtaaaaactacatgggaaatctgtcccaaactcgttcaggcctcacgtgttcaatgtgggacaagaacatggaagatcttcacagacatatcttctgggaacctgacgcttcgaaactcaacgagaattactgtaggaatccagatgacgatgcgcacggcccgtggtgttacactggaaaccccttgattccatgggactactgcccaatttccagatgtgagggtgacaccactcccaccatcgtgaacctggaccatcctgtgatatcatgtgcaaaaactaaacagctgcgggtggtcaacggaatcccgacgagaaccaacattgggtggatggtgtcgctgagataccgaaacaagcatatttgcgggggaagccttatcaaagaatcatgggtgctgactgcacgccagtgttttccatcgagagatctgaaagactacgaagcatggctggggatacacgacgtgcatggtcgcggagatgagaaatgcaagcaagtgcttaatgtgagccagcttgtgtatggaccagagggttccgaccttgtcctgatgaagctggccaggccggcagtgcttgatgatttcgtgtccactattgatctcccaaactacggctgtaccattcctgagaaaaccagctgtagcgtgtacggctggggctacaccggtctgatcaactatgatggacttctcagggtggcacatctttacatcatgggtaacgaaaagtgttcccaacaccatcggggaaaggtgactcttaacgagtcggagatatgcgccggagcagaaaagattggttcaggaccatgtgaaggagattacggaggtcctctggtgtgcgaacaacacaagatgcgcatggtcttgggtgtgattgtgcctggccgcggttgtgcgatcccaaaccgtccaggtatattcgtccgtgtggcatactacgcaaagtggattcataagatcattctgacctacaaggtcccacaatcg

SEQ ID NO: 13463 - DNA, 2184 bp, Artificial Sequence
  derived and/or modified sequence
atgtgggtgactaagctgcttcctgccctgctgctccagcatgttcttctgcaccttctgctgctgccaatagcaattccatatgcagaaggccagagaaagcggaggaatactatccacgaatttaagaagagcgccaagactaccctgattaaaatcgacccagctcttaaaataaagaccaagaaggtgaacaccgccgaccagtgtgcaaacagatgcacacggaacaagggactgcctttcacctgcaaggcctttgtctttgacaaggccaggaagcagtgcctctggttcccgttcaactccatgtctagcggtgtgaagaaggaatttggtcacgagttcgatctgtatgagaacaaagactatattagaaattgtattataggcaagggcagaagctacaagggaactgtctctattactaagagcggaataaaatgtcaaccttggtcctcaatgattccccacgaacacagtttccttccttcctcttaccgcggcaaggatctgcaggaaaattattgtaggaatccccgcggcgaagaaggagggccttggtgtttcacaagcaatcccgaggtgcggtacgaagtctgcgatataccccagtgcagcgaagtcgagtgtatgacttgtaacggtgagtcatacagaggccttatggatcacaccgaatccgggaagatctgtcagagatgggaccaccagactcctcaccgccacaaattcttgcccgaacggtaccctgacaaaggtttcgatgataactactgcaggaatcccgatggtcagccccggccctggtgttacacgctggatcctcacaccaggtgggaatattgtgctattaagacgtgtgccgacaacaccatgaacgacaccgacgttcctcttgaaacaactgaatgcatccaggggcaaggcgaggggtatcggggcacagtaaataccatatggaacggtattccctgtcagaggtgggatagtcagtatcctcacgagcacgatatgaccccggagaacttcaagtgtaaagacctgcgggaaaattactgtagaaatcccgacggctcagagagcccctggtgcttcacaacagatccgaacataagagttgggtactgtagccagatacccaactgtgatatgtcccacggacaggactgctatcgcgggaatggaaagaattacatgggcaatcttagtcagacacgctcaggactcacctgcagtatgtgggacaagaacatggaggacctgcatcggcatattttttgggagccagacgctagcaagcttaatgagaattattgcaggaacccagacgacgatgctcacggcccatggtgttataccgggaatcccctgatcccttgggattattgtcctatatctcggtgtgaaggtgacaccacccccacgatcgttaatctggaccacccagttataagttgcgccaagacgaaacagctgagagttgttaacggtatccccacgagaaccaacattgggtggatggtctccttgaggtaccggaataagcacatttgtggcggttccctcattaaagagtcatgggtgctgacggctcgacagtgcttcccatctagagacctcaaggattacgaggcttggctggggattcacgacgtccacggccgaggggacgagaagtgcaaacaggtgctgaatgtgagccagctggtgtacggacctgaaggctcagatctcgtgctcatgaagctcgcacgccccgccgttttggacgactttgtcagcaccatcgacctgccaaactacggatgcactattcccgaaaagacatcttgtagcgtgtatgggtggggatacaccggcctgattaattatgatggattgcttcgagtagcccatctttatattatgggcaatgaaaaatgttctcagcatcaccgaggtaaggtgaccctgaacgagtccgagatatgcgctggggctgaaaagataggctctggaccatgtgaaggcgactacggcgggcctcttgtgtgcgagcaacataagatgaggatggtcctgggagtgatcgtgccagggaggggatgcgcgataccaaatagacctggaattttcgttagagtggcatattacgcaaagtggattcacaaaattatcctcacctacaaggtgcctcagagt

SEQ ID NO: 13464 - DNA, 2184 bp, Artificial Sequence
  derived and/or modified sequence
atgtgggtgaccaaactgctgccagcactgctgctgcagcacgttctgcttcatctgttgctcctgccgatcgctattccgtacgcagagggacagcgcaagcgccggaacaccatccacgagttcaagaagtccgctaagacgaccttgattaagatcgaccctgctctgaagataaagacgaagaaagtgaacactgccgaccagtgtgccaacagatgcacccggaacaaagggctgccgttcacttgtaaagccttcgtgttcgacaaggcccggaaacaatgcctgtggtttccatttaactcaatgtcgtccggtgtgaaaaaggagtttggtcacgagttcgacctgtacgagaataaagactacatccgcaattgcatcattggtaaaggacgctcgtacaaaggaactgtctcgatcactaaatcgggcatcaagtgtcagccttggtcatcaatgatcccgcacgagcacagcttcttgcccagctcttaccgcggaaaagacctgcaggagaactactgtcgcaacccgcggggagaagagggaggcccgtggtgctttacttccaatccagaagtgaggtacgaggtgtgcgacatcccgcagtgctccgaggtggagtgcatgacctgtaacggagagagctaccgcggactgatggaccacaccgaaagtggaaagatctgccagcgctgggaccaccaaaccccccatcgccacaaattcctgccagagagatacccagacaaagggtttgacgataactattgcagaaatccagatggacagcctaggccatggtgctacaccctcgacccgcacaccaggtgggaatactgcgcaatcaaaacttgtgccgataacactatgaacgacaccgatgtacctctggaaaccaccgagtgcatccaaggacagggagagggatacagaggcactgtcaataccatttggaacggaattccctgtcagagatgggactcgcagtatccacatgagcacgacatgactccagaaaacttcaagtgtaaggacctgagagagaattactgtcgaaacccggacggatctgagtcgccctggtgcttcacgactgatccgaacattagagtcggatactgttcgcagatcccaaactgcgatatgtcgcatggtcaggactgttaccgggggaacggtaagaactatatgggaaatctttcgcagacgcggtcgggtcttacctgctccatgtgggataagaatatggaagatctgcacagacacatcttctgggaaccggacgcgagcaagctgaatgaaaactattgtaggaacccggatgatgacgcgcatggaccctggtgttacacgggcaacccactgatcccctgggattactgcccgatctcgcggtgtgagggcgatactacccctaccatcgtgaatctcgaccatccagtcatctcgtgcgcaaaaaccaaacagctgcgcgtggtcaacggcatcccgaccaggacgaacatcgggtggatggtgtcactgcggtacaggaacaagcacatttgtggagggtccctgatcaaagaatcatgggtgctcaccgctcggcaatgcttcccatcgagagacttgaaggactacgaggcgtggttggggatccacgacgtgcacggacggggcgatgagaagtgtaagcaggtgctcaatgtctcccagctcgtgtacggacccgagggctcggatctcgtgctgatgaagctggccagaccggcagtgctcgacgacttcgtgagcactatcgatctgcccaattacggctgtactatcccggaaaagacttcatgctctgtgtacggatggggctacacggggctgatcaattacgacgggcttctgcgcgtggcgcatctgtacatcatgggaaacgagaaatgctcccagcatcacagaggaaaggtgactcttaatgagtcagaaatctgtgccggagcggaaaagatcggctctggaccatgcgaaggcgattacggagggccgctcgtctgcgagcaacacaagatgcgcatggtgctgggcgtgatcgtcccgggaagagggtgcgcaatccctaaccgcccgggtattttcgtcagagttgcctactacgcaaagtggattcacaagattatccttacctacaaggtccctcagtcc

SEQ ID NO: 13465 - DNA, 2184 bp, Artificial Sequence
  derived and/or modified sequence
atgtgggtgaccaagctgctgcccgccctgctgctgcagcatgtgttgctgcacctgctgcttctgccgatcgcgatcccgtacgcggagggacagcgcaagagaagaaacactatccacgaattcaaaaagtcagctaagactactctgatcaagatcgacccagcactgaagatcaagactaagaaagtgaacaccgcggaccaatgcgccaataggtgcactcggaacaagggcctgcctttcacctgtaaggccttcgtgttcgacaaagcccgaaaacagtgcctgtggttcccctttaactcaatgtctagcggagtgaaaaaagagttcgggcacgaattcgatctgtacgagaataaggactatatcaggaactgtatcatcggcaagggacgcagctacaaggggaccgtttccattaccaagtcaggaatcaagtgtcagccatggtcctcgatgatcccacacgaacactcattcttgccgtcaagttatagagggaaggacctccaggagaattactgcagaaatccgcgaggagaggaaggaggaccttggtgtttcactagcaatccagaggtcaggtacgaggtttgtgacatcccacaatgctccgaggtcgagtgcatgacctgcaacggcgagtcatacagaggactcatggatcataccgagtcagggaaaatctgccaaagatgggaccaccagaccccgcaccggcataagttcctcccggagcggtacccagacaagggctttgacgacaactactgccggaaccctgatggtcagccaaggccgtggtgttacactctcgatccgcacactcgctgggagtactgtgcaattaagacttgcgcggacaataccatgaatgacaccgatgtaccgctggaaactactgagtgcatccagggtcaaggagaaggctataggggtaccgtcaacactatctggaacggaatcccttgccaacgctgggatagccaatacccgcacgagcatgatatgactcctgaaaacttcaaatgcaaggatctgcgcgagaattactgtaggaatccggacggctccgaatccccctggtgcttcaccaccgacccaaatatccgggtcggatactgcagccaaatcccgaattgcgacatgtcacacggacaagactgttatagaggcaacggaaagaactacatgggaaacctcagccagactaggtcggggctgacctgttcgatgtgggacaagaatatggaagatttgcacagacacatcttctgggaaccggacgcatcgaagctcaacgaaaactactgccgcaacccagatgatgacgctcacggaccatggtgctatacgggaaatccactcatcccgtgggactattgccctatttcgcgatgcgagggggatactacgcctaccatcgtcaatctggatcatccggttattagctgtgcaaagactaagcaactgagagtggtcaacggaatcccgactaggaccaatatcggatggatggtgtcgctgcggtacaggaacaagcacatctgcggtggttcactgattaaggagtcatgggtcctgaccgcgcgccagtgcttcccctccagagatctgaaggattacgaggcctggctgggaatccatgacgtccacggacggggcgacgagaagtgtaagcaagtcctgaacgtgtcgcagctggtgtacggaccggagggctctgacctggtgctgatgaaactcgctcggcctgccgtgctggacgactttgtgtcaaccatcgatctccccaattacggatgtacgatcccggaaaagacctcatgttcagtgtacggatggggatacactgggcttatcaattacgatggactgctccgcgtggcgcacttgtacatcatgggcaatgagaagtgctcccagcatcatcggggaaaggtgacccttaacgaatccgaaatttgcgcaggcgcagagaagattggatcgggtccatgcgagggagactacggcggcccactggtgtgtgaacaacacaagatgcggatggtcctcggagtcatcgtcccaggacgcggctgtgctatcccaaaccgccccggaatcttcgtgcgcgtcgcctactacgccaaatggatccacaaaatcattcttacctacaaggtgccgcagtcc

SEQ ID NO: 13466 - DNA, 2184 bp, Artificial Sequence
  derived and/or modified sequence
atgtgggttacgaaattattacccgcactgctcctacaacacgtgctccttcacctactgttactgcccattgccattccctatgccgaaggacagcgcaaacgtcgtaacaccatccacgagttcaaaaaatcagccaagaccacccttataaagattgaccccgcccttaagattaagactaagaaagtgaatactgcagatcaatgcgccaatcggtgtacccgcaacaaaggcttacccttcacctgcaaagccttcgtcttcgataaggcgcggaagcagtgcctgtggttcccctttaactccatgagcagcggggtgaaaaaggagtttggacatgaattcgatctctacgagaacaaggattacatcaggaattgcattatcggcaagggccgctcttataagggcaccgtctcgataacgaaaagtggtataaaatgtcaaccgtggagtagcatgattccgcatgagcatagctttctaccttcatcttaccgtggtaaggatctgcaggagaactattgcaggaatcccaggggcgaggagggcggcccctggtgcttcacctcaaaccccgaggtgcggtatgaagtctgtgatatcccacagtgtagcgaggtcgagtgtatgacttgcaatggcgagtcttaccgaggactcatggaccatacagaatcagggaagatttgccagcgctgggaccatcagactccacataggcataagttcttgcctgagcgctaccctgataagggatttgacgacaactactgccgtaatccggatggacagccccgcccatggtgttatacgctggacccgcacaccagatgggaatactgcgccattaagacttgcgccgacaacaccatgaacgacaccgatgtgcccctggagactactgagtgtattcagggccagggcgagggatatagaggtacagtgaacaccatttggaatgggataccttgtcagagatgggactcccaatacccacatgagcacgacatgacacctgagaatttcaagtgtaaggatctccgagaaaattactgtaggaacccggatgggtctgaatcaccctggtgcttcactacagatccaaatataagagttggatattgctctcagattccaaattgcgacatgtcacacggtcaggactgctaccgcggcaatggcaagaactatatggggaatttgagtcaaacaaggtccgggctgacctgttctatgtgggataaaaacatggaggacctgcacagacatatattttgggaacctgatgcttctaagttgaatgaaaattactgccggaaccctgatgacgacgcccacggcccttggtgctataccgggaatcctctgatcccctgggactattgtccgatcagccgatgtgaaggggataccacgcctacaatcgtgaatctggatcacccagtgatttcgtgtgctaagactaagcagctcagggtggtcaatggcataccaacccggaccaatattgggtggatggtgtcgctgcggtatagaaataaacatatttgcgggggttcgctcatcaaggaatcctgggtcctgacagcccgtcaatgctttccatcaagagatctcaaagactatgaggcctggttgggtatacatgatgtccacggaaggggagatgaaaagtgtaaacaagtactgaacgtgagccagctggtgtacggccctgaaggcagtgatctagtgctgatgaagttggcacgccccgctgtgctggatgacttcgtaagcacaattgacttgcccaattatggttgcaccatccccgagaagacctcttgcagtgtttacgggtggggatacaccggcttgattaattatgacggcctgctccgtgtcgcgcacttgtacatcatgggcaatgagaaatgttcgcagcaccaccgaggcaaggtcacactcaacgaatcagaaatttgtgccggcgcagaaaaaattggatcaggtccatgcgaaggagactatggtgggcccttggtttgtgagcagcataagatgaggatggtcctgggggtcatcgtccctggtagaggctgcgccattcctaaccgtccaggtatatttgttagggtcgcctactatgcgaaatggatccacaagattatcttgacctataaagtacctcagtcc

SEQ ID NO: 13467 - DNA, 2184 bp, Artificial Sequence
  derived and/or modified sequence
atgtgggtaaccaagttgttgcctgctctgcttctgcagcacgtccttctgcacctgctgctgctgcccatcgccattccatacgccgagggtcagcggaagcgaaggaataccatccacgagttcaagaagagcgcgaagactactctcattaaaatcgacccggccctcaaaatcaaaacaaagaaggtcaatacagccgatcagtgcgcaaatcgatgtactagaaacaaaggtctccccttcacctgcaaggcattcgtgtttgataaggccaggaaacagtgcctgtggttcccctttaattccatgagctccggcgtgaagaaggaatttggacacgaatttgacttgtatgagaataaagactacatacggaactgcatcatcggaaaaggccgctcttataagggtacagtcagcatcacgaagtccggaattaagtgccagccctggagctctatgattccccatgagcactcctttctgccttccagttacaggggtaaagatttgcaggagaactactgtagaaaccctcggggagaagagggcgggccttggtgcttcacctccaatccagaagtcagatatgaggtctgtgacatcccgcagtgctcagaagtcgaatgtatgacttgcaatggcgagtcctatcgcggactcatggatcatacagaaagtggcaagatttgtcagcggtgggaccaccagactccgcaccgacataaattcctccccgagcggtaccccgataaggggtttgatgataattactgccgcaacccagatggtcagcctagaccatggtgttatacattggatccccacacacgctgggaatattgtgcgatcaagacatgcgccgataacacaatgaacgacaccgacgtaccactcgagacaaccgagtgcatacaggggcagggcgagggctacaggggtactgtaaatacgatatggaacggcattccctgtcaacgatgggatagccagtacccccacgaacatgatatgactcccgagaatttcaagtgcaaagacctcagggagaattactgcagaaatccagatggcagtgagtccccctggtgttttacaactgacccaaatatcagagttggatactgctctcagatccccaactgtgacatgtcccacggtcaggattgctaccgggggaacggaaaaaattatatgggaaatctctcccagaccaggtcaggactgacctgttccatgtgggataagaatatggaagatttgcaccgacatatcttctgggagcccgatgcctccaagctcaacgaaaactactgtaggaatcccgatgacgatgcccacggaccctggtgttatacaggaaaccccctgattccctgggactactgcccaatttccagatgcgagggcgataccacaccaaccattgtgaacctggaccacccagtgatttcctgcgcaaagacaaagcaactgcgggtggtgaatggaatacctactagaaccaatattgggtggatggttagtctcaggtatagaaacaagcacatctgtggtgggtctttgatcaaagaaagctgggtgctcaccgcccgacagtgcttcccttctcgcgatcttaaagactacgaggcctggttgggtatccacgatgttcacggtcggggggacgagaaatgtaagcaggttctgaatgtctcacagctcgtatacggaccagaggggtctgatctcgtgctcatgaagctcgccagaccagctgtccttgatgatttcgtgagtactatcgatctgcccaattatggttgtaccatcccagaaaagacatcttgtagcgtgtacgggtggggttatacagggctgatcaattatgatggcttgctgcgcgtagctcacctgtacatcatggggaacgagaagtgctctcagcatcatagaggcaaagtgacactcaacgaaagtgagatttgtgcaggtgccgagaagatcggttccggcccatgtgagggggattatggcgggcctctcgtttgcgagcaacataagatgaggatggtcctgggcgtcatcgtaccgggccgggggtgtgcaatccccaaccggccaggcatattcgttagagtggcctactacgccaaatggattcataagatcattctgacatataaggttccacagtct

SEQ ID NO: 13468 - DNA, 2184 bp, Artificial Sequence
  derived and/or modified sequence
atgtgggtgaccaagttgctgcctgccttgctgcttcaacatgttctccttcatctgctgctgctccctatagccattccttacgcagaaggacagagaaaacgaagaaacactattcatgaattcaagaagtcggccaaaaccactttgattaagattgacccggcacttaagatcaaaaccaagaaggtgaacactgcagaccagtgcgcgaacagatgtactcggaacaagggtttgccattcacttgtaaggcatttgtgtttgataaggcacggaagcagtgcctctggtttcctttcaattcgatgtcaagcggcgtgaagaaagagtttggacatgaatttgacctctacgagaacaaagattacatcagaaactgcattataggaaaaggccgatcatacaagggtactgtgagcatcactaaaagcgggataaagtgtcaaccgtggtcctcaatgattcctcacgaacactcttttctgccatcttcctatcggggcaaagatctgcaagagaactactgtcgtaatcccagaggagaagaaggaggaccctggtgttttacgtcgaaccccgaggtcagatacgaagtgtgtgacatacctcaatgttctgaagtcgagtgtatgacctgtaacggggaatcgtaccgaggactgatggaccacaccgagtcgggaaagatctgtcaacgatgggaccatcagactcctcaccgtcataagtttcttccagaaaggtatcccgacaaggggtttgatgacaattactgtagaaaccccgatggacaacctcggccctggtgttacaccctggaccctcatactcggtgggaatattgcgctatcaagacctgtgccgacaatactatgaatgacaccgacgtgccactcgagactactgagtgcattcaaggtcagggagaaggttacaggggcaccgtgaacaccatttggaacggtatcccctgtcaaagatgggattcacaataccctcatgaacatgatatgactccggagaatttcaaatgcaaggaccttagagaaaactactgccgcaaccctgacggctccgaaagcccttggtgctttaccaccgatcccaatattcgcgttgggtactgttcgcaaattccaaactgtgatatgtcacatggccaagattgctacaggggtaacggaaagaactacatgggaaatctcagccagacccgctcgggattgacctgtagcatgtgggataagaatatggaggatctgcatcgacatatcttttgggaacctgacgcaagcaagctgaacgagaattactgtaggaaccctgatgatgatgcacacggaccttggtgctacactggtaacccgctgattccctgggactactgcccaatctcgcgctgcgaaggcgacaccaccccaacgattgtgaaccttgatcatcctgtgatttcgtgtgccaagaccaagcagcttagagtcgtgaacggcatccctaccagaaccaatattggctggatggtcagccttagataccggaacaaacacatttgtggcggatcgctgataaaagaatcgtgggtgttgaccgcccgacagtgtttcccgtcgagagatctcaaggactacgaagcctggctggggatccacgatgtgcatggacggggcgatgaaaaatgtaagcaggtgctcaacgtgtcgcagctggtgtacggcccagaaggcagcgatcttgtgctcatgaagctcgcacgcccggccgtgcttgacgattttgtgagcaccattgatctgcctaattacggctgcacgatccccgagaaaacgtcctgttccgtgtacggttggggatacactggactgattaactatgatggacttctgagggttgctcatctctacattatgggaaatgagaaatgtagccaacaccacagaggtaaggtcactctgaacgaatccgagatctgcgcaggtgcggagaagattggaagcggaccttgcgaaggtgattacggaggtcctcttgtctgtgagcaacataagatgaggatggtgctgggcgtgattgtgcctggacggggctgcgcaatcccgaacaggccaggtattttcgtgcgagtcgcatactatgcaaagtggatccataagattatccttacctacaaagtgccacagtcg

SEQ ID NO: 13469 - DNA, 2184 bp, Artificial Sequence
  derived and/or modified sequence
atgtgggtgaccaaattgctgccagccctgctgcttcaacatgtgctgctgcatttgctgttgcttccgatcgctatcccttacgccgaaggacagcggaagcgccgcaatacgattcacgagtttaagaaatcagcaaagactaccctgatcaagatcgatcccgcactgaagatcaagacgaagaaggtcaacactgcagatcaatgtgccaatcgctgtacgcgcaacaagggattgccgttcacctgcaaggccttcgtgttcgataaggcgcgcaaacagtgtctgtggtttccgttcaacagcatgtcgtccggagtgaaaaaggaatttgggcatgagtttgacctgtacgagaacaaggactacatcaggaattgtatcatcggaaaggggcggtcctacaaaggaactgtgtcgatcactaagtccggaatcaagtgtcaaccatggtcatcgatgattccccacgaacatagcttcctcccgtcatcctaccggggcaaagatctccaggaaaactattgtcgcaaccctcggggagaggagggaggaccatggtgcttcacctccaatcctgaagtaagatacgaggtctgcgacatcccacagtgctccgaggtggagtgcatgacttgtaatggggaatcatacagaggactgatggaccataccgagtcaggaaaaatctgccagcgctgggatcaccaaactccgcaccgccataagttcctgcccgaacggtatccggacaagggcttcgatgataactactgccggaatcccgacggtcagccccggccgtggtgctacaccctggacccgcatacgagatgggagtactgcgcgatcaagacctgcgcggacaacactatgaacgacactgacgtccccttggagactaccgagtgcattcagggccaaggggagggctaccgagggaccgtgaatacgatctggaacggcatcccatgccaacggtgggacagccagtacccccatgagcatgacatgaccccggaaaacttcaagtgcaaggacctccgggagaactactgcaggaaccccgacggatcggagtcaccttggtgcttcactaccgatccgaacatccgcgtcggctactgttcccaaatcccgaattgcgacatgagccacgggcaagattgctatagggggaacggcaagaattacatgggtaatctgtcgcagacccgcagcggcctgacctgctccatgtgggacaaaaacatggaggaccttcaccgacacatcttctgggaaccagacgcttcaaaacttaatgaaaactactgccgcaacccggacgatgacgctcacggcccttggtgctacactggaaacccgctgattccgtgggactactgcccgattagccgctgcgaaggcgacactacccctactatcgtcaacctcgaccatccagtcatctcgtgcgcgaaaaccaagcaactcagggtcgtgaacggaatccctacgcggactaatatcggttggatggtttccctgagatatcggaataagcatatatgcggcgggtcactgatcaaagaaagctgggttctcaccgctcggcagtgtttcccctcccgggatctgaaggattacgaggcctggctggggatccatgatgtgcacggtcgcggagatgaaaagtgcaagcaggtgcttaatgtctcccagttggtctacggccccgaaggatccgacctggtgctcatgaagctggcacggccggcggtgctggatgacttcgtgagcaccatcgatctgcctaactacgggtgcactatccctgagaaaacttcgtgctcggtctacggatggggatacacgggattgatcaactacgatggactgttgcgcgtcgcccacctgtacatcatgggtaatgaaaaatgctcgcagcaccaccggggaaaggtgaccctcaacgaaagcgaaatttgtgccggcgcggagaagatcggttccggcccgtgtgaaggggattacggaggcccgcttgtgtgcgagcaacataagatgcgcatggtgttgggagtgatcgtgcctggacgcggttgcgcaatcccgaaccgcccggggatcttcgtgcgcgtcgcctactacgctaaatggatccataagattatcctcacttacaaggtgcctcaatcg

SEQ ID NO: 13470 - DNA, 2184 bp, Artificial Sequence
  derived and/or modified sequence
atgtgggtgaccaaactcctgccagccctgctcctgcaacacgtgctcctgcatctgctgttgctgccgattgcaatcccgtacgctgagggccaacggaagagacgcaacactatccacgagttcaagaaaagcgccaagactactctgatcaagatcgaccctgcactgaagatcaagacgaaaaaagtgaataccgctgaccaatgcgcgaaccgttgtactagaaataagggattgccattcacctgcaaagccttcgtctttgacaaagcaagaaagcaatgtctgtggttcccgttcaattccatgtcatccggcgtcaagaaggaattcggtcatgagttcgacctgtacgagaataaggattacatccggaattgtattatcggaaagggccgcagctacaaagggactgtctcgattacgaagagcggaatcaagtgccagccgtggtcctcgatgatacctcatgaacactccttcctgccgtcctcctaccgcggaaaagacctccaggaaaactactgtcgcaatccccggggggaggaaggaggcccgtggtgtttcacctcgaatccagaagtcagatacgaggtctgcgacatcccgcaatgctcggaagtcgaatgcatgacgtgcaatggcgaatcctaccgcggcctcatggaccataccgagtccggcaagatctgccagcggtgggaccaccagactcctcaccgccacaaatttctccctgaaagatacccggacaaaggtttcgatgacaattactgccggaaccctgacggacaacctcggccgtggtgttataccctcgacccgcacacccgctgggaatactgcgcaatcaagacctgcgcagacaacactatgaatgatacggacgtgcctctggagactactgagtgtattcaaggacagggcgaaggataccgggggaccgtcaacactatctggaacggaatcccgtgccagcgctgggacagccagtatccacacgaacacgacatgaccccggaaaacttcaagtgcaaagacttgcgggagaattactgtcgcaacccagacggaagcgagtccccatggtgttttactactgaccccaacattcgcgtggggtactgctcacagattccgaactgcgatatgtcgcacggacaggattgctaccgggggaatggcaagaattacatgggaaacctgtctcaaactcgcagcggcctcacgtgcagcatgtgggacaaaaacatggaagatctgcatagacacattttctgggagcccgacgcttccaagctgaacgagaactactgccgcaacccggatgatgatgcgcacggtccatggtgctacacgggcaatcctcttatcccgtgggactactgcccgatctccaggtgcgagggcgatactactcctactatcgtgaacttggaccatccggtgatctcctgcgctaagaccaaacagctgagggtggtgaacggaattccgacccgcactaacattgggtggatggtttccctgcgctatcggaacaagcatatctgtggagggagcctgatcaaggagtcatgggtgttgactgcaagacagtgtttcccgtcgcgcgatctcaaggattacgaggcatggctcggaatccacgacgtgcatggaaggggagatgaaaagtgcaagcaagtgctgaatgtctcccagctggtgtacggaccggaaggaagcgacctggtgctgatgaaactcgcaagaccggcggtgctggatgatttcgtgtcgactatcgaccttcctaattacggctgcactatacccgaaaaaacgtcttgctccgtctacggatgggggtacaccggactcatcaattacgacggactgctgcgggtggcccacctttacatcatgggcaacgaaaaatgctcccaacaccatagaggcaaagtgaccctcaacgaatccgagatctgcgccggagcggagaagatcgggtccggtccttgcgagggagactacggagggcctctggtctgcgaacagcataagatgcgaatggtgctcggagtgatcgtcccgggtcggggatgcgctatccccaacagaccgggaatctttgttagggtggcctactacgcgaaatggatacataagattatcctcacctacaaggtccctcaaagc

SEQ ID NO: 13471 - DNA, 2184 bp, Artificial Sequence
  derived and/or modified sequence
atgtgggtgactaagctgcttcctgcactccttctgcaacatgtgcttctccatcttctgcttctccctatcgcaattccctacgcagaagggcagagaaaaaggagaaacactatacatgaattcaagaagagcgccaagactaccttgattaagattgatccggcgctgaaaatcaaaaccaagaaggtgaatactgcggatcaatgtgcaaaccggtgtacccgaaacaaggggctcccatttacttgtaaggcctttgtgttcgataaggcaagaaaacaatgtctgtggttcccctttaacagcatgtcgtcaggcgtcaaaaaagaatttggacacgagtttgatctgtacgagaacaaggattacatcagaaactgtatcattggcaagggaagatcgtacaaaggtaccgtgtccattaccaaatcgggtattaagtgccaaccttggtcgtcgatgataccacacgagcactcatttctgccttcgtcgtacaggggtaaggatctccaggagaactactgtagaaaccccagaggagaggaagggggtccttggtgtttcacctccaatcctgaggtgcgctacgaggtgtgcgacataccccagtgttcggaagtggagtgcatgacttgtaatggggaatcataccggggacttatggaccataccgaatcaggcaaaatctgccaacgatgggatcaccagaccccccatcggcacaagttccttccagagcgttaccccgacaaaggttttgatgataactactgtcgtaatcctgatggacagccacgaccttggtgttacaccctcgaccctcatacccgctgggaatactgtgccatcaagacctgtgccgataacactatgaatgacaccgatgtccccctggagactaccgaatgtatccaaggtcagggagagggataccgcggtaccgtgaacactatctggaacggaattccttgtcaaaggtgggactcgcaatatccacatgaacatgatatgacccccgaaaactttaagtgcaaagacctgcgagagaactactgcaggaatcccgatgggtcagaatcgccttggtgttttactactgatcccaacattagagttggatactgcagccagattccgaactgtgatatgtcgcacggccaagattgttacagaggcaacggtaagaactacatgggaaacctttcacagactcgttccggattgacctgttccatgtgggataagaacatggaagatcttcatcgacacatcttctgggagcctgatgcttcgaaactgaacgagaactattgcagaaacccggacgacgatgctcatgggccttggtgctacacgggaaacccattgataccgtgggattactgtccgatatcaagatgtgagggcgacacgacccctaccattgtgaatctggatcatcctgtcatttcctgtgcaaagactaaacaacttcgggtcgtgaacggtatccctactcgcaccaacattggatggatggtcagcctgcggtacagaaacaagcacatttgtggaggctcacttatcaaggagtcgtgggtgctgaccgccaggcagtgttttccttcgcgtgatttgaaagattacgaagcgtggctcggaatccacgacgtccatggaagaggcgatgagaagtgcaagcaggtgctgaacgtgtctcaactcgtgtatggtcctgaaggttccgacctggtgctgatgaaactggcacggcccgccgttctcgatgattttgtgtcgaccatcgacctgccgaattacggatgtaccattcctgaaaagacttcctgctcggtctacgggtggggttacaccggcctgatcaattacgacggactgctccgggtggcacatctgtacattatggggaatgaaaagtgttcacagcatcataggggtaaggtcacgctgaatgagtccgaaatttgtgctggggcagaaaagattgggtccggcccttgtgagggagattacggcggacctctggtctgcgaacagcataagatgcgtatggtcctgggcgtgatcgtgccgggacgcgggtgcgcaattccaaacaggcctggaattttcgtgagagtggcatactacgcaaaatggatccacaaaatcattctgacctacaaggtaccacaaagc

SEQ ID NO: 13472 - DNA, 2184 bp, Artificial Sequence
  derived and/or modified sequence
atgtgggtgaccaagctgctgccagctctactactgcaacacgttctgctgcacctcctgttgttgcccatcgccatcccctacgctgaaggacagcgaaagagaagaaacaccattcacgaattcaaaaaatccgcaaaaacaacattgataaagattgaccccgcgttaaaaataaagaccaagaaagtgaatacagccgatcaatgtgccaaccggtgtacacgaaataagggcctgccttttacctgcaaagcattcgttttcgataaagcacgcaagcagtgcttgtggtttcctttcaattccatgtctagcggagtaaaaaaggagtttggccacgagttcgacctctacgaaaacaaggactatatcagaaattgtatcatcggtaaaggacgaagttacaaaggcacggtgagcatcaccaaatccgggatcaagtgtcagccgtggagctccatgatacctcacgaacattcctttctgccaagcagctacaggggcaaggatttgcaggaaaattactgccggaacccccgaggagaggagggaggcccttggtgttttacatccaaccccgaagttcggtacgaagtatgcgacattccacagtgttctgaagtggagtgcatgacgtgtaatggagaatcctaccgaggcctgatggaccacacggagtcaggaaagatctgtcagcgctgggaccaccagaccccacatcgtcacaaattcttacctgagcggtaccctgacaaaggcttcgacgacaactattgtcgcaaccctgacggccagccccgcccctggtgctataccctggaccctcacaccaggtgggagtactgcgcgataaaaacgtgcgccgacaataccatgaatgatacagatgtgccattagaaactacagagtgcattcagggccaaggtgagggatacaggggtaccgtgaataccatttggaacgggattccttgccagcgttgggatagtcagtaccctcatgagcacgatatgactcctgagaattttaagtgtaaggacttaagggagaactattgccgaaaccccgatggttccgagtccccttggtgctttactaccgatcccaatatccgcgttggctattgtagtcagatcccgaattgtgatatgtcccatgggcaggactgctaccggggaaatggcaagaattacatgggcaacctcagtcagactagatcaggtcttacctgcagcatgtgggataagaacatggaagatctgcaccggcacatcttctgggagcctgatgcgagtaagcttaacgaaaattattgtcggaaccccgacgatgatgctcatggtccatggtgctataccggaaatcccctaatcccctgggattactgtcctattagccggtgcgagggtgatacaaccccaacaattgtgaatctggaccacccagtgatctcttgtgccaaaaccaagcagctgagggtcgtaaacgggataccgacacgcacaaatatcggatggatggtttctctgcgttatcggaataagcatatttgtgggggttcattgattaaagagagttgggtcctgacggcaaggcagtgcttcccctcacgtgatttaaaggattacgaagcatggctcggaattcacgacgtgcacggtcgtggagatgaaaagtgtaagcaggtcctcaacgtcagtcagcttgtctatgggccagaaggctcggacctggttcttatgaagctcgcccgtccggccgtcttggatgatttcgtttccaccattgacctccccaattacggttgtaccatccctgaaaagacgagctgttcggtctatggttgggggtacaccggccttatcaattatgacggcctgctgagagtcgcacacctgtatatcatgggaaacgaaaagtgctcccaacaccaccgcgggaaagtcactttaaacgagtctgagatctgtgccggcgccgagaaaataggctcgggaccctgcgagggtgactacggcgggccgctggtatgcgagcaacataaaatgcgaatggtcttgggggttatcgttcccgggaggggctgcgcaattccaaatcggcctggtatcttcgtgcgtgttgcatactacgcaaaatggattcataaaataattcttacgtacaaggtaccccaaagc

SEQ ID NO: 13473 - DNA, 2184 bp, Artificial Sequence
  derived and/or modified sequence
atgtgggtgactaaacttcttcctgccctgctgctgcaacacgttctgctgcacctcctgctgctgcccatagcaattccttacgcagaaggtcaacgcaaaagaagaaatacgattcatgagttcaagaaaagcgcaaagaccaccctgatcaaaattgatcctgcacttaagattaagactaagaaagtgaataccgctgatcaatgtgctaacagatgtacccggaacaagggactccccttcacctgcaaggcctttgtgttcgataaagcaagaaagcagtgcctttggttccccttcaactccatgagctcaggagtgaagaaggaatttggtcacgagtttgatctgtacgagaacaaggactacattaggaactgtatcattgggaagggccggtcgtacaagggaactgtctcaatcaccaaatccggcattaagtgccagccatggtcgtcaatgattccacatgagcattcgtttcttcctagctcgtaccggggaaaagatcttcaggagaactattgtcgaaaccctagaggcgaagaggggggaccatggtgtttcacttccaatcccgaggtgcgctacgaggtctgtgatatcccgcaatgctccgaagtggaatgtatgacgtgtaacggtgagtcgtatagggggctgatggatcacaccgaatcaggcaagatttgtcaacggtgggatcaccagaccccccacagacataagtttctcccagaacgctaccctgacaagggctttgatgataactactgcagaaaccctgatggtcaacccaggccctggtgctataccctggatccacacactcgctgggagtactgtgcaattaagacttgcgcggataataccatgaacgacactgacgtgcctctggagactaccgagtgtattcaaggacagggcgagggataccgtggaaccgtgaatacgatttggaatggaatcccctgtcagcggtgggattcgcaataccctcatgagcatgatatgacccctgaaaacttcaaatgtaaggatctgcgtgagaattactgtaggaacccggacggatccgaatcaccttggtgcttcaccaccgatcctaacataagagtgggatactgttcgcagattccaaattgtgacatgtcgcacggacaagactgttacagagggaacggaaagaactacatgggtaacctgagccagacgagatcaggtcttacttgtagcatgtgggacaaaaacatggaagatctgcatcgacatatcttttgggaacctgatgcatcaaaacttaatgagaactactgccgtaaccccgatgatgatgcacatggtccgtggtgttacacgggtaatcccttgattccatgggactactgtcctattagccggtgtgagggagatactactccaaccatcgtgaaccttgaccacccagtgatctcatgtgcaaaaacgaaacagctgcgcgtggtgaatggcatccctacgaggacgaacattggctggatggtgtccttgcgttatcgcaacaagcatatctgtggaggttccctcattaaggaaagctgggtcctgaccgcaagacagtgttttccctctcgagatcttaaggactacgaagcatggcttggaatccatgatgtgcacggacgaggggatgaaaaatgtaagcaggtgctgaatgtgtcgcagctcgtgtacggaccagaaggctccgaccttgtccttatgaagctggccagacctgcagtgcttgatgactttgtgtcaaccattgacctgcctaattacggctgtaccattcccgaaaagacttcgtgcagcgtgtacgggtggggttacaccggcttgattaactacgatggactccttcgggtcgcacatttgtacattatgggtaatgagaagtgttcgcaacaccataggggaaaggtgaccctgaatgaatcagagatttgtgcaggcgccgagaagataggatcaggaccttgtgagggtgactacggtggcccactggtctgcgaacaacataagatgaggatggtgctgggagtcatagtgccaggtagaggatgtgcaatcccaaatcgaccagggatttttgtcagggtcgcatactacgcaaagtggattcacaagattattctgacctacaaagtgccacaaagc

SEQ ID NO: 13474 - DNA, 2184 bp, Artificial Sequence
  derived and/or modified sequence
atgtgggtgaccaagctactccctgctctccttctccagcacgtgttgctgcatctgttactgctgcccattgccattccatatgccgaggggcagcgaaagcgaagaaacacaatccacgaatttaaaaagagcgccaaaaccacactgattaagattgatcctgcactcaaaatcaaaaccaaaaaagtaaataccgccgatcagtgcgccaacaggtgtacgcgtaacaagggcctcccctttacatgcaaagctttcgttttcgacaaggccaggaaacaatgtctgtggttcccctttaactccatgtctagcggcgtgaagaaggagtttgggcacgaattcgacctctacgaaaataaggactatattagaaattgcataattgggaaggggaggtcatataaaggaactgtttctattaccaagtctggaattaagtgtcagccctggagcagcatgatcccccatgagcacagcttcttgcctagctcctatagaggtaaagacctgcaagagaactactgtcgcaaccccagaggtgaagagggggggccttggtgctttacctctaaccccgaagtccgttatgaggtctgcgacatccctcagtgctctgaggtcgagtgtatgacgtgtaacggggaatcctataggggtctcatggatcacaccgaaagtgggaaaatttgtcagcgatgggaccatcaaaccccccacagacataagttcctgcctgagagatacccggataaaggattcgacgataactattgtcgcaatcctgacgggcaaccaaggccttggtgctacacacttgatccacacaccagatgggagtattgcgccattaaaacatgtgcagacaacactatgaatgacactgatgttccattagagaccacagagtgtattcagggacagggagaaggatatagaggaaccgtgaacacgatctggaatgggataccctgccaacgatgggattcacagtacccccatgagcacgacatgacgccagaaaatttcaagtgtaaggacttgcgcgagaactactgccggaatccggatgggtccgagtcaccttggtgtttcactactgacccaaatattagagttggttactgctctcaaatacctaactgtgatatgtcccacggtcaggactgttacagaggtaacggcaaaaattatatggggaatctgagccagacacggtccggactgacatgctcaatgtgggacaagaacatggaggatctgcacagacacatcttttgggaacctgatgccagtaaactcaatgaaaattattgtcgaaatccagatgacgatgctcatggtccctggtgctacaccggtaacccattaatcccatgggactactgccctataagccgatgtgaaggggatacgactccaactatcgtcaacctggaccatcccgtcatcagttgtgcaaagacaaagcagctaagggttgttaatggaatccccacgcgtactaatatcggctggatggtctcactgaggtatcgaaacaaacacatatgcgggggcagtctgataaaggaaagttgggtgctgaccgcccgacagtgttttcccagtcgagacttgaaggactacgaggcgtggctgggtatccacgacgtacacggacgaggggatgaaaagtgtaagcaggtgctcaacgtctctcagctggtctatggacctgagggctcagacctggtgttgatgaagctcgccaggccagctgtgcttgatgacttcgtctcaaccatcgacctccctaattacggctgtaccattccagaaaaaacatcctgcagtgtctacggatggggctataccggccttataaattacgatggactactcagagttgcccatttgtatattatgggcaacgagaagtgtagtcagcatcatcgaggtaaagtgacgttaaatgagagcgaaatttgtgctggagccgaaaaaatagggtctggaccttgcgaaggtgattatggggggccactggtgtgcgaacaacataaaatgagaatggtgctgggagtgatcgtaccgggacggggatgtgccattcccaacaggccaggcatcttcgtgagagtggcgtactacgcaaaatggatccataagataatcctcacatacaaggtaccacagtca

SEQ ID NO: 13475 - DNA, 2184 bp, Artificial Sequence
  derived and/or modified sequence
atgtgggttacgaagttactccctgcgctgttgctgcagcacgtgctgctgcacttacttctgctacctattgctatcccatacgccgaggggcagagaaagcgtcgtaatactattcatgagttcaagaaatcagccaaaaccactctgatcaagattgatcccgccttgaagatcaagaccaaaaaagtgaataccgcagaccagtgtgccaaccggtgtacacgaaataaaggactaccttttacttgtaaggcttttgtgttcgataaagcaagaaagcaatgcctatggttcccctttaattccatgtcttccggcgtgaaaaaagaatttgggcacgagtttgatctgtatgagaataaagactacattcgcaattgcatcattggcaaaggtcgttcttacaagggaaccgtgtcaatcacaaaaagcggaattaagtgtcaaccttggtcctcaatgatcccccacgagcatagcttccttcccagctcataccgcggcaaagacttgcaagaaaattattgcaggaacccccggggcgaggagggaggtccgtggtgtttcactagcaatcctgaagtgaggtatgaggtgtgtgacatcccacagtgtagtgaagtggagtgcatgacctgcaacggagagtcctacagagggctgatggatcacacagaaagtggaaagatctgccagagatgggatcatcaaaccccacaccggcataaattcctaccagaacggtacccagacaagggctttgacgacaactactgccggaacccagacggccagcccagaccttggtgctacacactggatcctcacacccgttgggagtactgcgccatcaagacatgcgccgataatacaatgaacgataccgacgtgccactggagactacagagtgcattcaaggacagggcgagggctatcgtggaacagtaaacacaatctggaacggtattccatgtcagcgttgggacagccagtatccacacgaacatgacatgactcccgagaatttcaagtgtaaagacttgagagagaattactgccgcaaccctgatggatccgaatctccctggtgtttcacaacagaccctaatatcagagtcggatattgttcgcagatccctaactgtgacatgtcgcacggccaagattgctaccgtggaaatggtaagaactacatgggcaacctgagccagaccagatcagggctgacctgcagtatgtgggataagaacatggaggacctccaccgccacatcttctgggagccggatgcctcaaagctcaatgagaattattgtaggaatccagatgacgatgcccatgggccctggtgttacacaggcaatccattgataccctgggactattgccccatatctcgctgcgagggtgacaccacgcctacaattgtcaatttagaccatcccgttataagctgtgccaagaccaaacagttacgggtagttaatggaatcccaacccgcaccaacatcgggtggatggtgtccctccgatatcggaataaacatatctgcggaggctccctgattaaggaatcgtgggtgctgaccgctcgccagtgtttcccatctcgggatctgaaagattatgaggcatggttaggtatccacgacgtgcatggacggggtgacgagaagtgcaagcaagttctgaacgtatcacagctggtgtacggacctgaaggaagcgacctagtacttatgaaactggcacggccagccgtcctggatgactttgttagcaccatcgacttgccaaattatggctgtaccatcccggagaagaccagttgctcagtctacggctggggatatactgggctcataaactacgatggactcctccgtgtggcacacctgtacattatgggaaatgaaaagtgctcccagcatcacagggggaaagtgacattaaatgaaagtgaaatctgtgcaggcgcagaaaagatcggtagcggtccttgtgagggggactatggtggtcctctggtgtgcgagcagcacaagatgcgcatggtgctgggcgtgattgtgcccggtcggggttgcgcgatcccaaaccgcccaggaatttttgtccgggtcgcctattacgccaaatggattcataagattatcttgacctacaaagtgcctcagtca

SEQ ID NO: 13476 - DNA, 2184 bp, Artificial Sequence
  derived and/or modified sequence
atgtgggtgacaaagctgttacctgccctcctgctccagcatgttctgcttcacctgttactcctgcccattgctatcccttacgcagagggacagcggaaacggcgtaacacaattcacgaatttaaaaagagtgccaaaaccacccttatcaagatcgacccagcccttaaaatcaagacaaagaaagtgaatacagccgatcagtgtgcaaatcggtgtaccaggaataagggacttcccttcacctgcaaggcttttgtctttgacaaggcaaggaaacagtgcctgtggttccctttcaattctatgagcagcggggttaagaaggagtttggtcacgagttcgatctctacgaaaataaggattatattagaaattgtattatcggaaaggggcgttcttacaaggggacggtgtctattactaaatccggaatcaagtgccagccttggtctagcatgattccccatgagcattccttccttccttcctcctaccggggcaaagacctccaggagaattactgtcgtaacccacgtggtgaggagggcggcccctggtgcttcacgtcaaaccctgaagtaagatatgaggtctgtgatatcccacagtgcagcgaggtggagtgcatgacctgcaatggagaatcttatcgcgggctaatggaccatacagagtcgggaaagatttgccaacgatgggatcatcagaccccccaccgtcacaagttcctgcctgagcgctatccagataaggggttcgatgacaactactgtagaaacccagacggccagccccggccttggtgttatacacttgacccgcatacgcgatgggagtactgcgccatcaaaacttgtgccgacaatactatgaacgacactgatgtgccactcgagaccaccgaatgcatacagggacagggggaggggtaccggggaaccgtgaatacaatttggaacgggataccttgtcagagatgggattcccagtacccccatgaacatgacatgacgccagagaatttcaagtgtaaagatctgcgcgagaattactgtcgcaaccctgatgggagcgaatccccatggtgttttacgactgaccccaatatccgggttggctattgctcacagatccccaattgcgatatgtcccatggccaggattgctatcggggaaacggcaagaactatatgggtaatctcagtcaaacacggagcggcctcacttgttcaatgtgggataaaaacatggaagacctgcaccgccacattttttgggaacctgacgcatccaaacttaacgaaaactattgcagaaacccggatgatgatgcccacggtccttggtgttacacaggcaacccgctgatcccttgggactactgcccaatcagtagatgcgagggggacacgacccccaccattgtgaacctagatcacccggtgatcagctgcgctaaaaccaagcagctgcgcgtcgtaaatggaattcccaccaggaccaatataggttggatggtgtccctgcgctaccggaacaaacatatctgtgggggaagtctgattaaggagtcttgggtgctgaccgccaggcagtgcttccccagtcgcgatctgaaggattatgaggcttggttgggcatacatgacgtgcacggaagaggggacgaaaaatgcaaacaggtcttaaatgttagccagcttgtgtacggacctgaagggagcgacctcgtgctgatgaaactcgcccgacctgccgttttggacgattttgtgtctactatcgacctccctaactatggctgcacgatccccgagaaaacatcttgtagcgtgtatggatggggctatacaggcctgattaactatgatggcctcctgagagtggctcacctgtacatcatgggcaacgagaaatgcagccagcaccatagggggaaggtgactctgaacgagtcggagatctgtgcaggcgctgagaagatcggcagtggaccctgtgaaggtgactacggggggccgcttgtctgtgagcagcacaaaatgcggatggttctgggggtgattgtaccaggaagggggtgtgctatccctaaccggccgggcatctttgttcgggtggcctactatgcgaaatggatccacaagataatattgacgtacaaggtgccgcagtct

SEQ ID NO: 13477 - DNA, 2184 bp, Artificial Sequence
  derived and/or modified sequence
atgtgggtcaccaagttgctgccggccctgctcctccagcacgtccttctgcacctgctgctcttgccgattgccatcccgtacgccgaaggacaacggaaaaggcgcaacacgatccacgaattcaaaaagagcgccaaaactactctcattaagatcgacccggccctgaagatcaaaacgaagaaggtgaacaccgccgaccaatgcgccaatagatgtaccaggaacaagggactcccgttcacttgcaaagccttcgtctttgacaaggcccggaagcagtgcctgtggttcccttttaactcgatgagcagcggagtgaagaaggaatttggccacgaatttgacctgtatgagaataaagattacatcagaaactgcatcatcggaaagggccgctcttacaaagggactgtgtccatcactaagtccggtatcaagtgccagccatggagcagcatgatcccacatgagcactccttcctgccgagctcgtaccgggggaaggatctgcaagagaattactgccgcaatcctcggggagaagagggtgggccgtggtgctttacctctaacccggaggtgcgctacgaagtgtgtgacatcccccagtgcagtgaagttgagtgcatgacctgcaacggcgagtcctaccggggactgatggaccacaccgagtcaggtaagatttgccagagatgggatcaccaaactccgcatcgccacaagttcctgcctgagcggtacccggacaaaggtttcgatgacaattactgtaggaaccctgacggacagccaagaccttggtgctacactctggaccctcacacccggtgggagtactgcgccatcaaaacttgcgccgacaacaccatgaacgatactgacgttccacttgaaacgaccgagtgtatccagggccagggcgagggatacagaggcactgtcaatacgatttggaacgggatcccatgtcagcggtgggacagccagtacccacacgaacatgacatgactccggagaatttcaagtgcaaggacttgcgggaaaactattgcagaaacccagatggatccgagtccccatggtgcttcactactgatccgaacatccgcgtgggatactgcagccagatccctaactgcgacatgagccacggacaagactgctaccgggggaatggtaagaactacatgggaaatctctcgcagactaggtcgggactgacttgctccatgtgggacaaaaacatggaggatcttcaccggcatatcttctgggaaccggatgcttccaaacttaacgagaattactgtcggaatcccgacgatgacgcgcacggcccgtggtgctatactggtaacccactgatcccgtgggattattgccctatctccaggtgcgaaggggacaccactccaacgatcgtgaaccttgaccaccccgtcatctcgtgcgcgaaaactaagcaactgagggtagtcaacggaatccccacccggaccaacatcgggtggatggtgtcactgaggtaccggaacaagcatatttgcgggggaagcctgattaaagaatcctgggtcttgaccgcgaggcagtgcttcccctcgcgcgacctgaaagactacgaagcatggctgggaattcacgatgttcacggcagaggggacgaaaagtgtaagcaagtcctcaacgtctcccagctggtgtacggacccgaaggatcagacctggtgctgatgaagctggcgaggcctgcagttctcgacgatttcgtgtcaaccatcgacctcccaaattacggctgcactatcccggaaaagacttcgtgcagcgtctacggatggggatacaccgggctcatcaactacgatgggctcctgcgcgtggcgcacctgtatatcatgggcaatgaaaagtgctcccaacatcatcggggcaaagtgactctgaacgaaagcgaaatttgtgcgggcgctgaaaagatcggttcaggcccgtgcgaaggagattacggtggaccactggtgtgcgaacagcataagatgagaatggtgttgggagtcatcgtgcccggccgcggatgcgcgatcccgaatcggccgggaatattcgtcagagtggcctactacgccaaatggatccacaaaatcatcctgacctataaggtgccgcaaagc

SEQ ID NO: 13478 - DNA, 2184 bp, Artificial Sequence
  derived and/or modified sequence
atgtgggtgactaaactccttcctgcactgctccttcaacatgtgctcctgcatctcctgcttcttcctattgcaatcccatacgccgaagggcaaagaaagcggaggaacactatccacgaattcaaaaagtcggcaaagaccactcttatcaaaatcgatcctgcacttaagatcaagaccaagaaagtcaacaccgccgatcaatgtgcaaatcgatgcaccagaaataagggtttgccattcacttgtaaggcgtttgttttcgacaaagcaagaaagcaatgcctgtggtttccattcaacagcatgtcctccggagtcaagaaagaatttgggcatgaatttgacctgtacgagaacaaggattacattagaaattgtattatcggaaaggggagatcgtacaagggtactgtgtcaatcactaagagcggcattaagtgccaaccatggtcgagcatgattccacatgaacattccttcttgcctagcagctaccgcggcaaggacctgcaagagaactactgcaggaatccacggggggaagaaggcggaccttggtgctttacctccaacccagaagtgcgatacgaggtgtgcgatataccccaatgctccgaggtcgaatgcatgacttgcaacggagagtcatacaggggtctgatggatcataccgaatccgggaagatttgtcagcgctgggatcaccagacgccccaccgtcataagtttctgcctgaaagatacccagacaaaggtttcgatgacaactattgtcgcaacccagacggtcagccccgtccatggtgttacacgcttgatccacacaccagatgggagtactgcgcaataaagacttgtgcagacaacactatgaacgatactgatgtcccacttgaaacgaccgaatgcattcagggacagggcgaagggtaccggggaaccgtgaacaccatatggaacgggatcccctgtcaacgctgggactcccaataccctcatgagcatgatatgactccggagaactttaagtgcaaagacttgagagagaactattgtcggaaccctgacgggtccgaatctccgtggtgttttacgaccgatccaaacatacgggtcggatactgctcccaaatccctaactgcgatatgtcccatggtcaagattgttaccgcggaaatggaaagaactacatggggaatctttctcagactcgatcgggtcttacttgctccatgtgggataagaatatggaagatctgcatagacacatcttttgggaaccagatgcgtcgaaactcaatgaaaactattgtagaaacccggacgatgatgcgcatggtccttggtgctacactggcaacccactgatcccctgggactactgtcctatcagcagatgtgaaggcgataccaccccgactatcgtgaaccttgaccatcctgtgatctcgtgcgccaagaccaagcagctgagagtggtcaacggaattcccaccagaactaacatcggatggatggtttctctgagatacagaaataagcatatttgcggaggatcacttatcaaggaaagctgggtcctgacggccagacagtgttttcccagccgcgatcttaaggattacgaggcatggcttggcattcatgacgtgcatggtaggggagatgaaaagtgcaaacaggtgctgaatgtgtctcagctggtgtacggtccggagggatccgatctcgttctgatgaagctcgcacgaccagcagtcttggacgattttgtctctaccattgacttgccaaattacggatgtaccattccggagaaaacgtcgtgctcagtctacggttggggatacactggattgatcaattatgatggccttctccgggtcgcacatctttacataatgggaaacgagaagtgtagccaacatcaccgtggcaaggtgactctcaacgagagcgaaatttgtgcaggtgcagaaaagatcggatcgggaccgtgcgaaggcgactacggaggcccccttgtctgtgaacagcataagatgcggatggtgttgggagtcattgtccccggtcgggggtgtgccattcctaacaggcccggtatattcgtgagagtcgcctactacgccaaatggatccacaagattattctgacctacaaagtgccccagtcg

SEQ ID NO: 13479 - DNA, 2184 bp, Artificial Sequence
  derived and/or modified sequence
atgtgggtcactaagctgctgcccgccctgcttctccagcatgtcttgctccatctgctgttgctgccaatcgcaattccctacgctgagggacaaagaaaacggcgcaacactatccacgaattcaagaagtccgctaagaccaccctcatcaaaatcgaccccgctttgaagataaagactaagaaagtgaatacggcggatcagtgcgccaaccgctgtaccagaaacaaaggacttccatttacttgtaaggcgtttgtgttcgacaaagcgcgcaagcaatgcctctggttcccgttcaactccatgagctcgggagtgaagaaagaattcggacatgaatttgatctgtacgagaataaggactacatcagaaattgtatcataggaaagggccggtcatataagggcactgtcagcatcaccaaatcgggaattaagtgtcaaccgtggtcgtcgatgatcccacacgaacactcgttcctgccgtcatcctaccgggggaaggatctgcaagagaattactgccgcaacccccggggcgaggaaggaggaccgtggtgttttacctccaacccggaggtgagatacgaggtctgcgatatcccacagtgctccgaggtggaatgtatgacttgcaacggagagagctaccgcgggctcatggaccatactgagtccggaaagatctgtcagcgctgggatcatcagacgcctcaccggcacaaattcctgccggaacgctaccctgacaaagggttcgatgacaattactgccggaaccccgatggacaaccacgtccctggtgttacaccttggacccacacacgagatgggaatattgcgcgatcaagacctgcgcagacaatactatgaatgatactgacgtgccgctcgaaaccaccgaatgcattcagggtcagggagaaggatacagaggtaccgtgaatactatttggaatgggataccatgtcagcggtgggatagccaatatccacacgaacatgatatgaccccggaaaacttcaagtgcaaggacctcagggagaactactgcagaaacccggacggttcagaatcaccgtggtgcttcaccaccgaccctaacattagagtgggttactgctcgcagatcccgaactgcgatatgtctcacggacaggactgctaccgcggcaacggaaagaattacatgggtaatctgtcccagacgcggtcaggattgacgtgtagcatgtgggacaagaatatggaagatctgcatcgccacatattctgggagccagacgcctcaaaactcaacgaaaactattgccgaaacccagacgacgatgcacacggaccgtggtgctacactggaaaccctctcataccttgggactactgcccgatctcgcgctgcgagggtgataccactccgacgatcgtgaacctcgaccaccctgtgatcagctgcgccaaaactaagcagctcagagtcgtcaacggcattcctacccgaaccaatatcggctggatggtgtcacttcggtacagaaataagcacatctgcgggggttctctgatcaaggagtcgtgggtcctgaccgcccgccaatgtttcccgagcagagatcttaaagattacgaggcttggttgggtatccatgatgtccacggccgcggagacgaaaagtgtaagcaggtgctcaacgtgtcacagctcgtgtacggcccggaagggtcggacctggtgctgatgaagctggctagaccggccgtcctggacgactttgtgtcgaccatcgacctgccaaactacgggtgtaccatcccggaaaagaccagctgctccgtgtatggctggggatacactggcttgattaactacgacggcctgctgcgtgttgcccacctgtacatcatgggtaacgaaaaatgctctcaacatcacagggggaaggtgactctcaatgagtcggagatctgcgcgggagcagaaaagatcggatcaggaccatgcgagggagattacggcgggcctctggtttgcgagcagcacaaaatgcggatggtgctcggcgtcattgtgcctggacggggatgcgcaatcccgaatcgcccaggaatcttcgtgcgggttgcctactacgcgaagtggatccataagatcatcttgacttacaaggtgcctcaaagc

SEQ ID NO: 13480 - DNA, 2184 bp, Artificial Sequence
  derived and/or modified sequence
atgtgggttacgaaacttctgcctgccctgctgcttcagcacgtgctcctgcatctgctcctgctcccaatagccattccttacgccgagggacaaagaaaacgaaggaataccattcacgagtttaagaagtccgcgaaaaccacccttatcaaaatcgatccggcgctcaagatcaagaccaagaaggtcaatacggcagatcaatgtgcgaaccggtgtactagaaataagggactcccttttacctgcaaggcctttgtgttcgataaagcaagaaaacagtgtctgtggtttcccttcaacagcatgtcgtccggtgtaaagaaagagttcggacatgagttcgatctgtatgaaaacaaggactacatccgtaactgtatcattgggaagggtcgctcatataagggaaccgtgtcaattactaagagcggaattaagtgtcaaccttggtcctcgatgattccgcacgaacacagcttcctcccatcgtcttaccgcggaaaggatcttcaagaaaactactgtcgcaacccgcgaggtgaagaaggtggtccgtggtgtttcactagcaaccccgaagtgcgatacgaagtgtgtgatattcctcagtgctcggaagtggaatgtatgacttgtaacggagaaagctaccgcggccttatggatcacacggaaagcgggaagatatgccagagatgggatcatcaaacgccacatagacataagtttctgccggagagataccccgacaaaggatttgatgacaactattgccggaatcctgatggccagcctcggccgtggtgctacactctggacccacatactcgctgggaatactgcgcaattaagacttgcgcggacaatacgatgaacgacactgatgtgccacttgagactaccgaatgtatccaaggacaaggagagggatacaggggaaccgtgaacaccatttggaacggaatcccttgccaacgctgggactcacaatacccccatgaacacgatatgactcccgaaaactttaagtgcaaggacctgcgcgaaaactactgccggaaccctgatggatcggaatcaccttggtgctttactaccgaccctaacataagagtgggttactgttctcagattcctaactgtgatatgagccatggtcaggattgttaccgcggcaacggtaagaattacatgggcaatctgtcgcagaccagatccggacttacgtgttcgatgtgggataagaatatggaggaccttcaccgacacattttctgggaaccagacgcgagcaagctgaatgagaactactgtaggaaccccgatgacgatgcgcacggtccttggtgctacaccggaaaccctttgattccatgggactactgtccaatctcgcgctgtgaaggcgatactaccccaactatcgtcaatctggaccatcctgtgattagctgtgcaaagactaagcaactgcgcgtcgtgaatgggatccctaccagaacgaacattgggtggatggtgtcactgcggtaccgtaacaagcatatttgtggtggttcgctcattaaggagagctgggtgctgaccgcgaggcaatgctttccttcgagagatcttaaggactacgaagcatggctcggaatacatgatgtgcacggcaggggagatgaaaagtgtaaacaagtcctcaacgtctcgcagctggtctacggacctgagggatcggatcttgtgcttatgaagttggcaaggccggcagtgttggacgactttgtctcgactattgatctcccaaactacggctgtaccatcccagagaaaacgtcatgtagcgtgtacggttggggctacactggacttatcaactacgacgggctccttcgagtcgcacatctctatatcatggggaatgaaaagtgctcccagcatcaccgcggcaaggtgacgcttaacgaatcggagatttgtgcaggagccgaaaagatcggttccggaccatgcgagggagactacggggggcctctggtctgtgagcagcataagatgagaatggtgctcggtgtcatcgtccctggtagagggtgtgccatccctaaccgtccaggtattttcgtgcgggtggcatactatgctaagtggattcataagattattcttacctacaaggtgcctcagtcg

SEQ ID NO: 13481 - DNA, 2184 bp, Artificial Sequence
  derived and/or modified sequence
atgtgggtcaccaagttgcttccggccctcctgttacaacacgttctcctgcatctattactcctgcccatcgcgatcccatacgccgaaggacaaagaaagagaagaaatacgatccatgagtttaagaaatcagcaaagacaactttgattaagatagatccggcgctgaagatcaaaacgaagaaggtcaataccgctgatcaatgcgcaaatagatgtacccgcaataagggattaccttttacatgcaaggccttcgtgtttgataaggccaggaagcagtgtctctggtttcccttcaattccatgtctagcggggtaaaaaaagagttcggtcatgagtttgatctttatgagaacaaggattacatccgaaactgtatcattggtaaaggtagatcgtacaaggggaccgtgagtatcacaaagagtggaataaaatgccagccctggagttccatgataccccacgaacattcttttctcccctctagctaccgtggcaaagatttacaggagaactactgtagaaacccgcggggggaggagggggggccgtggtgcttcacgtcgaaccccgaggtgagatatgaagtgtgtgacatcccacagtgctctgaggtggagtgcatgacctgtaatggcgagtcataccgaggcttgatggatcacaccgagtctggcaagatttgtcagcggtgggaccaccaaactccccataggcacaagtttctgccagaaaggtatcctgataaaggattcgacgacaactattgcagaaaccccgatgggcaacctcgaccctggtgttacactctagatcctcacacacggtgggaatactgcgccattaaaacatgtgccgacaacactatgaatgatacagacgttcccctggagacaaccgaatgcattcaggggcaaggcgagggatatcgagggaccgtaaataccatatggaacggaattccatgccagagatgggattcccagtaccctcatgaacatgacatgacccctgaaaatttcaaatgtaaggacctgagggaaaactactgccgcaatcccgatggatctgagagcccatggtgtttcactacagatcctaatatcagagtagggtattgttctcaaatcccgaactgcgatatgagccatggacaggattgttaccgggggaatgggaaaaactacatgggtaatctctcccagaccagatccggactgacctgctctatgtgggacaagaatatggaagatctgcaccgtcacatcttctgggaaccagacgcctccaagcttaatgaaaattattgtagaaatccagacgacgacgcccacggcccatggtgctatactggcaatcccctcatcccttgggactactgccccatatcaaggtgcgagggtgacactaccccgacaatagtgaacctcgatcacccggtgataagctgtgccaagacgaaacaactccgcgtggtaaatggcattcccaccaggacgaatattgggtggatggtgtccttaaggtatagaaataaacacatatgcgggggatccctgattaaggagtcttgggtactcacagctcgtcagtgctttccctctagggatcttaaggattacgaggcgtggctcggcattcatgacgtccatggcaggggggacgaaaaatgtaagcaggtgctgaacgtctcacagctggtctacgggcccgaaggcagtgatctggtgctgatgaagcttgcaaggccagccgttctcgatgactttgtgagcactattgatctcccaaattacggctgcacaattcccgagaagaccagttgctctgtgtatgggtggggctacacagggcttattaattatgatggactgctgagggtcgctcacctctacattatgggaaatgaaaagtgctctcagcatcatcggggcaaggtcaccctgaatgagagtgaaatatgtgccggagcagagaagataggaagcggcccgtgcgagggagactacgggggccctttagtttgcgagcagcacaagatgcgcatggtactcggagtgatagtccctggacgtggttgtgctattccaaaccgccctggtatattcgttcgagtagcctactatgcgaagtggatccacaaaataatcttaacctacaaggtcccgcagtct

SEQ ID NO: 13482 - DNA, 2184 bp, Artificial Sequence
  derived and/or modified sequence
atgtgggttacaaaattgctgcccgcccttcttcttcagcacgttttgctgcacctgttgttattgccaatcgcaataccttatgccgagggacaaaggaagcgtagaaacaccatacacgaatttaaaaagagtgctaagaccacgttgattaaaatcgatcccgctttaaaaattaaaacaaaaaaagttaacacagcagatcagtgcgcaaaccgctgcacaaggaacaaaggtttgccttttacctgtaaggcttttgtttttgacaaggccagaaaacagtgcctttggtttccatttaactccatgtcttcaggggttaaaaaggaattcgggcatgagttcgatttatacgagaataaagactacattaggaactgcatcattgggaagggtaggtcctataaagggactgtaagtatcactaagtctggtattaagtgtcagccatggtcctcaatgattcctcacgagcattcgttccttccatcctcttatagggggaaggatcttcaggagaattactgtaggaaccctcggggtgaggagggcggtccttggtgtttcaccagcaacccggaggttagatatgaagtttgtgatatacctcaatgttccgaggtggaatgcatgacgtgtaacggggaatcgtatagaggtttaatggatcataccgaaagtggtaagatctgccagaggtgggatcatcagacccctcaccgccacaaattccttccagagaggtatccagataaaggtttcgacgataattattgtagaaatccagatggacaaccacgaccgtggtgttatactctggatccacacactcgatgggagtattgtgctattaagacttgcgctgataatactatgaacgatactgatgtgcccttggaaactactgagtgcattcagggacagggggagggttatagagggactgtcaatacgatttggaatggcatcccatgtcaaaggtgggattcccaatatcctcatgagcatgatatgactcctgaaaatttcaagtgtaaggatttaagggagaattactgcagaaacccagacgggtccgagtccccttggtgcttcacaacggatcctaatatcagggtgggatattgtagtcaaatacccaactgtgatatgagtcacgggcaagattgttataggggcaacggtaagaattatatgggaaatttgtctcaaacacgtagtggccttacttgctctatgtgggataagaatatggaagatctccatcgacatattttctgggaacctgatgcctccaaacttaatgaaaactattgtcgtaatcccgatgatgacgctcacggcccttggtgttataccgggaatccacttatcccctgggattactgtccgatttcgaggtgcgaaggtgataccactcctaccatcgttaacctggaccacccagttatatcttgtgccaagaccaaacagcttagggtagtcaatggtataccgacaagaactaacatcggatggatggtgagtttgaggtatagaaataagcatatctgcggaggatcattgattaaagaaagctgggtgctgaccgcgagacaatgctttccttctcgagatcttaaagactacgaagcctggttgggaatccacgatgtgcatggtaggggggatgagaagtgtaagcaagtgcttaacgtcagccaactcgtgtacggccccgaaggttccgatctcgttttgatgaagctcgctagaccagcagtgcttgacgatttcgtgtcgacaattgaccttcccaactatgggtgtacaatacctgagaaaacaagttgcagcgtttacggttggggctacacaggcttgatcaattatgatggtctgctgcgcgttgcccatttatacattatgggaaatgagaaatgctctcagcatcataggggtaaagtgactctcaatgagagtgaaatctgtgccggtgctgaaaaaatcggctccggaccttgtgaaggagactatggggggccactggtatgtgagcagcacaagatgcgcatggtattgggggtgatcgtgcctggaagaggctgtgccatacctaacagacctggaatctttgtcagagtagcatattatgccaagtggatacataagattatacttacctataaggtgccacagagc

SEQ ID NO: 13483 - DNA, 2184 bp, Artificial Sequence
  derived and/or modified sequence
atgtgggtcaccaagctgttgcccgcccttctgcttcaacacgtcttgctgcacttgctgctccttccaatagcaataccgtacgcagaaggacagcgcaaaagaagaaacactattcacgagttcaagaaatccgcgaaaactactctgataaagatcgatcctgcactgaagataaagacgaagaaagtgaacactgcggatcaatgcgcaaatcggtgtactagaaacaaaggacttccattcacttgtaaggcatttgtgtttgacaaggcgaggaaacaatgtctctggtttccttttaacagcatgtcctcgggggtgaaaaaggaatttggccacgaattcgatctctacgaaaacaaagactacatccgaaactgcataattggcaagggtcggtcatacaagggaaccgtctccatcacgaagtcgggcattaagtgtcagccttggtccagcatgatccctcatgagcattcgtttctgccttcctcgtacagaggaaaggaccttcaagaaaactactgtcgaaaccctcggggtgaggagggaggcccctggtgcttcacctctaatcctgaagtgagatacgaggtgtgtgatataccgcagtgctcggaggtggagtgcatgacttgtaatggggaaagctacagaggcctcatggatcataccgaatccgggaagatttgtcaaaggtgggaccaccagactccacatcgccacaagttcctgcctgagcgataccccgataaggggtttgatgataactactgtcggaaccctgacggacaaccaagaccctggtgttacaccctcgatcctcatacccgctgggaatactgcgcaatcaagacctgcgcggataataccatgaacgatactgatgtgcctcttgagactaccgagtgtatacaagggcaaggtgaaggctatagaggaaccgtgaataccatttggaacgggatcccttgtcagagatgggattctcaatacccccatgaacatgatatgacgcccgagaactttaagtgtaaggatttgcgggagaactactgtagaaacccagatggctcggagtccccttggtgctttactactgatcccaacatccgtgtgggatactgctcccaaataccgaactgtgatatgtcccatggccaagactgctaccgcgggaacgggaagaattacatgggaaatcttagccaaactagaagcggccttacctgttccatgtgggataagaatatggaggacctgcaccgtcatatcttttgggagcctgacgcatccaaactcaacgagaattactgtcgcaatcctgacgatgatgcccatggaccgtggtgttacactggaaatcctctgattccgtgggactactgtccaatttcaaggtgcgagggcgacaccactcctaccatagtcaatctggatcaccctgtgatttcgtgtgccaagaccaagcaactgcgggtggtgaacggaattccaactaggactaacattgggtggatggtatcgctgagatatagaaacaagcatatctgtggcggatccctgataaaagaatcgtgggtgttgaccgcccgacaatgttttccttcacgggaccttaaagactacgaagcatggctggggatacatgatgtgcatgggcgaggggatgaaaagtgcaagcaggtcctcaacgtgagtcaactggtctacggtccagaaggttcggacctggttctgatgaaactggcacgtcctgcagtgctggacgactttgtgagcactattgatttgcccaactacggttgtaccattccagagaaaacctcctgttccgtgtatggttggggctacaccgggctgattaactacgacggcctccttcgggtggctcacctttacattatgggaaacgaaaagtgttcacagcaccatcgcggtaaggtcaccctgaatgagagcgaaatttgcgcaggagcagaaaagattggtagtggtccatgcgaaggagattacggaggacctttggtgtgtgaacagcacaaaatgagaatggtgctgggagtgattgtgcctggacgcggatgtgcaattcctaacagacctggtattttcgtgcgggtcgcgtattacgctaagtggattcataagattattctgacttacaaggtcccacaatca

SEQ ID NO: 13484 - DNA, 2184 bp, Artificial Sequence
  derived and/or modified sequence
atgtgggtaactaagctcttgcccgctctcctgctacagcacgttctcctgcacttgctcctgctacccattgccatcccctacgcggagggacagagaaagcgacgaaacaccatccatgagttcaaaaagtccgccaagaccactctgataaaaatcgaccctgctttgaagattaaaaccaagaaggtcaacacagccgaccaatgtgcaaatcgttgcacccggaacaagggactcccctttacatgtaaggcttttgtttttgataaggcgcgcaagcaatgtctttggttcccttttaattctatgagttctggcgtgaaaaaggagttcggccacgagtttgacctgtacgagaacaaggattatatcaggaattgcatcataggcaagggccgaagctacaagggcactgtgagcattacaaaatccggcataaagtgccagccatggtcttccatgatcccccatgaacactcattcctgccatcctcttaccgtggcaaggatctgcaggagaattactgtagaaatcctcgcggcgaagagggaggaccctggtgctttactagcaatcccgaagttcggtacgaagtctgtgacatccctcagtgctctgaggtcgagtgtatgacatgcaatggcgaaagttatcgggggcttatggaccataccgagtccgggaagatctgccagcgctgggaccatcagaccccgcaccggcataaatttctgccggagaggtatcctgataagggttttgatgataattactgccgcaatcctgatggccagcccaggccctggtgctataccctggacccacacaccagatgggagtactgcgctattaaaacgtgtgccgacaacacaatgaatgatactgacgtaccattggagaccactgagtgcatccaagggcaaggcgagggctatagggggacagtgaataccatctggaatggcattccctgtcaacggtgggacagccagtatcctcacgaacacgacatgactcctgagaactttaaatgcaaagatttgcgtgagaattattgtaggaatcccgatgggagtgagagcccctggtgtttcaccactgatcctaacattagagtgggctactgttctcagataccaaattgcgacatgagccacggccaagattgctacaggggtaacggcaagaattacatgggaaacctatcacaaacgcgcagcgggcttacatgttcaatgtgggacaagaacatggaggacctccacaggcacatattttgggagcccgatgcttccaagctgaacgagaattattgccgtaacccagacgatgacgctcacggaccctggtgctataccggaaacccccttataccttgggactactgtcctatctccagatgtgagggtgacacaactcctaccattgtgaatttggatcaccctgtcattagttgcgcaaagaccaagcaactgcgcgttgtaaacgggatacccacgagaaccaatatcgggtggatggtgtcactgaggtaccggaacaagcatatctgcggtggaagtctgattaaggagtcttgggtgctcacagcccggcaatgcttcccctctagggacctcaaagactacgaagcctggctagggattcatgacgtgcacggccgaggagatgaaaagtgcaaacaggtcctgaacgtttcccagctggtatatgggccagaagggtctgatttggtattgatgaagctggctagaccagcggtcctagacgatttcgtgagtacaatcgacctgccgaattacggatgcacaattccggagaagacgtcctgcagtgtatatggatggggctacactgggcttatcaactatgatgggctgttgagagtagcccacctatatattatgggaaacgagaaatgctcacagcaccataggggcaaagtaacactgaacgaaagtgagatctgcgccggagctgaaaagattggatcaggcccatgcgagggcgactacggcggcccactggtgtgcgagcagcataagatgaggatggttctcggggtcatcgtgccaggtagagggtgtgcaattcctaaccggcctggaatttttgtgagggtcgcctattatgccaaatggatccacaaaatcattctgacttataaagttccccagagc

SEQ ID NO: 13485 - DNA, 2184 bp, Artificial Sequence
  derived and/or modified sequence
atgtgggtgaccaagctcttgccagcactgctgctgcagcacgtgctgctgcatcttctccttctgccaattgctatcccctatgctgagggtcagaggaagcggagaaacacaattcacgagttcaagaagagcgccaagaccacgcttattaaaatcgaccccgctttgaagataaaaacaaagaaggtaaacacagccgaccagtgtgccaaccgctgcacccgcaataagggtctgccgtttacctgcaaggcgtttgtgttcgataaggcgcgcaagcagtgtctctggtttcctttcaactctatgagcagtggggtgaagaaggaattcggccacgagtttgatctctacgaaaataaggattatattcgcaattgcatcataggcaagggaagaagttataagggcactgtctccatcaccaaaagtggaatcaagtgccagccgtggtcctccatgattccccacgagcatagctttctcccttcttcatacaggggtaaagacctccaagagaactattgccggaatcctagaggggaagagggtggcccttggtgtttcacaagtaatccagaggtgcgctacgaggtctgcgatattccacagtgctctgaggtggaatgcatgacatgtaacggtgaatcttatcgaggcctgatggaccatacagaatccgggaagatctgccagagatgggaccaccagacgcctcatcgccataagttccttccagagaggtaccccgataaggggttcgatgacaactactgtcgaaatcctgatgggcagcctagaccttggtgctataccctggatccccatacacgatgggagtattgtgctatcaagacctgcgccgataatacgatgaacgacacggacgttcctctcgagactactgagtgcatccagggacaaggtgaaggctatcgggggaccgtcaacacaatttggaatggcattccgtgccagagatgggactcacagtatcctcacgaacacgacatgacccctgaaaactttaaatgcaaagacctgagggagaactattgccgcaatccagacgggtcagagagcccctggtgtttcaccacagatccaaatattagggtcgggtactgcagtcagatacctaattgcgacatgagccatggacaggattgttatcggggcaatggaaagaactatatgggcaatctgagccagacgcgcagtggacttacttgcagcatgtgggacaaaaatatggaggacttgcaccggcacattttctgggaacccgacgcgtctaaattgaacgaaaattactgccgcaaccccgatgatgatgctcacggtccttggtgctacactggtaacccgctgattccatgggactactgtccaatttccagatgtgagggagacaccacgcccactattgttaatttggatcatcccgtcatttcatgcgctaagaccaagcagctgagggtggtcaacggcattcccactcggacaaacataggatggatggtgagtctcaggtatcgaaataagcacatttgcggtggctcactcattaaggagtcatgggtgcttacagcacgccaatgtttccctagtcgggatctgaaggactatgaggcctggctcgggattcacgatgtgcatggtcgaggcgacgaaaaatgcaagcaggtgttgaacgtgtcacagttggtgtatggcccagagggctccgacctggttctcatgaagctcgccaggcccgcggtcctcgacgacttcgtgtcaacaattgacttgcctaactatggttgcaccatccctgaaaagacttcctgcagcgtctatgggtgggggtatacaggcctgattaactatgacggtctgctgcgcgtagcacacctttatatcatgggcaatgagaagtgtagtcagcaccacaggggaaaggttacacttaatgaatccgaaatttgcgctggagcagaaaagataggcagcggcccgtgtgagggtgactacggcgggccactggtgtgcgagcaacacaagatgcgcatggtgctcggggttatcgtcccaggacgcgggtgcgccatcccaaatcggcccggcattttcgtgcgcgttgcgtactacgccaaatggatccacaaaataattctgacatacaaggttccccagtcc

SEQ ID NO: 13486 - DNA, 2184 bp, Artificial Sequence
  derived and/or modified sequence
atgtgggtgacaaaacttttgcccgctcttctgctgcagcacgttctcttgcatctgttgctcctgccaattgcaattccctacgctgaaggacagagaaaacgacgcaacacaatccacgagtttaaaaagagtgccaaaactactctgattaaaatcgaccctgccctgaaaataaagacgaaaaaagtgaataccgcggatcagtgtgcaaacagatgcacgagaaacaaaggactgcctttcacgtgtaaggcctttgtgttcgacaaggcaagaaaacagtgtctttggtttcctttcaatagcatgtccagtggtgtcaagaaggagttcggtcacgagtttgatctgtacgaaaataaagattatatccggaactgcataattggcaagggaagaagctacaagggcacggtctcgattacgaagagtggcattaagtgccagccttggtcttccatgatcccacacgaacatagcttcctcccgtccagttataggggaaaagacttacaagaaaattactgccgtaatcccaggggtgaggaagggggcccatggtgtttcacctccaacccggaggtgcgctacgaggtgtgtgacattcctcagtgctctgaggtggaatgcatgacctgcaacggcgagagctaccgcgggctaatggaccatacagaatcagggaaaatttgccaacgttgggaccatcagactccccataggcataaatttttacctgagcgataccccgacaaggggtttgatgataattattgcaggaatccagatgggcaaccgcggccttggtgttatacactggatccgcacacccgttgggaatattgtgctatcaaaacttgcgcagacaacactatgaatgataccgatgtgcctttggagaccaccgagtgcatacaaggccagggcgaaggctatcgcgggacagtgaacacgatctggaatgggatcccgtgtcaacggtgggatagccagtacccccacgagcatgacatgaccccagagaacttcaaatgcaaagatctgcgcgaaaactattgtaggaatcccgatggatctgagagtccttggtgctttaccaccgacccgaacatacgagtggggtattgcagccaaatacccaattgcgacatgagtcacggccaggactgttacagggggaatggcaagaactacatgggcaacctgagccagacccgaagtgggctgacctgtagcatgtgggataaaaacatggaggacctgcatcggcatatcttttgggaacctgacgcctcgaaattaaacgagaattactgccggaatccggacgacgatgcccacggtccctggtgctataccgggaatcctctgataccgtgggattactgcccaatctctcggtgtgagggggacaccacacctaccatcgtgaatcttgaccaccccgtaattagctgcgccaaaaccaaacagctaagggttgtgaacggcatcccaactaggacaaacataggctggatggtaagccttagataccgcaacaagcatatctgcggcggcagcctgattaaggaatcatgggtcctgaccgcccgacagtgctttccttcacgagatctgaaggattatgaggcttggttgggaatccacgatgttcacggccggggagatgagaaatgtaagcaggtcctcaatgtctcccagttggtctatgggccggagggcagtgacctggtgctgatgaagcttgcgcgcccagcggttcttgatgatttcgtctcaaccatagatttgcccaactatggctgtacaatcccggagaagaccagctgttctgtgtatgggtggggctacactggcctgatcaattatgatggtttactccgtgtggcccacctgtacattatgggcaacgagaagtgtagccaacatcatcggggaaaggtgactctcaatgaatctgagatctgcgcaggcgctgagaagattggaagcggtccatgtgaaggcgattacggcggcccgcttgtgtgtgagcagcataaaatgaggatggtcctcggagtcatcgtacccggcagagggtgtgccatcccgaacaggccaggaatcttcgtacgcgtagcctattatgcaaagtggatccataaaatcatccttacctataaagtgccccaaagc

SEQ ID NO: 13487 - DNA, 2333 bp, Artificial Sequence
  derived and/or modified sequence
gggaaataagagagaaaagaagagtaagaagaaatataagagccaccatgtgggtgacgaaattgctccctgctcttctgctccagcatgtcttgctccatttgcttctcctgccgatcgccatcccttacgcggaagggcagcggaagcggcgcaacactatccatgagttcaagaagtcggccaagacgaccctcatcaaaattgaccccgcattgaagatcaagacaaagaaagtgaacacagcagatcagtgcgccaacagatgcacgcggaacaaagggcttcctttcacatgtaaagcgtttgtgttcgataaggcgcgcaagcaatgtttgtggttcccctttaactcaatgagctccggagtgaagaaggagtttggacatgagttcgatctttacgagaacaaagattacatccggaattgtatcatcggaaaaggcagatcatacaaaggaacagtgtcgattacaaaatcagggatcaagtgtcaaccgtggtcatcaatgattccgcacgagcattcgttccttccctcctcctatcggggtaaagaccttcaagaaaactactgccggaatccccgaggagaggaaggtgggccctggtgctttacatcaaatccagaggtacgctacgaagtctgtgacatcccgcagtgctcggaagtggagtgtatgacatgcaatggggaaagctacagaggattgatggatcacaccgagtccgggaaaatctgccagaggtgggatcaccaaacaccacacaggcataagttcctccccgaaaggtacccggacaaaggtttcgatgataactactgtaggaatccggacgggcagccgaggccatggtgctacactcttgatcctcatactaggtgggagtattgcgcgattaagacgtgcgcggacaataccatgaatgacacggatgtgccactggaaacaactgagtgcatccaggggcagggagagggctatcgcggtacagtcaatacgatctggaacggcatcccgtgccagagatgggactcccagtacccgcatgaacacgacatgactcccgagaatttcaagtgcaaggatttgcgcgagaattactgtcgaaaccccgatggatcggagtcaccctggtgttttacgactgatcccaatatccgagtaggctattgctcgcaaatcccaaattgcgacatgtcacacggtcaagactgctaccggggaaacggaaagaactatatgggtaacctgtcgcagacgaggtcgggtctgacgtgctccatgtgggacaaaaacatggaggatcttcaccgacacatcttttgggaaccggacgcctccaaactcaacgagaactattgtagaaatcccgacgacgacgcgcatgggccgtggtgttataccggaaatcccttgatcccctgggattactgcccgatctcgcggtgtgaaggagacacgacacctaccattgtgaacttggatcatccggtgatttcatgcgcgaaaacgaagcagctgcgggtggtaaacggtattcccaccagaactaacattgggtggatggtgagcctcagatatagaaacaaacatatctgcggtggctcgcttatcaaggaatcgtgggtcttgactgcaaggcagtgttttcccagccgggatcttaaggactacgaggcgtggctcggtatccatgacgtccacggacgcggagatgaaaagtgcaaacaggtgctcaatgtcagccagctcgtgtatgggcccgagggaagcgatcttgtacttatgaagttggcgcgaccggcggtactggacgactttgtatcgacaattgatttgccgaattatggttgcaccattccggagaaaacgtcctgctcagtctacgggtggggttacacggggctgatcaactatgatgggctccttagggtggcacacttgtatatcatggggaacgagaaatgttcgcagcaccaccgcggtaaagtgacgctgaacgaaagcgaaatctgtgcgggagctgagaagattgggtcaggcccttgtgagggagattacggtgggcccctggtctgtgaacagcacaagatgcgcatggtcttgggagtgattgtaccaggacgcggttgtgccatccctaataggcctggaatcttcgtgcgcgtcgcctattacgccaaatggattcacaagatcatccttacatacaaggtgccccagtcgtgataataggctgccttctgcggggcttgccttctggccatgcccttcttctctcccttgcacctgtacctcttggtctttgaataaagcctgagtaggaag

SEQ ID NO: 13488 - DNA, 5989 bp, Artificial Sequence
  derived and/or modified sequence
gaggaaaggagggggctggaagagagtaaagggctgttgttaaacagtttcttaccgtaagagggagttcagacctagatctttccagttaatcacacaacaaacttagctcatcgcaataaaaagcagctcagagccgactggctcttttaggcactgactccgaacaggattctttcacccaggcatctcctccagagggatccgccagcccgtccagcagcaccatgtgggtgaccaaactcctgccagccctgctgctgcagcatgtcctcctgcatctcctcctgctccccatcgccatcccctatgcagagggacaaaggaaaagaagaaatacaattcatgaattcaaaaaatcagcaaagactaccctaatcaaaatagatccagcactgaagataaaaaccaaaaaagtgaatactgcagaccaatgtgctaatagatgtactaggaataaaggacttccattcacttgcaaggcttttgtttttgataaagcaagaaaacaatgcctctggttccccttcaatagcatgtcaagtggagtgaaaaaagaatttggccatgaatttgacctctatgaaaacaaagactacattagaaactgcatcattggtaaaggacgcagctacaagggaacagtatctatcactaagagtggcatcaaatgtcagccctggagttccatgataccacacgaacacagctttttgccttcgagctatcggggtaaagacctacaggaaaactactgtcgaaatcctcgaggggaagaagggggaccctggtgtttcacaagcaatccagaggtacgctacgaagtctgtgacattcctcagtgttcagaagttgaatgcatgacctgcaatggggagagttatcgaggtctcatggatcatacagaatcaggcaagatttgtcagcgctgggatcatcagacaccacaccggcacaaattcttgcctgaaagatatcccgacaagggctttgatgataattattgccgcaatcccgatggccagccgaggccatggtgctatactcttgaccctcacacccgctgggagtactgtgcaattaaaacatgcgctgacaatactatgaatgacactgatgttcctttggaaacaactgaatgcatccaaggtcaaggagaaggctacaggggcactgtcaataccatttggaatggaattccatgtcagcgttgggattctcagtatcctcacgagcatgacatgactcctgaaaatttcaagtgcaaggacctacgagaaaattactgccgaaatccagatgggtctgaatcaccctggtgttttaccactgatccaaacatccgagttggctactgctcccaaattccaaactgtgatatgtcacatggacaagattgttatcgtgggaatggcaaaaattatatgggcaacttatcccaaacaagatctggactaacatgttcaatgtgggacaagaacatggaagacttacatcgtcatatcttctgggaaccagatgcaagtaagctgaatgagaattactgccgaaatccagatgatgatgctcatggaccctggtgctacacgggaaatccactcattccttgggattattgccctatttctcgttgtgaaggtgataccacacctacaatagtcaatttagaccatcccgtaatatcttgtgccaaaacgaaacaattgcgagttgtaaatgggattccaacacgaacaaacataggatggatggttagtttgagatacagaaataaacatatctgcggaggatcattgataaaggagagttgggttcttactgcacgacagtgtttcccttctcgagacttgaaagattatgaagcttggcttggaattcatgatgtccacggaagaggagatgagaaatgcaaacaggttctcaatgtttcccagctggtatatggccctgaaggatcagatctggttttaatgaagcttgccaggcctgctgtcctggatgattttgttagtacgattgatttacctaattatggatgcacaattcctgaaaagaccagttgcagtgtttatggctggggctacactggattgatcaactatgatggcctattacgagtggcacatctctatataatgggaaatgagaaatgcagccagcatcatcgagggaaggtgactctgaatgagtctgaaatatgtgctggggctgaaaagattggatcaggaccatgtgagggggattatggtggcccacttgtttgtgagcaacataaaatgagaatggttcttggtgtcattgttcctggtcgtggatgtgccattccaaatcgtcctggtatttttgtccgagtagcatattatgcaaaatggatacacaaaattattttaacatataaggtaccacagtcatagctgaagtaagtgtgtctgaagcacccaccaatacaactgtcttttacatgaagatttcagagaatgtggaatttaaaatgtcacttacaacaatcctaagacaactactggagagtcatgtttgttgaaattctcattaatgtttatgggtgttttctgttgttttgtttgtcagtgttattttgtcaatgttgaagtgaattaaggtacatgcaagtgtaataacatatctcctgaagatacttgaatggattaaaaaaacacacaggtatatttgctggatgataaagatttcatgggaaaaaaaatcaattaatctgtctaagctgctttctgatgttggtttcttaataatgagtaaaccacaaattaaatgttattttaacctcaccaaaacaatttataccttgtgtccctaaattgtagccctatattaaattatattacatttcatatgctatatgttatagttcattcatttctcttcaccatgtatcctgcaatactggtacacgaacacactttttacaaaaccacatacccatgtacacatgcctaggtacacatgtgcatgcactacagtttaaattatggtgtacctaatgtaacccctaaatattttagaagtatgtacctatagttttacctcaaaaaaaccagaaatctctaaagaccagtagaaatattaaaaaatgatgcaagatcaaaatgattagctaattctccatacataatctgcagatgatcttctttggttggcatttcaggtgtggccatcacccagagttaaataacacctaatctaggtgtttacatgtattcattatcctagttatttcatgtagtttctaattcttaaaggaaagagggtaatagttctatttgtgtaatttgtttcctccaaacttaaggccacttatttacacaagatatttgtagatctattttcctaaagcatttcttaagtgctcagatcagtatctaattgaagaagtttaaaagtgttttggtcattaaaaatgtacttaaataggttaaatctaagccttgctgctgtgattggcttctagctcactgcctttaaattttaaaaaatttaagaggaaaatttccaagtctccaaagttttataaatacccttcatcaagtcatgcattaaagtatatattggagaaaaaaataaaaatacttttctcaacctggaagattttagcctaataaagcttttttgaagtaaaagacaacttgtaaaaggaaagaaactagtttgtctcaactctgtattcatttattttttttttgaagtagagtggaatctgttgaatcagatattttatcaagatatgtttattttttcttatttcattttacaaagttcactcctaatgccatatgtaacagacatttaaattttgtgttctgtataacagccaaattatcatatttatcattgtatttgtcatgcttagctaaagatcatgtatttgttgagaaatagaataacaaaaagtaataggataggctttgaatttttgcagaaatcttcctgtacaaaacacctttaaaaataattttttgaatggtgtgaatccagtagtcccatttctctgacttagttttcttgagtgatttttatcaaggccaagtccccaaacaattccctaccagctctttagagtactgttcaatctggactaaaatggttttaagtttatggagagcttagtccacagaatatagggcggcgagtccagaaatgcttatacaatttttttttcataataagatatgtgctggcatcaagaaacttaaagtggaagcaaaaagacatccaactagttgctggtctctatcatcttatctgatggtatttctattttccttatataatacaccattttagtaagaactcctagaaatttcaagagcatattgccaaaatataaagtatatttcatagtttcttctggctgaaccagtgaaattttattattgcatattaatgatatttgtaaaacttttataaaaattgtcataattttaaatactcacattttaaaaatacttctttaatgactcttcctctaaatttcctggaaatacagataaagattagctagatacaagatacagctaagtatttagacattttgaggctagtatttttcattttattaaaggctaaaaacaataccaccaataaatcatcaaacaaaccgtacaaagtaattctctctttgggaggctcctttcgtgatagagggacatgggtggaattgacaatgaaacttagatgaacaaggtccatgttattttaggtggtagaacagggtagagtcatgtcattatttgctggtggaagacactatttaccaggtgttctttgctgaataaatcattaaacatttttaaaaatccaacaatccactttattttgtgtcattgacaaaaggatcttttaaatcagaaggtttcaatgcaatttttggtttggctgtttgaataatggttatgtactgttataattgtagacattttctcacgtctaccaggaattgaagtgtaaaactaaaatatttttcataatgcctctgccgtgcagaaggaatgataatccttttgtatacttctttaattttattgtaaaatgtgtaatgacttttacctatatgctgtgggcaggtcctcagtaaaatctattgagtcaatttctagtattaacaggcttttgcttgctatctaagtgtttcaaattatgggaagtgtgagacactggaaggcaagaaaattaacaataatggcatgtgatagcaaaattgtatttcacttattcctgtgaatatttcttgttggtaccaatggtactgtacaaagtgaatgttatagccacaacattctcttgaaaagaacactgtcaagaagtgggaaattgctgtcaggcatttcattgttgtttttaaacttttttaaaagaaatactggttttgcaatatagagatcatgtggtaaagaattttaataagatcttatactaaaaagccttaaatcaatttattgagattcaaaaaatactattataattaattacatcccatacatataggcaaactcatttaaaaaataaaactaattttggtaaaagtacatggcctttgtttttaaaatacataattttaaaataaatcacttgtcatgataaagtccaaaaagaagttatcattcaacattcaactaaggttggagctaagaatttactaatacaaaaaaagttaaaattttttggaccatatatatcttgacagtgtaacttttaagtaggttcatttccatttgcacagaaagtttctgtctttaggaaactgaaaatgaaatactgtggatgctatgactgtttgtcttgtatgtaaataggaaattaataagctgcctattgagtggtatagctgtatgcttacccaaaaaagggaacactgtggttatgacttgtattataaactttctgtagttaataaagttgttatttttataaccatgattatattattattattaataaaatattttatcaaaatgct

SEQ ID NO: 13489 - DNA, 2187 bp, Artificial Sequence
  derived and/or modified sequence
atgtgggtgactaaattactgcctgcgctactgctgcagcatgtcctgcttcacttactgctgctgccaatagcgattccgtacgcggaaggccagaggaagagaaggaataccattcacgagttcaaaaagagcgccaaaacgaccctcatcaagatcgatcctgcattaaagatcaagactaaaaaggtgaacactgcagaccagtgtgcaaatcgttgtacaaggaacaagggccttcccttcacttgtaaggcattcgtgttcgataaagcccgcaagcagtgcttgtggtttccctttaactcaatgtcgtcgggcgttaagaaggagttcgggcacgaatttgatctttacgaaaacaaagattatattcgtaattgcattatcgggaaggggaggtcctacaaaggcacagtgtccataaccaaatccgggattaaatgtcagccctggagttctatgatcccacatgaacattccttcttgccgtcgtcctaccgtggaaaggacctccaggaaaattattgtaggaacccccggggtgaggaaggaggcccgtggtgcttcacctcaaacccagaggtgagatacgaggtatgcgacattccccagtgctccgaagtggagtgtatgacatgtaacggggaaagctacaggggactgatggaccacaccgagtccggcaaaatttgtcagcgatgggatcatcagacccctcacagacataagtttctgcccgagaggtacccagacaaaggattcgatgataactactgcaggaaccctgacgggcaacccagaccgtggtgctatacactcgatccccatacaagatgggagtactgcgccatcaagacctgcgctgataataccatgaatgacacagatgtgcctttggagacaactgaatgcattcaaggccaaggtgaaggttatcgaggaaccgtcaacaccatatggaatggcattccttgccagcggtgggacagtcagtacccacacgaacacgacatgacacccgagaacttcaaatgcaaggatctgcgcgaaaactactgccggaatcccgacggatctgagtctccatggtgtttcaccaccgacccgaacatccgggttggttactgctcccagatcccaaattgcgacatgtcccatggccaggactgttacaggggcaatggcaagaattacatgggaaatctcagccaaactcgttctgggctgacctgttctatgtgggacaagaacatggaggatcttcatcgccacattttctgggaacccgatgcatcaaagctcaatgaaaactactgccggaatccagatgacgacgcgcacggaccctggtgttataccggtaaccccctgatcccctgggactattgccccatatcaaggtgcgaaggcgacactacaccaacaatagtgaatttggaccacccggtgatctcctgtgcgaaaacaaagcaactgagagtggtcaatggtattcccacaaggacaaacattggttggatggtctccctccggtacagaaataagcatatctgcggaggctccttaatcaaggaaagttgggtactgaccgctagacagtgcttcccttcaagggatctgaaagattatgaagcttggctcggcattcacgacgtgcacgggcgcggggatgagaagtgtaagcaggtcctgaacgtgtcccaactcgtatatgggcccgagggcagcgatctggtgctgatgaagctggcgcggcctgcagtgcttgacgactttgtttcaacaatcgatttgcctaattacggttgcactataccggagaagacgagttgctccgtatacggttggggttacacagggctgatcaactatgatggcctgctccgcgtggctcatctctatattatgggcaacgaaaaatgctcacagcaccacaggggtaaggtcactctcaacgagtccgaaatttgcgccggcgccgagaagattgggtcagggccttgtgaaggagattacgggggacccctcgtctgcgagcagcataagatgagaatggtgctgggcgttattgtgcccggtaggggttgtgccattcctaataggccagggatctttgtgcgagtcgcatattacgccaagtggatccacaagatcattttaacttacaaggtccctcaaagctag

SEQ ID NO: 13490 - DNA, 2187 bp, Artificial Sequence
  derived and/or modified sequence
atgtgggtgaccaagctgctgcctgccctgctgctgcagcacgtgctgctgcacctgctgctgctgcccatcgccatcccctatgcagagggccagaggaagagaagaaacaccatccacgagttcaagaagagcgccaagaccaccctcatcaagattgatcctgccctgaagatcaagaccaagaaggtgaacacagctgaccagtgtgccaaccgctgcaccaggaacaagggcctgcccttcacctgcaaggcctttgtgtttgacaaggccaggaagcagtgcctgtggttccccttcaacagcatgagcagcggcgtgaagaaggagtttggccacgagtttgacctgtatgagaacaaggactacatccggaactgcatcatcggcaagggccgcagctacaagggcaccgtgtccatcaccaagagcggcatcaagtgccagccctggagctccatgatcccccatgagcacagcttcctgcccagcagctaccggggcaaggacctgcaggagaactactgcaggaaccccagaggagaggagggcggcccctggtgcttcaccagcaaccctgaggtgcgctatgaggtgtgtgacatcccccagtgcagcgaggtggagtgcatgacctgcaatggagagagctaccggggcctgatggaccacacagagagcggcaagatctgccagcgctgggaccaccagaccccccaccgccacaagttcctgcctgagcgctacccagacaagggctttgatgacaactactgcagaaatccagatggccagccccggccctggtgctacaccctggacccccacacccgctgggagtactgtgccatcaagacctgtgccgacaacaccatgaatgacacagatgtgcccctggagaccacagagtgcatccagggccagggcgagggctaccggggcaccgtgaacaccatctggaatggcatcccctgccagcgctgggacagccagtacccccatgaacatgacatgaccccagagaacttcaagtgcaaggacctgcgggagaactactgcagaaatccagatggcagcgagagcccctggtgcttcaccacagaccccaacatccgggtgggctactgcagccagatccccaactgtgacatgagccacggccaggactgctacagaggaaatggcaagaactacatgggcaacctgagccagaccaggagcggcctgacctgcagcatgtgggacaagaacatggaggacctgcaccgccacatcttctgggagccagatgccagcaagctgaatgaaaactactgcagaaatccagatgatgatgcccacggcccctggtgctacacaggcaaccccctcatcccctgggactactgccccatcagccgctgtgagggggacaccacccccaccatcgtgaacctggaccaccctgtgatcagctgtgccaagaccaagcagctgcgggtggtgaatggcatccccaccaggaccaacatcggctggatggtgtccctgcgctacagaaacaagcacatctgtggcggcagcctcatcaaggagagctgggtgctgacagcccggcagtgcttccccagccgggacctgaaggactatgaggcctggctgggcatccatgatgtgcacggcagaggagatgagaagtgcaagcaggtgctgaatgtgtcccagctggtgtatggccctgagggcagtgacctggtgctgatgaagctggcccggcctgctgtgctggatgactttgtgtccaccatcgacctgcccaactacggctgcaccatccctgagaagaccagctgcagcgtgtatggctggggctacacaggcctcatcaactatgatggcctgctgcgggtggcccacctgtacatcatgggaaatgagaagtgcagccagcaccaccggggcaaggtgaccctgaatgaaagtgagatctgtgccggggctgagaagattggcagcggcccctgtgagggggactatggaggccccctggtgtgtgagcagcacaagatgaggatggtgctgggcgtgattgtgcccggccggggctgtgccatccccaacagacctggcatctttgtgcgggtggcctactatgccaagtggatccacaagatcatcctgacctacaaggtgccccagagctag

SEQ ID NO: 13491 - DNA, 2187 bp, Artificial Sequence
  derived and/or modified sequence
atgtgggtgaccaagctgctgcccgccctgctgctgcagcacgtgctcttgcatctgctgctgctccctattgctataccatacgccgagggccagcggaagaggcgcaacacaatccacgaattcaagaaatccgccaagaccactctgattaagatagatcccgccctcaagatcaaaacaaagaaagtgaacaccgccgaccaatgtgcaaatagatgtacaaggaacaaggggctaccctttacctgcaaagcctttgtgtttgacaaggcaagaaagcagtgtctgtggttccccttcaattcaatgagttctggcgtgaaaaaagagtttggccacgaatttgatctgtacgaaaacaaagactacataaggaattgcatcatagggaaaggccggagttataaagggacagtgagtattaccaaatcagggatcaagtgtcagccttggagcagtatgatccctcatgagcacagtttcctgcccagcagctaccgggggaaagacctccaggagaactattgtcgtaacccgagaggggaggagggagggccttggtgtttcacatccaaccctgaggtccgctacgaagtgtgcgacatccctcagtgtagtgaggtggaatgtatgacctgtaacggcgaaagctaccgcggattaatggatcataccgaaagcggtaagatttgtcagcggtgggaccaccaaacacctcaccgccacaagtttttaccggaacgctaccccgataaggggttcgatgacaattactgccgtaatcctgatggccagcctcgcccttggtgctacaccctcgatccacacacgcgctgggaatattgcgccattaagacttgcgcggacaacaccatgaacgacacagatgtgccccttgagactacagagtgcattcagggacagggcgaggggtaccgggggaccgtgaataccatctggaatgggatcccttgtcagaggtgggattctcaataccctcacgagcatgatatgacgccagagaatttcaagtgcaaggacttacgtgaaaattactgcaggaaccccgacggctccgaaagcccttggtgttttactacggaccccaacatacgcgtcgggtactgtagccagattccaaattgtgacatgtcgcatggacaagattgctacagagggaatgggaaaaactacatggggaacctcagtcagacccgcagcggcttgacctgtagcatgtgggataaaaacatggaggatttacatagacacatcttttgggagcccgatgccagtaagctcaatgagaattactgtaggaatcccgacgatgatgcccacgggccatggtgctacaccggcaatccacttatcccctgggactattgtcctatatcgcgctgcgaaggcgacacaaccccaacaatcgttaatctggaccatcctgtgatcagctgtgctaaaactaaacagctgcgagttgtaaatgggattcccactagaaccaacattgggtggatggtgtcactgcggtatcgtaacaagcatatctgtggagggtccctgattaaagaatcttgggtacttacagcacgacagtgtttccccagtagggacctcaaggactatgaggcatggttgggcattcacgacgtgcatggcaggggcgacgagaaatgcaaacaggtgctgaacgtctcccagcttgtgtacgggcctgagggcagtgacctggtcttaatgaagctggcaagaccggctgtcctggacgacttcgtctccacaatagacctgcccaactacgggtgcacaatcccagaaaaaacctcctgctcagtatatggctggggatataccgggctgatcaattacgatgggcttttgcgggtggctcatttatatatcatggggaatgaaaagtgcagtcaacaccatcgtggcaaagtgactctaaatgagtcagagatctgcgctggtgccgaaaagatcgggtctggaccttgcgaaggtgattacggtgggccgttggtgtgcgaacagcataagatgagaatggtgctcggcgtcattgtcccaggtcgcggttgtgcaatcccaaacaggcccgggatcttcgtgagagtggcctattacgctaagtggatccacaagattatactgacatataaggtgccccaatcctag

SEQ ID NO: 13492 - DNA, 2187 bp, Artificial Sequence
  derived and/or modified sequence
atgtgggttacgaaattgctgcccgctctgctcctccagcatgtcttgttacacttgttgttgttgcccattgccattccctacgccgaaggccaacgcaagcggaggaacacaatacatgagttcaaaaaatctgctaagaccacgctaattaaaattgatcccgcactcaagattaagactaagaaagtaaataccgcagaccaatgcgccaatcgttgtaccagaaataagggcctgccattcacctgtaaagcctttgtatttgacaaagcacgaaaacagtgcctttggttcccgttcaattccatgagcagtggagtgaaaaaagagttcggtcacgaatttgatctgtatgagaacaaggattatatccggaactgtatcatcggcaaaggaagaagttataaggggacagtgtccattacaaagtcaggtatcaaatgtcaaccgtggtcaagtatgattccgcacgagcattcttttcttccaagtagctacagagggaaagacctgcaggaaaactattgccgcaaccccaggggtgaggaaggcggtccctggtgttttaccagcaaccccgaagtcaggtatgaggtgtgcgacatccctcaatgttcagaggtagaatgcatgacatgcaatggcgaatcataccgcggtctcatggaccataccgaatccggcaagatctgtcagagatgggaccatcagacaccccacaggcataaattccttccggaaaggtatccagataagggattcgacgacaactattgtagaaaccctgacggacagccgcgtccatggtgctacaccctggatccccacaccaggtgggagtactgtgcaatcaaaacgtgcgctgacaatacaatgaacgataccgatgttcccctggaaacaactgagtgtatccagggccaaggagaggggtacagaggaactgtcaatactatttggaacggaatcccatgtcagagatgggactctcaatacccgcatgagcatgatatgacacccgaaaattttaagtgtaaagacctccgggaaaactattgcaggaacccagacggatcagaaagcccctggtgtttcacaacagaccctaacatacgagtcggatactgcagtcagattccgaattgcgacatgagccatggtcaggactgttataggggtaatgggaaaaattatatgggaaatctgtcgcagaccagatctggcctgacttgcagtatgtgggataagaacatggaggatttgcaccggcacatcttttgggagcccgatgccagtaagctcaatgagaactattgtcggaatccagacgacgacgctcatggaccctggtgttacactggaaatccattgattccgtgggattactgccctattagtagatgcgagggcgataccactcctaccattgtgaacctggatcatcccgtaattagctgcgcgaaaacaaagcagctaagggtcgttaacgggatccccacccgtacaaacatcggctggatggttagcctgagatataggaacaaacatatctgtggcggtagtttgattaaggagagctgggtgctcaccgccaggcaatgcttcccgtctagagatctcaaagactatgaggcctggttagggatccatgatgtgcatgggcgaggcgacgaaaagtgcaaacaggtcttgaacgtgtctcagctggtatacggccctgagggcagtgatctcgtacttatgaaactggccagaccagctgtcttagatgacttcgtctcaactatcgaccttcccaactacggttgtacaatcccggagaagacttcatgcagcgtatacggttggggctatacgggccttatcaattatgacggacttctcagagtggcacacttgtacatcatgggtaacgagaaatgttcacagcaccaccgaggaaaggttactcttaatgagtcggaaatttgcgctggcgctgagaaaatcgggagcggcccatgtgaaggcgattacggcggtcctttggtgtgcgaacagcacaagatgcggatggtgctcggggtgatcgtccctggtagaggatgcgccattcctaacaggcccggaatctttgtgcgagtggcctattacgccaagtggatccacaagattatcctgacatacaaagtgccacaatcctag

SEQ ID NO: 13493 - DNA, 2187 bp, Artificial Sequence
  derived and/or modified sequence
atgtgggtgaccaagctgctgcccgccctgctgctgcagcacgtgctgctgcacctgctgctgctgcccatcgccatcccctacgccgagggccagagaaagagaagaaacaccatccacgagttcaagaagagcgccaagaccaccctgatcaagatcgaccccgccctgaagatcaagaccaagaaggtgaacaccgccgaccagtgcgccaacagatgcaccagaaacaagggcctgcccttcacctgcaaggccttcgtgttcgacaaggccagaaagcagtgcctgtggttccccttcaacagcatgagcagcggcgtgaagaaggagttcggccacgagttcgacctgtacgagaacaaggactacatcagaaactgcatcatcggcaagggcagaagctacaagggcaccgtgagcatcaccaagagcggcatcaagtgccagccctggagcagcatgatcccccacgagcacagcttcctgcccagcagctacagaggcaaggacctgcaggagaactactgcagaaaccccagaggcgaggagggcggcccctggtgcttcaccagcaaccccgaggtgagatacgaggtgtgcgacatcccccagtgcagcgaggtggagtgcatgacctgcaacggcgagagctacagaggcctgatggaccacaccgagagcggcaagatctgccagagatgggaccaccagaccccccacagacacaagttcctgcccgagagataccccgacaagggcttcgacgacaactactgcagaaaccccgacggccagcccagaccctggtgctacaccctggacccccacaccagatgggagtactgcgccatcaagacctgcgccgacaacaccatgaacgacaccgacgtgcccctggagaccaccgagtgcatccagggccagggcgagggctacagaggcaccgtgaacaccatctggaacggcatcccctgccagagatgggacagccagtacccccacgagcacgacatgacccccgagaacttcaagtgcaaggacctgagagagaactactgcagaaaccccgacggcagcgagagcccctggtgcttcaccaccgaccccaacatcagagtgggctactgcagccagatccccaactgcgacatgagccacggccaggactgctacagaggcaacggcaagaactacatgggcaacctgagccagaccagaagcggcctgacctgcagcatgtgggacaagaacatggaggacctgcacagacacatcttctgggagcccgacgccagcaagctgaacgagaactactgcagaaaccccgacgacgacgcccacggcccctggtgctacaccggcaaccccctgatcccctgggactactgccccatcagcagatgcgagggcgacaccacccccaccatcgtgaacctggaccaccccgtgatcagctgcgccaagaccaagcagctgagagtggtgaacggcatccccaccagaaccaacatcggctggatggtgagcctgagatacagaaacaagcacatctgcggcggcagcctgatcaaggagagctgggtgctgaccgccagacagtgcttccccagcagagacctgaaggactacgaggcctggctgggcatccacgacgtgcacggcagaggcgacgagaagtgcaagcaggtgctgaacgtgagccagctggtgtacggccccgagggcagcgacctggtgctgatgaagctggccagacccgccgtgctggacgacttcgtgagcaccatcgacctgcccaactacggctgcaccatccccgagaagaccagctgcagcgtgtacggctggggctacaccggcctgatcaactacgacggcctgctgagagtggcccacctgtacatcatgggcaacgagaagtgcagccagcaccacagaggcaaggtgaccctgaacgagagcgagatctgcgccggcgccgagaagatcggcagcggcccctgcgagggcgactacggcggccccctggtgtgcgagcagcacaagatgagaatggtgctgggcgtgatcgtgcccggcagaggctgcgccatccccaacagacccggcatcttcgtgagagtggcctactacgccaagtggatccacaagatcatcctgacctacaaggtgccccagagctag

SEQ ID NO: 13494 - RNA, 2333 nt, Artificial Sequence
  derived and/or modified sequence
gggaaauaagagagaaaagaagaguaagaagaaauauaagagccaccaugugggugacgaaauugcucccugcucuucugcuccagcaugucuugcuccauuugcuucuccugccgaucgccaucccuuacgcggaagggcagcggaagcggcgcaacacuauccaugaguucaagaagucggccaagacgacccucaucaaaauugaccccgcauugaagaucaagacaaagaaagugaacacagcagaucagugcgccaacagaugcacgcggaacaaagggcuuccuuucacauguaaagcguuuguguucgauaaggcgcgcaagcaauguuugugguuccccuuuaacucaaugagcuccggagugaagaaggaguuuggacaugaguucgaucuuuacgagaacaaagauuacauccggaauuguaucaucggaaaaggcagaucauacaaaggaacagugucgauuacaaaaucagggaucaagugucaaccguggucaucaaugauuccgcacgagcauucguuccuucccuccuccuaucgggguaaagaccuucaagaaaacuacugccggaauccccgaggagaggaaggugggcccuggugcuuuacaucaaauccagagguacgcuacgaagucugugacaucccgcagugcucggaaguggaguguaugacaugcaauggggaaagcuacagaggauugauggaucacaccgaguccgggaaaaucugccagaggugggaucaccaaacaccacacaggcauaaguuccuccccgaaagguacccggacaaagguuucgaugauaacuacuguaggaauccggacgggcagccgaggccauggugcuacacucuugauccucauacuaggugggaguauugcgcgauuaagacgugcgcggacaauaccaugaaugacacggaugugccacuggaaacaacugagugcauccaggggcagggagagggcuaucgcgguacagucaauacgaucuggaacggcaucccgugccagagaugggacucccaguacccgcaugaacacgacaugacucccgagaauuucaagugcaaggauuugcgcgagaauuacugucgaaaccccgauggaucggagucacccugguguuuuacgacugaucccaauauccgaguaggcuauugcucgcaaaucccaaauugcgacaugucacacggucaagacugcuaccggggaaacggaaagaacuauauggguaaccugucgcagacgaggucgggucugacgugcuccaugugggacaaaaacauggaggaucuucaccgacacaucuuuugggaaccggacgccuccaaacucaacgagaacuauuguagaaaucccgacgacgacgcgcaugggccgugguguuauaccggaaaucccuugauccccugggauuacugcccgaucucgcggugugaaggagacacgacaccuaccauugugaacuuggaucauccggugauuucaugcgcgaaaacgaagcagcugcgggugguaaacgguauucccaccagaacuaacauuggguggauggugagccucagauauagaaacaaacauaucugcgguggcucgcuuaucaaggaaucgugggucuugacugcaaggcaguguuuucccagccgggaucuuaaggacuacgaggcguggcucgguauccaugacguccacggacgcggagaugaaaagugcaaacaggugcucaaugucagccagcucguguaugggcccgagggaagcgaucuuguacuuaugaaguuggcgcgaccggcgguacuggacgacuuuguaucgacaauugauuugccgaauuaugguugcaccauuccggagaaaacguccugcucagucuacgggugggguuacacggggcugaucaacuaugaugggcuccuuaggguggcacacuuguauaucauggggaacgagaaauguucgcagcaccaccgcgguaaagugacgcugaacgaaagcgaaaucugugcgggagcugagaagauugggucaggcccuugugagggagauuacggugggccccuggucugugaacagcacaagaugcgcauggucuugggagugauuguaccaggacgcgguugugccaucccuaauaggccuggaaucuucgugcgcgucgccuauuacgccaaauggauucacaagaucauccuuacauacaaggugccccagucgugauaauaggcugccuucugcggggcuugccuucuggccaugcccuucuucucucccuugcaccuguaccucuuggucuuugaauaaagccugaguaggaag

SEQ ID NO: 13495 - protein, 402 aa, Artificial Sequence [sequence omitted]

SEQ ID NO: 13496 - protein, 387 aa, Artificial Sequence
  derived and/or modified sequence
MQMSPALTCLVLGLALVFGEGSAVHHPPSYVAQASKDRNVVFSPYGVASVLAMLQLTTGGETQQQIQAAMGFKIDDKGMAPALRHLYKELMGPWNKDEISTTDAIFVQRDLKLVQGFMPHFFRLFRSTVKQVDFSEVERARFIINDWVKTHTKGMISNLLGKGAVDQLTRLVLVNALYFNGQWKTPFPDSSTHRRLFHKSDGSTVSVPMMAQTNKFNYTEFTTPDGHYYDILELPYHGDTLSMFIAAPYEKEVPLSALTNILSAQLISHWKGNMTRLPRLLVLPKFSLETEVDLRKPLENLGMTDMFRQFQADFTSLSDQEPLHVAQALQKVKIEVNESGTVASSSTAVIVSARMAPEEIIMDRPFLFVVRHNPTGTVLFMGQVMEP

SEQ ID NO: 13497 - protein, 179 aa, Artificial Sequence
  derived and/or modified sequence
MMAQTNKFNYTEFTTPDGHYYDILELPYHGDTLSMFIAAPYEKEVPLSALTNILSAQLISHWKGNMTRLPRLLVLPKFSLETEVDLRKPLENLGMTDMFRQFQADFTSLSDQEPLHVAQALQKVKIEVNESGTVASSSTAVIVSARMAPEEIIMDRPFLFVVRHNPTGTVLFMGQVMEP

SEQ ID NO: 13498 - DNA, 1209 bp, Artificial Sequence
  derived and/or modified sequence
atgcagatgagccccgccctgacctgcctggtgctgggcctggccctggtgttcggcgagggcagcgccgtgcaccacccccccagctacgtggcccacctggccagcgacttcggcgtgagagtgttccagcaggtggcccaggccagcaaggacagaaacgtggtgttcagcccctacggcgtggccagcgtgctggccatgctgcagctgaccaccggcggcgagacccagcagcagatccaggccgccatgggcttcaagatcgacgacaagggcatggcccccgccctgagacacctgtacaaggagctgatgggcccctggaacaaggacgagatcagcaccaccgacgccatcttcgtgcagagagacctgaagctggtgcagggcttcatgccccacttcttcagactgttcagaagcaccgtgaagcaggtggacttcagcgaggtggagagagccagattcatcatcaacgactgggtgaagacccacaccaagggcatgatcagcaacctgctgggcaagggcgccgtggaccagctgaccagactggtgctggtgaacgccctgtacttcaacggccagtggaagacccccttccccgacagcagcacccacagaagactgttccacaagagcgacggcagcaccgtgagcgtgcccatgatggcccagaccaacaagttcaactacaccgagttcaccacccccgacggccactactacgacatcctggagctgccctaccacggcgacaccctgagcatgttcatcgccgccccctacgagaaggaggtgcccctgagcgccctgaccaacatcctgagcgcccagctgatcagccactggaagggcaacatgaccagactgcccagactgctggtgctgcccaagttcagcctggagaccgaggtggacctgagaaagcccctggagaacctgggcatgaccgacatgttcagacagttccaggccgacttcaccagcctgagcgaccaggagcccctgcacgtggcccaggccctgcagaaggtgaagatcgaggtgaacgagagcggcaccgtggccagcagcagcaccgccgtgatcgtgagcgccagaatggcccccgaggagatcatcatggacagacccttcctgttcgtggtgagacacaaccccaccggcaccgtgctgttcatgggccaggtgatggagccctag

SEQ ID NO: 13499 - DNA, 1209 bp, Artificial Sequence
  derived and/or modified sequence
atgcagatgtctccagctctcacatgcctggttctcgggctcgctctcgtgttcggagagggaagcgctgtccaccacccgcctagctatgtcgcacatctggccagtgactttggagtgcgggtctttcagcaggtggcacaggcctcaaaggataggaatgtggtgttttccccatatggcgtcgccagtgtcctggctatgctgcagctaacaaccgggggggaaacccagcagcagatccaggctgccatgggtttcaaaattgacgataaaggtatggctccagcactcagacacttgtacaaagaactaatgggaccctggaacaaggatgaaatctctacgaccgatgcaatattcgtccaacgggatctgaaactcgtccagggtttcatgccacacttcttcaggctgttcaggtccaccgtgaagcaagttgatttctccgaagtggagagggctcggttcatcataaatgattgggttaagacacacactaagggcatgattagtaatctccttgggaagggcgccgtagatcaactgacacgccttgtactagtgaatgccctgtatttcaacggccagtggaagacccccttcccagatagctctacgcacaggagacttttccacaagtctgatggttcaacagtgtccgtccctatgatggcacagaccaataagttcaattacaccgaatttacaactcctgacgggcactactacgatatcctagaactgccttaccatggggacacactatctatgtttatcgccgcaccatatgaaaaggaggtgcccctctccgctctgaccaacattctgagtgcgcagctcatttcacactggaagggaaatatgacaagattgcctcggctgctggttcttcctaaattcagcctggagaccgaggtggacctgcggaagccacttgagaaccttggaatgacggacatgttccgccagttccaggcagattttactagcctaagcgatcaggaacctctgcatgttgctcaagccctacagaaggtgaagatcgaagttaatgagagtggcaccgtcgcaagcagctcaacggctgttattgtgtccgctaggatggcacctgaggagatcatcatggacagacccttcctgtttgtggttaggcataaccctacaggcacagtccttttcatgggacaagtgatggagccctag

SEQ ID NO: 13500 - DNA, 1209 bp, Artificial Sequence
  derived and/or modified sequence
atgcagatgagccctgccctgacctgcctggtgctgggcctggccctggtgtttggagagggcagcgctgtgcaccaccccccatcctatgtggcccacctggccagtgactttggagtgcgggtcttccagcaggtggcccaggccagcaaggacagaaatgtggtgttcagcccctacggcgtggcctctgtgctggccatgctgcagctgaccactggaggagagacccagcagcagatccaggccgccatgggcttcaagattgatgacaagggcatggccccagccctgcggcacctgtacaaggagctgatgggcccctggaacaaggatgagatcagcaccacagatgccatctttgtgcagagggacctgaagctggtgcagggcttcatgccccacttcttccgcctcttccgcagcacagtgaagcaggtggacttcagcgaggtggagcgggcccgcttcatcatcaatgactgggtgaagacccacaccaagggcatgatcagcaacctgctgggcaaaggagctgtggaccagctgacccggctggtgctggtgaatgccctgtacttcaacggccagtggaagacccccttcccagacagcagcacccacagaagactcttccacaagagtgatggcagcacagtgtctgtgcccatgatggcccagaccaacaagttcaactacacagagttcaccaccccagatggccactactatgacatcctggagctgccctaccacggggacaccctgtccatgttcatcgccgccccctatgagaaggaggtgcccctgagcgccctgaccaacatcctgagcgcccagctgatcagccactggaagggcaacatgacccggctgccccggctgctggtgctgcccaagttcagcctggagacagaggtggacctgaggaagcccctggagaacctgggcatgacagacatgttccggcagttccaggccgacttcaccagcctgagtgaccaggagcccctgcacgtggcccaggccctgcagaaggtgaagattgaggtgaatgaaagtggcaccgtggccagcagcagcacagctgtgattgtgtctgccaggatggcccctgaggagatcatcatggaccggcccttcctgtttgtggtgcgccacaaccccaccggcaccgtgctcttcatgggccaggtgatggagccctag

SEQ ID NO: 13501 - DNA, 1209 bp, Artificial Sequence
  derived and/or modified sequence
atgcagatgagccccgccctgacctgcctggtgctgggcctggccctagtatttggggagggcagcgctgttcatcaccccccatcctacgtggcccacctggcctctgactttggggtgcgggtttttcagcaggtcgcccaggcttctaaggacagaaatgtggtgttttccccttatggggttgcttctgtattagctatgttacagcttacgactggcggggaaactcagcagcagatacaggcagcgatgggcttcaaaatagacgataagggcatggcacccgccctgcgccacctatataaggagctgatgggcccttggaacaaggatgaaatctcgacaactgacgcaatcttcgtgcagcgagatctgaaattggtgcaaggcttcatgccccatttcttccgcctgtttcgatcgacagtgaaacaagtggattttagcgaagtggagagggctcgattcattatcaatgattgggttaaaacccacaccaagggcatgatctctaatctcctgggaaagggggcggtggatcagctgacgcggctcgtgctcgttaacgccctatacttcaacggtcagtggaagaccccttttcccgactcatctacgcaccggcgattgttccataagtccgacggaagcaccgtctcggtccccatgatggcccaaaccaataaattcaattacacagagtttactacgcctgacggacactactatgatatcttagagctcccataccatggggacactctgagtatgttcatcgcggctccatatgaaaaagaagtgcctctgagcgcattgacaaacattctcagcgcacagctgatctcacattggaaagggaatatgactaggctgcctcgtttactcgtcctcccaaaattcagtctcgagacagaagttgatctccgtaaaccattagagaatctgggcatgactgatatgtttagacagtttcaggccgacttcacatcattaagcgaccaggagcctctgcacgtggctcaagccttacagaaagtcaaaattgaagtcaacgaatctggaactgtagctagctcttctacagcagtaatcgtgagtgctcggatggcgcccgaagaaattatcatggataggcctttcttatttgtcgtacgccacaaccctaccggcacagtgctcttcatgggccaagtgatggagccttag

SEQ ID NO: 13502 - DNA, 1209 bp, Artificial Sequence
  derived and/or modified sequence
atgcagatgagtcctgccctgacctgcctggtactcggattggccctcgtgtttggtgaaggatctgctgttcaccaccctccgagctacgttgcccatctggcgagcgacttcggggtgcgggtcttccagcaggtagcccaggcttccaaggaccggaacgttgtattctctccctacggcgtagccagcgtcctggccatgctacagctgacaacaggaggggagacacagcagcaaatacaggctgctatgggatttaagatagacgataaagggatggctccagctctgcggcatttatataaggagttaatgggcccttggaataaagatgagatttctaccactgacgcaatatttgtacagcgggacttgaagcttgttcagggattcatgccacactttttccgcttattccggagtaccgtcaaacaggtagacttcagcgaggtagaacgagcacgatttattatcaatgactgggtgaagacccacacgaagggaatgatttccaacctcctcggcaagggagcagtggaccagctgaccagactagttctggttaacgccttgtattttaatggccagtggaagactcctttcccagacagcagtactcacagacgattgtttcataaaagtgatggatccacagtttccgtgcctatgatggcccagaccaacaaatttaattacacagaatttactacccccgacggccactactatgacattctagagctcccctaccacggggataccctcagcatgttcatcgctgccccatacgaaaaggaagtgccactcagcgctctgaccaacatccttagcgcgcaactgatctcacactggaaaggtaacatgacacgtctgccacgcctcctggtgctacctaagttcagccttgagacagaggttgacctgaggaagccattagaaaatttgggcatgacagacatgttccgacaatttcaggcagattttacctcactcagtgaccaggagcccctgcatgtcgctcaggctctacagaaggtgaaaatagaggtgaatgagagcgggaccgtggcttcatcaagtaccgctgtcattgtgagtgccagaatggccccagaggaaatcatcatggacagaccattcttattcgtggttcgccacaaccctaccgggactgtactgttcatgggtcaggtgatggaaccttag

SEQ ID NO: 13503 - DNA, 1164 bp, Artificial Sequence
  derived and/or modified sequence
atgcagatgagccccgccctgacctgcctggtgctgggcctggccctggtgttcggcgagggcagcgccgtgcaccacccccccagctacgtggcccaggccagcaaggacagaaacgtggtgttcagcccctacggcgtggccagcgtgctggccatgctgcagctgaccaccggcggcgagacccagcagcagatccaggccgccatgggcttcaagatcgacgacaagggcatggcccccgccctgagacacctgtacaaggagctgatgggcccctggaacaaggacgagatcagcaccaccgacgccatcttcgtgcagagagacctgaagctggtgcagggcttcatgccccacttcttcagactgttcagaagcaccgtgaagcaggtggacttcagcgaggtggagagagccagattcatcatcaacgactgggtgaagacccacaccaagggcatgatcagcaacctgctgggcaagggcgccgtggaccagctgaccagactggtgctggtgaacgccctgtacttcaacggccagtggaagacccccttccccgacagcagcacccacagaagactgttccacaagagcgacggcagcaccgtgagcgtgcccatgatggcccagaccaacaagttcaactacaccgagttcaccacccccgacggccactactacgacatcctggagctgccctaccacggcgacaccctgagcatgttcatcgccgccccctacgagaaggaggtgcccctgagcgccctgaccaacatcctgagcgcccagctgatcagccactggaagggcaacatgaccagactgcccagactgctggtgctgcccaagttcagcctggagaccgaggtggacctgagaaagcccctggagaacctgggcatgaccgacatgttcagacagttccaggccgacttcaccagcctgagcgaccaggagcccctgcacgtggcccaggccctgcagaaggtgaagatcgaggtgaacgagagcggcaccgtggccagcagcagcaccgccgtgatcgtgagcgccagaatggcccccgaggagatcatcatggacagacccttcctgttcgtggtgagacacaaccccaccggcaccgtgctgttcatgggccaggtgatggagccctag

SEQ ID NO: 13504 - DNA, 540 bp, Artificial Sequence
  derived and/or modified sequence
atgatggcccagaccaacaagttcaactacaccgagttcaccacccccgacggccactactacgacatcctggagctgccctaccacggcgacaccctgagcatgttcatcgccgccccctacgagaaggaggtgcccctgagcgccctgaccaacatcctgagcgcccagctgatcagccactggaagggcaacatgaccagactgcccagactgctggtgctgcccaagttcagcctggagaccgaggtggacctgagaaagcccctggagaacctgggcatgaccgacatgttcagacagttccaggccgacttcaccagcctgagcgaccaggagcccctgcacgtggcccaggccctgcagaaggtgaagatcgaggtgaacgagagcggcaccgtggccagcagcagcaccgccgtgatcgtgagcgccagaatggcccccgaggagatcatcatggacagacccttcctgttcgtggtgagacacaaccccaccggcaccgtgctgttcatgggccaggtgatggagccctag

SEQ ID NO: 13505 - DNA, 1164 bp, Artificial Sequence
  derived and/or modified sequence
atgcagatgagtccagcattaacctgccttgttctaggactggccctggtgttcggtgagggctcagctgttcaccatccacccagctatgtagcgcaggcctcaaaagaccggaatgttgtttttagcccatatggcgtggcatccgtgcttgcaatgctacagttgacaacaggcggagaaacccagcagcagattcaggccgccatgggctttaaaattgatgataagggcatggctcccgccctccgacatctgtacaaagaactgatgggcccgtggaataaagacgagatctcaacaactgatgctatcttcgtccagagagacctaaagctggtgcaaggttttatgccgcatttctttcgcctgttcaggtcaacagtcaaacaggtggactttagtgaggtggaacgggcgaggttcattattaatgactgggtgaagactcatactaaaggcatgatatccaatctgctcggaaagggagcagtggaccaactcacgagactggtcctggtaaacgccctctattttaatggacagtggaaaacacctttccccgatagctctacccaccgcagactgtttcataagtctgatgggagcactgttagtgtgcctatgatggcccagacaaacaagtttaattacaccgaattcactactcccgacggacattactacgacattttggagttgccctaccacggtgatacattgtctatgttcatagcagcaccctacgaaaaagaggttcctctatccgccctcactaacattctctccgcacagctcataagccactggaagggtaacatgacaagactcccgcgactgctagtattaccgaagttctcgctggagaccgaagtcgatctacggaagccattggagaatctgggaatgaccgacatgtttcgccagtttcaagcggattttacatccttatctgaccaggagcccctccatgttgcccaggcattgcagaaagtcaagattgaggtgaacgaatctggaaccgtcgcaagttccagtaccgcagttattgtatccgcgcggatggcccccgaagagatcatcatggataggccgttcctgttcgttgtccggcataacccaacaggcacagtcctgtttatgggacaggtgatggagccttag

SEQ ID NO: 13506 - DNA, 540 bp, Artificial Sequence
  derived and/or modified sequence
atgatggcccagaccaacaaatttaattacaccgaatttacaacccccgacggtcactactatgatattctggagttgccctaccatggggatacgctgagtatgtttatagcagctccctacgaaaaagaagttcccctgagcgcgctcactaatatactgtctgctcagctcatctctcactggaagggtaacatgacccggttgccaagactcctagtgttacccaagtttagtttagaaacggaagtagacctgcgaaaacccctggagaatttggggatgaccgatatgttccggcagtttcaggccgacttcacatccctaagcgaccaagagccattacatgtggcccaagcccttcagaaggttaaaattgaggttaacgagagtggtactgtggcctcttcgtccacagccgttatcgtgagcgctcgcatggcaccagaggagattattatggaccgcccctttctgttcgtagtacgtcacaacccgacaggcacggtgctgtttatgggccaggttatggaaccatag

SEQ ID NO: 13507 - DNA, 1164 bp, Artificial Sequence
  derived and/or modified sequence
atgcagatgagccctgccctgacctgcctggtgctgggcctggccctggtgtttggagagggcagcgctgtgcaccaccccccatcctatgtggcccaggccagcaaggacagaaatgtggtgttcagcccctatggagtggcctctgtgctggccatgctgcagctgaccaccggcggggagacccagcagcagatccaggccgccatgggcttcaagattgatgacaagggcatggccccagccctgcggcacctgtacaaggagctgatgggcccctggaacaaggatgagatcagcaccacagatgccatctttgtgcagagggacctgaagctggtgcagggcttcatgccccacttcttccgcctcttccgcagcacagtgaagcaggtggacttcagcgaggtggagcgggcccgcttcatcatcaatgactgggtgaagacccacaccaagggcatgatcagcaacctgctgggcaaaggagctgtggaccagctgacccggctggtgctggtgaatgccctgtacttcaacggccagtggaagacccccttcccagacagcagcacccaccggcggctcttccacaagagtgatggcagcacagtgtctgtgcccatgatggcccagaccaacaagttcaactacacagagttcaccaccccagatggccactactatgacatcctggagctgccctaccatggagacaccctgtccatgtttattgctgccccctatgagaaggaggtgcccctgagcgccctgaccaacatcctgagcgcccagctgatcagccactggaagggcaacatgacccggctgccccggctgctggtgctgcccaagttcagcctggagacagaggtggacctgaggaagcccctggagaacctgggcatgacagacatgttccggcagttccaggccgacttcaccagcctgagtgaccaggagcccctgcacgtggcccaggccctgcagaaggtgaagattgaggtgaatgaaagtggcaccgtggccagcagcagcacagctgtgattgtgtctgccaggatggcccctgaggagatcatcatggaccggcccttcctgtttgtggtgcgccacaaccccactggaacagtgctcttcatgggccaggtgatggagccctag

SEQ ID NO: 13508 - DNA, 540 bp, Artificial Sequence
  derived and/or modified sequence
atgatggcccagaccaacaagttcaactacacagagttcaccaccccagatggccactactatgacatcctggagctgccctaccatggagacaccctgtccatgtttattgctgccccctatgagaaggaggtgcccctgagcgccctgaccaacatcctgagcgcccagctgatcagccactggaagggcaacatgacccggctgccccggctgctggtgctgcccaagttcagcctggagacagaggtggacctgaggaagcccctggagaacctgggcatgacagacatgttccggcagttccaggccgacttcaccagcctgagtgaccaggagcccctgcacgtggcccaggccctgcagaaggtgaagattgaggtgaatgaaagtggcaccgtggccagcagcagcacagctgtgattgtgtctgccaggatggcccctgaggagatcatcatggaccggcccttcctgtttgtggtgcgccacaaccccactggaacagtgctcttcatgggccaggtgatggagccctag

SEQ ID NO: 13509 - DNA, 1164 bp, Artificial Sequence
  derived and/or modified sequence
atgcagatgagccccgccctgacctgcctggtgctgggcctggccctggtgttcggtgagggaagcgccgtgcaccacccaccctcttatgtggcacaggcaagcaaggaccggaacgttgtattttccccatacggagtggcatccgtcctggcgatgctgcagctgaccaccggtggagaaacccagcaacagatccaggccgccatgggctttaaaatagatgacaaagggatggccccggcccttcgacacctgtataaggagcttatgggcccatggaataaggatgaaatctccaccacggacgcgatttttgttcagcgagaccttaagctagtacaaggtttcatgccccatttctttagactgtttagatcaaccgtgaagcaagtggacttttctgaggtggaacgggcgagattcatcataaacgactgggtcaagacccacactaaagggatgatatccaatctgctcggcaaaggagcagtggatcaattgaccaggttggttttagtgaacgccttgtacttcaatggacagtggaagacacccttccccgacagtagcacccatcgcaggctgttccacaaaagcgacggttccacggtgagcgttccgatgatggcacagactaataagttcaactatacagagtttaccactccagacggccattattatgacatcttggaactcccataccatggggacacactaagcatgttcatcgctgccccatatgagaaagaggtccccctatctgccttaactaacatcctttccgcacagttaatttcacactggaagggcaacatgactagactacctcggctgctggtactcccaaagttttcccttgaaactgaagtcgatttacggaagccacttgaaaacttggggatgacagatatgttccggcagtttcaggcagattttacatcgctgtccgatcaagagccactgcacgtcgcccaggcccttcagaaagtgaagatcgaagttaatgagtcgggcacagtggcaagttcttccaccgccgtaattgtctcagctaggatggctccagaagaaatcatcatggacagaccctttcttttcgtcgtgcggcataaccctaccggtaccgtactgttcatggggcaagttatggagccatag

SEQ ID NO: 13510 - DNA, 540 bp, Artificial Sequence
  derived and/or modified sequence
atgatggcccagaccaacaagttcaactacaccgagttcaccacccccgatgggcattattacgacattctggagctgccctatcacggcgataccctgtccatgtttatcgctgcaccatacgagaaagaggtgccgctctctgccttaaccaacattctgtccgcacagctgatatcacattggaagggcaacatgactcgtttacctaggctgctggtgctaccaaagttttcacttgaaactgaagtcgatctgcggaagcctcttgaaaacctgggcatgactgatatgtttcgacagtttcaggcagactttacgagcttgtcagaccaggagcctctgcacgtggcccaggctcttcaaaaagtgaaaatcgaggtaaatgagtcgggtacagttgcatcgagttccacagcagtaattgtgtcagcccggatggcgccagaggagattattatggaccgcccattccttttcgtcgttcgccacaacccaaccgggaccgtgctttttatggggcaggtgatggagccctag

SEQ ID NO: 13511 - DNA, 1164 bp, Artificial Sequence
  derived and/or modified sequence
atgcaaatgagccctgccctcacatgccttgtcttggggctggccctggtgttcggagaagggtccgctgttcatcaccctcctagctacgttgcgcaggcgagcaaggatagaaatgtggtcttctcaccttatggcgtggcgagcgtgttagccatgttacagctcactaccggcggagaaacacaacagcaaattcaggcggcaatgggctttaaaatcgacgataaggggatggccccagcgctaaggcatctgtacaaggagttgatgggcccttggaacaaggatgaaatctcaaccacagatgccattttcgtgcagcgggacttaaagctggttcaagggttcatgcctcattttttcagactgttccggtccactgtcaagcaagtggattttagtgaggttgaacgggctaggtttattataaacgattgggtaaagacacacactaaaggtatgatttctaatctcttaggcaagggagccgtcgaccagttgaccagactggtcctggtgaacgcgttatattttaacgggcagtggaaaacgccctttccagactctagtacccacagacggttgtttcacaaatccgacggctccaccgtgagcgtgcctatgatggcccagaccaacaaattcaactataccgaattcacaacgcctgatggacattattacgacatcctcgaacttccttatcacggggacactttgtcaatgtttatcgccgcaccttacgagaaggaagttcctcttagtgcactcaccaacatcctaagtgcccaactgattagccactggaaggggaacatgacgcgcctccctcggcttctcgttctgcccaagttctctctggagacagaagtggatctccggaagccgctagagaacctgggcatgactgatatgttccgccaatttcaggccgatttcacctcattgtccgaccaggaaccccttcatgtggcccaggccctccagaaggtgaagatcgaagtgaacgagtcagggactgttgccagtagttctactgccgttatcgtgagcgctcggatggccccagaagaaatcatcatggataggccatttctcttcgtggtgaggcataatccgacgggaacagttctctttatgggccaggttatggaaccttag

SEQ ID NO: 13512 - DNA, 540 bp, Artificial Sequence
  derived and/or modified sequence
atgatggcacagaccaacaagttcaattatacagagtttaccacacctgatggccactattatgatatactggagcttccttatcacggtgataccttgtcgatgtttatcgctgcaccctatgagaaagaggtacctctctctgcactgacaaatatccttagcgctcagctcattagccattggaaaggaaacatgactcggctcccgaggctgcttgtgttacccaaattctctctggagactgaagtagacctgcgcaagcctcttgaaaacctgggcatgactgacatgtttcgccaatttcaagccgactttacctccctgtccgaccaagaacccttacatgttgcccaggccctgcagaaagtgaaaattgaggtcaatgagagcggcacagtggccagctcctcaactgctgtcattgtatctgcgcgaatggcacccgaggagatcataatggataggcctttcctgttcgtcgtgcgtcacaatcccacagggacagtcctcttcatggggcaggtgatggagccttag

SEQ ID NO: 13513 - DNA, 3190 bp, Artificial Sequence
  derived and/or modified sequence
ggcccacagaggagcacagctgtgtttggctgcagggccaagagcgctgtcaagaagacccacacgcccccctccagcagctgaattcctgcagctcagcagccgccgccagagcaggacgaaccgccaatcgcaaggcacctctgagaacttcaggatgcagatgtctccagccctcacctgcctagtcctgggcctggcccttgtctttggtgaagggtctgctgtgcaccatcccccatcctacgtggcccacctggcctcagacttcggggtgagggtgtttcagcaggtggcgcaggcctccaaggaccgcaacgtggttttctcaccctatggggtggcctcggtgttggccatgctccagctgacaacaggaggagaaacccagcagcagattcaagcagctatgggattcaagattgatgacaagggcatggcccccgccctccggcatctgtacaaggagctcatggggccatggaacaaggatgagatcagcaccacagacgcgatcttcgtccagcgggatctgaagctggtccagggcttcatgccccacttcttcaggctgttccggagcacggtcaagcaagtggacttttcagaggtggagagagccagattcatcatcaatgactgggtgaagacacacacaaaaggtatgatcagcaacttgcttgggaaaggagccgtggaccagctgacacggctggtgctggtgaatgccctctacttcaacggccagtggaagactcccttccccgactccagcacccaccgccgcctcttccacaaatcagacggcagcactgtctctgtgcccatgatggctcagaccaacaagttcaactatactgagttcaccacgcccgatggccattactacgacatcctggaactgccctaccacggggacaccctcagcatgttcattgctgccccttatgaaaaagaggtgcctctctctgccctcaccaacattctgagtgcccagctcatcagccactggaaaggcaacatgaccaggctgccccgcctcctggttctgcccaagttctccctggagactgaagtcgacctcaggaagcccctagagaacctgggaatgaccgacatgttcagacagtttcaggctgacttcacgagtctttcagaccaagagcctctccacgtcgcgcaggcgctgcagaaagtgaagatcgaggtgaacgagagtggcacggtggcctcctcatccacagctgtcatagtctcagcccgcatggcccccgaggagatcatcatggacagacccttcctctttgtggtccggcacaaccccacaggaacagtccttttcatgggccaagtgatggaaccctgaccctggggaaagacgccttcatctgggacaaaactggagatgcatcgggaaagaagaaactccgaagaaaagaattttagtgttaatgactctttctgaaggaagagaagacatttgccttttgttaaaagatggtaaaccagatctgtctccaagaccttggcctctccttggaggacctttaggtcaaactccctagtctccacctgagaccctgggagagaagtttgaagcacaactcccttaaggtctccaaaccagacggtgacgcctgcgggaccatctggggcacctgcttccacccgtctctctgcccactcgggtctgcagacctggttcccactgaggccctttgcaggatggaactacggggcttacaggagcttttgtgtgcctggtagaaactatttctgttccagtcacattgccatcactcttgtactgcctgccaccgcggaggaggctggtgacaggccaaaggccagtggaagaaacaccctttcatctcagagtccactgtggcactggccacccctccccagtacaggggtgctgcaggtggcagagtgaatgtcccccatcatgtggcccaactctcctggcctggccatctccctccccagaaacagtgtgcatgggttattttggagtgtaggtgacttgtttactcattgaagcagatttctgcttccttttatttttataggaatagaggaagaaatgtcagatgcgtgcccagctcttcaccccccaatctcttggtggggaggggtgtacctaaatatttatcatatccttgcccttgagtgcttgttagagagaaagagaactactaaggaaaataatattatttaaactcgctcctagtgtttctttgtggtctgtgtcaccgtatctcaggaagtccagccacttgactggcacacacccctccggacatccagcgtgacggagcccacactgccaccttgtggccgcctgagaccctcgcgccccccgcgcccctctttttccccttgatggaaattgaccatacaatttcatcctccttcaggggatcaaaaggacggagtggggggacagagactcagatgaggacagagtggtttccaatgtgttcaatagatttaggagcagaaatgcaaggggctgcatgacctaccaggacagaactttccccaattacagggtgactcacagccgcattggtgactcacttcaatgtgtcatttccggctgctgtgtgtgagcagtggacacgtgaggggggggtgggtgagagagacaggcagctcggattcaactaccttagataatatttctgaaaacctaccagccagagggtagggcacaaagatggatgtaatgcactttgggaggccaaggcgggaggattgcttgagcccaggagttcaagaccagcctgggcaacataccaagacccccgtctctttaaaaatatatatattttaaatatacttaaatatatatttctaatatctttaaatatatatatatattttaaagaccaatttatgggagaattgcacacagatgtgaaatgaatgtaatctaatagaagcctaatcagcccaccatgttctccactgaaaaatcctctttctttggggtttttctttctttcttttttgattttgcactggacggtgacgtcagccatgtacaggatccacaggggtggtgtcaaatgctattgaaattgtgttgaattgtatgctttttcacttttgataaataaacatgtaaaaatgtttcaaaaaaataataaaataaataaatacgaagaatatgtcaggacagtca

SEQ ID NO: 13514 - DNA, 3135 bp, Artificial Sequence
  derived and/or modified sequence
aggagcacagctgtgtttggctgcagggccaagagcgctgtcaagaagacccacacgcccccctccagcagctgaattcctgcagctcagcagccgccgccagagcaggacgaaccgccaatcgcaaggcacctctgagaacttcaggatgcagatgtctccagccctcacctgcctagtcctgggcctggcccttgtctttggtgaagggtctgctgtgcaccatcccccatcctacgtggcgcaggcctccaaggaccgcaacgtggttttctcaccctatggggtggcctcggtgttggccatgctccagctgacaacaggaggagaaacccagcagcagattcaagcagctatgggattcaagattgatgacaagggcatggcccccgccctccggcatctgtacaaggagctcatggggccatggaacaaggatgagatcagcaccacagacgcgatcttcgtccagcgggatctgaagctggtccagggcttcatgccccacttcttcaggctgttccggagcacggtcaagcaagtggacttttcagaggtggagagagccagattcatcatcaatgactgggtgaagacacacacaaaaggtatgatcagcaacttgcttgggaaaggagccgtggaccagctgacacggctggtgctggtgaatgccctctacttcaacggccagtggaagactcccttccccgactccagcacccaccgccgcctcttccacaaatcagacggcagcactgtctctgtgcccatgatggctcagaccaacaagttcaactatactgagttcaccacgcccgatggccattactacgacatcctggaactgccctaccacggggacaccctcagcatgttcattgctgccccttatgaaaaagaggtgcctctctctgccctcaccaacattctgagtgcccagctcatcagccactggaaaggcaacatgaccaggctgccccgcctcctggttctgcccaagttctccctggagactgaagtcgacctcaggaagcccctagagaacctgggaatgaccgacatgttcagacagtttcaggctgacttcacgagtctttcagaccaagagcctctccacgtcgcgcaggcgctgcagaaagtgaagatcgaggtgaacgagagtggcacggtggcctcctcatccacagctgtcatagtctcagcccgcatggcccccgaggagatcatcatggacagacccttcctctttgtggtccggcacaaccccacaggaacagtccttttcatgggccaagtgatggaaccctgaccctggggaaagacgccttcatctgggacaaaactggagatgcatcgggaaagaagaaactccgaagaaaagaattttagtgttaatgactctttctgaaggaagagaagacatttgccttttgttaaaagatggtaaaccagatctgtctccaagaccttggcctctccttggaggacctttaggtcaaactccctagtctccacctgagaccctgggagagaagtttgaagcacaactcccttaaggtctccaaaccagacggtgacgcctgcgggaccatctggggcacctgcttccacccgtctctctgcccactcgggtctgcagacctggttcccactgaggccctttgcaggatggaactacggggcttacaggagcttttgtgtgcctggtagaaactatttctgttccagtcacattgccatcactcttgtactgcctgccaccgcggaggaggctggtgacaggccaaaggccagtggaagaaacaccctttcatctcagagtccactgtggcactggccacccctccccagtacaggggtgctgcaggtggcagagtgaatgtcccccatcatgtggcccaactctcctggcctggccatctccctccccagaaacagtgtgcatgggttattttggagtgtaggtgacttgtttactcattgaagcagatttctgcttccttttatttttataggaatagaggaagaaatgtcagatgcgtgcccagctcttcaccccccaatctcttggtggggaggggtgtacctaaatatttatcatatccttgcccttgagtgcttgttagagagaaagagaactactaaggaaaataatattatttaaactcgctcctagtgtttctttgtggtctgtgtcaccgtatctcaggaagtccagccacttgactggcacacacccctccggacatccagcgtgacggagcccacactgccaccttgtggccgcctgagaccctcgcgccccccgcgcccctctttttccccttgatggaaattgaccatacaatttcatcctccttcaggggatcaaaaggacggagtggggggacagagactcagatgaggacagagtggtttccaatgtgttcaatagatttaggagcagaaatgcaaggggctgcatgacctaccaggacagaactttccccaattacagggtgactcacagccgcattggtgactcacttcaatgtgtcatttccggctgctgtgtgtgagcagtggacacgtgaggggggggtgggtgagagagacaggcagctcggattcaactaccttagataatatttctgaaaacctaccagccagagggtagggcacaaagatggatgtaatgcactttgggaggccaaggcgggaggattgcttgagcccaggagttcaagaccagcctgggcaacataccaagacccccgtctctttaaaaatatatatattttaaatatacttaaatatatatttctaatatctttaaatatatatatatattttaaagaccaatttatgggagaattgcacacagatgtgaaatgaatgtaatctaatagaagcctaatcagcccaccatgttctccactgaaaaatcctctttctttggggtttttctttctttcttttttgattttgcactggacggtgacgtcagccatgtacaggatccacaggggtggtgtcaaatgctattgaaattgtgttgaattgtatgctttttcacttttgataaataaacatgtaaaaatgtttcaaaaaaataataaaataaataaatacgaagaatatgtcaggacagtc

SEQ ID NO: 13515 - DNA, 1326 bp, Artificial Sequence
  derived and/or modified sequence
cacagctgtgtttggctgcagggccaagagcgctgtcaagaagacccacacgcccccctccagcagctgaattcctgcagctcagcagccgccgcctcttccacaaatcagacggcagcactgtctctgtgcccatgatggctcagaccaacaagttcaactatactgagttcaccacgcccgatggccattactacgacatcctggaactgccctaccacggggacaccctcagcatgttcattgctgccccttatgaaaaagaggtgcctctctctgccctcaccaacattctgagtgcccagctcatcagccactggaaaggcaacatgaccaggctgccccgcctcctggttctgcccaagttctccctggagactgaagtcgacctcaggaagcccctagagaacctgggaatgaccgacatgttcagacagtttcaggctgacttcacgagtctttcagaccaagagcctctccacgtcgcgcaggcgctgcagaaagtgaagatcgaggtgaacgagagtggcacggtggcctcctcatccacagctgtcatagtctcagcccgcatggcccccgaggagatcatcatggacagacccttcctctttgtggtccggcacaaccccacaggaacagtccttttcatgggccaagtgatggaaccctgaccctggggaaagacgccttcatctgggacaaaactggagatgcatcgggaaagaagaaactccgaagaaaagaattttagtgttaatgactctttctgaaggaagagaagacatttgccttttgttaaaagatggtaaaccagatctgtctccaagaccttggcctctccttggaggacctttaggtcaaactccctagtctccacctgagaccctgggagagaagtttgaagcacaactcccttaaggtctccaaaccagacggtgacgcctgcgggaccatctggggcacctgcttccacccgtctctctgcccactcgggtctgcagacctggttcccactgaggccctttgcaggatggaactacggggcttacaggagcttttgtgtgcctggtagaaactatttctgttccagtcacattgccatcactcttgtactgcctgccaccgcggaggaggctggtgacaggccaaaggccagtggaagaaacaccctttcatctcagagtccactgtggcactggccacccctccccagtacaggggtgctgcaggtggcagagtgaatgtcccccatcatgtggcccaactctcctggcctggccatctccctccccagaaacagtgtgcatgggttattttggagtg

SEQ ID NO: 13516 - protein, 1203 aa, Artificial Sequence
  derived and/or modified sequence
MGNLKSVAQEPGPPCGLGLGLGLGLCGKQGPATPAPEPSRAPASLLPPAPEHSPPSSPLTQPPEGPKFPRVKNWEVGSITYDTLSAQAQQDGPCTPRRCLGSLVFPRKLQGRPSPGPPAPEQLLSQARDFINQYYSSIKRSGSQAHEQRLQEVEAEVAATGTYQLRESELVFGAKQAWRNAPRCVGRIQWGKLQVFDARDCRSAQEMFTYICNHIKYATNRGNLRSAITVFPQRCPGRGDFRIWNSQLVRYAGYRQQDGSVRGDPANVEITELCIQHGWTPGNGRFDVLPLLLQAPDDPPELFLLPPELVLEVPLEHPTLEWFAALGLRWYALPAVSNMLLEIGGLEFPAAPFSGWYMSTEIGTRNLCDPHRYNILEDVAVCMDLDTRTTSSLWKDKAAVEINVAVLHSYQLAKVTIVDHHAATASFMKHLENEQKARGGCPADWAWIVPPISGSLTPVFHQEMVNYFLSPAFRYQPDPWKGSAAKGTGITRKKTFKEVANAVKISASLMGTVMAKRVKATILYGSETGRAQSYAQQLGRLFRKAFDPRVLCMDEYDVVSLEHETLVLVVTSTFGNGDPPENGESFAAALMEMSGPYNSSPRPEQHKSYKIRFNSISCSDPLVSSWRRKRKESSNTDSAGALGTLRFCVFGLGSRAYPHFCAFARAVDTRLEELGGERLLQLGQGDELCGQEEAFRGWAQAAFQAACETFCVGEDAKAAARDIFSPKRSWKRQRYRLSAQAEGLQLLPGLIHVHRRKMFQATIRSVENLQSSKSTRATILVRLDTGGQEGLQYQPGDHIGVCPPNRPGLVEALLSRVEDPPAPTEPVAVEQLEKGSPGGPPPGWVRDPRLPPCTLRQALTFFLDITSPPSPQLLRLLSTLAEEPREQQELEALSQDPRRYEEWKWFRCPTLLEVLEQFPSVALPAPLLLTQLPLLQPRYYSVSSAPSTHPGEIHLTVAVLAYRTQDGLGPLHYGVCSTWLSQLKPGDPVPCFIRGAPSFRLPPDPSLPCILVGPGTGIAPFRGFWQERLHDIESKGLQPTPMTLVFGCRCSQLDHLYRDEVQNAQQRGVFGRVLTAFSREPDNPKTYVQDILRTELAAEVHRVLCLERGHMFVCGDVTMATNVLQTVQRILATEGDMELDEAGDVIGVLRDQQRYHEDIFGLTLRTQEVTSRIRTQSFSLQERQLRGAVPWAFDPPGSDTNSP

SEQ ID NO: 13517 - protein, 997 aa, Artificial Sequence
  derived and/or modified sequence
MFTYICNHIKYATNRGNLRSAITVFPQRCPGRGDFRIWNSQLVRYAGYRQQDGSVRGDPANVEITELCIQHGWTPGNGRFDVLPLLLQAPDDPPELFLLPPELVLEVPLEHPTLEWFAALGLRWYALPAVSNMLLEIGGLEFPAAPFSGWYMSTEIGTRNLCDPHRYNILEDVAVCMDLDTRTTSSLWKDKAAVEINVAVLHSYQLAKVTIVDHHAATASFMKHLENEQKARGGCPADWAWIVPPISGSLTPVFHQEMVNYFLSPAFRYQPDPWKGSAAKGTGITRKKTFKEVANAVKISASLMGTVMAKRVKATILYGSETGRAQSYAQQLGRLFRKAFDPRVLCMDEYDVVSLEHETLVLVVTSTFGNGDPPENGESFAAALMEMSGPYNSSPRPEQHKSYKIRFNSISCSDPLVSSWRRKRKESSNTDSAGALGTLRFCVFGLGSRAYPHFCAFARAVDTRLEELGGERLLQLGQGDELCGQEEAFRGWAQAAFQAACETFCVGEDAKAAARDIFSPKRSWKRQRYRLSAQAEGLQLLPGLIHVHRRKMFQATIRSVENLQSSKSTRATILVRLDTGGQEGLQYQPGDHIGVCPPNRPGLVEALLSRVEDPPAPTEPVAVEQLEKGSPGGPPPGWVRDPRLPPCTLRQALTFFLDITSPPSPQLLRLLSTLAEEPREQQELEALSQDPRRYEEWKWFRCPTLLEVLEQFPSVALPAPLLLTQLPLLQPRYYSVSSAPSTHPGEIHLTVAVLAYRTQDGLGPLHYGVCSTWLSQLKPGDPVPCFIRGAPSFRLPPDPSLPCILVGPGTGIAPFRGFWQERLHDIESKGLQPTPMTLVFGCRCSQLDHLYRDEVQNAQQRGVFGRVLTAFSREPDNPKTYVQDILRTELAAEVHRVLCLERGHMFVCGDVTMATNVLQTVQRILATEGDMELDEAGDVIGVLRDQQRYHEDIFGLTLRTQEVTSRIRTQSFSLQERQLRGAVPWAFDPPGSDTNSP

SEQ ID NO: 13518 - DNA, 237 bp, Artificial Sequence
  derived and/or modified sequence
atgagaccctgcatctggatccacgtgcacctgaagcccccctgcagactggtggagctgctgcccttcagcagcgccctgcagggcctgagccacctgagcctgggcaccaccctgcccgtgatcctgcccgagagaaacgaggagcagaacctgcaggagctgagccacaacgccgacaagtaccagatgggcgactgctgcaaggaggagatcgacgacagcatcttctactag

SEQ ID NO: 13519 - DNA, 237 bp, Artificial Sequence
  derived and/or modified sequence
atgaggccttgcatttggatccatgtgcacctgaagcctccttgtcgcctcgtcgagttgctgcccttctcttccgccctgcagggcctttcgcaccttagccttggcaccactttgcctgtaatcttaccggagaggaacgaggaacaaaacttacaggagctgtctcataacgccgacaagtaccagatgggggattgctgtaaggaggagatagacgactccattttttactag

SEQ ID NO: 13520 - DNA, 237 bp, Artificial Sequence
  derived and/or modified sequence
atgaggccctgcatctggatccacgtgcacctgaagccaccctgccgcctggtggagctgctgcccttcagcagcgccctgcagggcctgagccacctgagcctgggcaccaccctgcccgtcatcctgcctgagagaaatgaggagcagaacctgcaggagctgagccacaatgctgacaagtaccagatgggagactgctgcaaggaggagattgatgacagcatcttctactag

SEQ ID NO: 13521 - DNA, 237 bp, Artificial Sequence
  derived and/or modified sequence
atgcgcccttgcatatggattcatgttcatttgaagccaccatgtcgactggtcgagcttctcccattcagtagtgcgctgcaggggctgtcccacttgtcactggggacaactctgcccgttatactacccgagagaaacgaagaacagaacttacaggagctgagtcacaatgcagataaataccaaatgggcgattgttgcaaagaggagatcgacgactcaatcttttactag

SEQ ID NO: 13522 - DNA, 3612 bp, Artificial Sequence
  derived and/or modified sequence
atggggaatcttaaaagtgtggcgcaggaaccgggacctccgtgtggcttgggcctgggcttaggcttaggcctgtgtgggaagcaggggcccgcaaccccggcacccgaacccagcagagcacctgcttcgctcttacccccagcccctgagcactccccaccttcctcacctctgacacagccacctgaggggccgaaatttccccgggtgaagaactgggaagtgggcagcatcacatacgacacactgtccgcacaggcacagcaggatgggccatgcaccccaaggcgatgcctgggaagtttagtgtttcctcgcaagcttcagggacgcccatccccagggcctcctgcacccgagcagctgctttcccaggcccgggattttataaaccagtattatagttctatcaagagaagcggcagccaggcccacgaacagcgcttgcaggaggtggaggcggaagtcgccgctactggcacctaccaactgcgtgaaagcgagctggtcttcggcgcaaaacaggcgtggaggaatgctccacgatgcgtgggcagaatccaatgggggaagttgcaagtgtttgatgcacgggattgtaggtctgctcaggaaatgtttacctacatctgcaaccacattaagtacgccacaaataggggaaacttgaggagcgctattacggtcttccctcaacggtgtcccggtcgcggagacttccgaatctggaactcccaattggtgcggtacgcgggttaccgccagcaggatggatctgtgagaggcgaccctgccaacgtcgagatcacagaactttgcatccagcatgggtggaccccaggaaatggccggttcgacgtgttgccactgctcttgcaggctcccgatgatcctccggagctgtttctactgccccctgaactggttctggaagtgccactagaacaccccacgttggagtggttcgcagccttagggttgagatggtatgccctacccgctgttagcaacatgctgctcgagatcggagggctggaattccccgctgccccgttctcaggctggtatatgagcaccgagattggcacaagaaatctttgtgatccccatcgctataatatcctcgaggatgtcgctgtgtgtatggaccttgatactcgcactaccagttcgctttggaaagacaaagcggcagtagagattaatgtggctgttctgcactcttaccagctggctaaagttactatagtggatcaccacgcagcaacagcttcgttcatgaagcaccttgaaaacgagcaaaaggctagaggtggatgtcctgccgactgggcatggatcgtgccacctatttccggcagcctgactccagtttttcatcaagagatggtcaactatttcttatccccagcttttaggtaccagccggacccttggaagggatccgctgccaaaggtacaggtattacacggaaaaagactttcaaagaagtggccaacgccgttaagatctctgcgtccttaatgggtacggtaatggccaagcgggtcaaggccaccatcctgtacggctctgagacagggcgagctcaatcatatgcccagcagcttgggcgactgttcagaaaagctttcgatcctcgggtgctgtgtatggatgaatacgatgtagttagccttgagcacgaaaccttggtcctcgtcgtcacatcaacttttgggaatggcgatccccctgagaacggcgagagcttcgccgccgccctgatggaaatgagcggaccctacaattcctccccaagacctgagcagcataaaagctacaagattaggttcaactccatctcttgctccgacccattggtgtccagctggcggagaaagagaaaagaatcgtcaaataccgattccgctggtgctctcggcacactgcggttctgcgttttcggacttggatccagggcgtatccccatttttgtgcctttgctcgcgccgttgacactcggctggaagagctggggggcgagaggctgctccagctggggcaaggcgacgaattgtgtggacaggaggaagcctttagaggatgggcccaggccgcatttcaggcggcttgtgaaaccttttgcgttggcgaagatgccaaggcagccgcacgggacatcttctcccctaaaagatcatggaagaggcagcgctaccgattatccgctcaggcggagggtctgcaactcctgcccggtctgatccacgttcacagaagaaaaatgtttcaggcaaccatccggtccgtggaaaatctgcagagctccaagagcacacgggctactatcctcgttagactcgataccggggggcaggagggtttacaatatcagcctggagatcatattggggtttgtccaccgaacagacctgggctggtcgaagcgttactcagtagggtcgaagaccctcctgcccccacggaaccagtggccgtcgagcagctggagaaaggatctcccggcggcccccctcctgggtgggttcgggatcctcgcctaccaccatgcaccctcaggcaggccctgacatttttccttgatattactagtccaccatccccgcagctgctgagactcctgagtaccttagctgaggagcctagagaacagcaagagttggaggccctgagccaggacccacggaggtatgaggagtggaagtggttccgctgcccaacactgctggaagtgcttgagcagttcccctctgtggcactcccagctcctctgttacttacgcagctgccgctcctgcagccaagatactacagcgtatcctccgccccaagtacgcatcctggagagatccacctcaccgtagcagtgcttgcttatcggacacaagatgggctcggacccttacactatggggtgtgctctacttggttgtcacagcttaaacctggggacccggtgccctgcttcatccggggcgccccctcgttcaggctgccacccgacccatcactgccgtgtatcctcgtaggccccggcacgggaatcgctccttttcgaggcttctggcaggaaagactccacgatattgagtcaaagggcctccagcctactcctatgacactggtgtttgggtgtcgatgtagccagctcgaccacctctatcgtgacgaggtacagaatgcacaacagagaggggtgtttggccgcgtgcttacggcatttagcagagagcctgataaccccaagacatacgtccaggacattctccgcacagagctggcagccgaggttcatagagtcctttgcctggaacgcggccacatgttcgtgtgtggggatgtaactatggccacaaacgtactgcagaccgtgcagaggatactcgccacagagggagatatggaactggatgaagcgggggacgtaattggcgtgctccgggatcagcagagataccacgaagatatctttggactcaccctgaggacccaagaggtgacttctaggattcgcacccaaagcttcagtttacaagagagacaactgcggggtgccgtgccctgggccttcgacccaccgggctcagacaccaactcgccctag

SEQ ID NO: 13523 - DNA, 2994 bp, Artificial Sequence
  derived and/or modified sequence
atgttcacctacatctgcaatcacattaagtacgctaccaacagagggaatctcagatccgccattactgtattcccacaacggtgcccaggtcggggcgatttccgaatatggaactcccagctggtccgctatgccgggtatagacaacaggatggatccgttagaggcgaccctgcaaatgtcgaaatcaccgaactgtgtatccagcacggctggactcccggcaacggccgattcgacgtgctgccactgcttcttcaggcaccagatgaccctccagagctgttcctgcttcctccagagctggtgctggaggtcccactggagcatcccaccttggagtggtttgctgcacttggactacgctggtacgcccttcctgccgtcagcaatatgctgctcgaaatcggcgggctggagttccctgcagctcctttctccgggtggtacatgtccaccgagattgggactcggaacctgtgtgatccccataggtataacatcttggaggacgtagccgtgtgtatggatctcgatactcggacaacaagcagtctctggaaggacaaggctgccgtagagattaacgtggcagtgctgcatagctaccaactcgcaaaagtcacaatcgtcgaccatcacgcagctactgcttccttcatgaagcacctcgaaaatgagcagaaggcaagaggtggttgtccagcagattgggcatggattgtgcccccaatatcaggctccctgactccagtgtttcaccaggaaatggtcaactattttttgagtcccgcatttagatatcagcctgacccctggaaaggctccgccgctaagggcaccggtatcacaaggaaaaagacttttaaggaagtagcaaatgccgtaaaaatttcggcatcattgatggggaccgttatggcaaagcgtgttaaggccactattttgtacgggagcgagactgggcgcgcccagtcttacgctcagcaactgggtcggctgttccgaaaagccttcgacccgcgggtgctctgcatggatgaatacgatgtggtgagccttgagcacgagaccctggttctggtagtaacttcaacatttggtaatggtgatccgcccgagaacggagaatcatttgcagccgcgctcatggagatgtccggaccctataattctagccctcgaccagaacagcataagtcttacaagatccggttcaactcaatctcttgttccgatcctttagttagctcctggagaagaaaacggaaagagtcctccaacaccgactccgccggggcccttggaactttacggttttgtgttttcggtcttggatctcgagcctacccccacttttgcgccttcgcgagggccgttgatacacggctcgaggagcttggtggggagcgcctcctccaacttggacagggtgacgaactgtgtggtcaggaggaggccttcagggggtgggctcaggccgcctttcaggccgcctgcgagaccttttgtgtgggggaagacgccaaggccgccgcccgcgacatttttagcccaaagcgtagctggaagcgccaacgctacaggctctctgctcaggccgaaggcctgcaattgctgcccggcctgattcacgtccataggagaaaaatgtttcaggccacgattagatcagtggaaaacctacagtcgagcaagtcgacccgtgctactattctggtcaggctagatactgggggacaagagggcctacaatatcagcccggggatcacatcggcgtctgccctccaaatagaccgggccttgtcgaggccctccttagtcgtgttgaggacccccccgctccaacagagccagtcgcggtggagcaacttgaaaaaggtagtcccggcggtcccccacctggctgggtgagggacccaagacttccaccatgcaccctgcggcaggccctcacattctttctggacattacgagtcctcccagtccacagctccttcgcctcctcagtaccctggccgaggagcctagggaacagcaggagctggaagcgctatctcaggaccctcgccggtacgaagagtggaagtggtttcgctgccccacactgcttgaggtgctggagcagttcccgtcagtggcccttcctgcaccgctgctcctgacccagctgccattgctacaaccaagatactacagcgtgagttcggctccctccactcatcctggcgagatacatcttactgtagcagtcctcgcctatcgcactcaggacgggctgggccctctgcactatggagtttgctccacttggctgtctcaactcaaacctggggacccagtcccttgctttatccgaggtgccccttcttttagacttccccctgatcccagtttaccgtgcatcctggtggggccagggaccggcattgcaccttttcggggcttttggcaagaacggttacatgacatcgagtccaagggccttcaacctacccctatgactctagtctttggttgcagatgcagccagcttgatcacctgtacagagatgaggtgcaaaacgcacagcagcgcggcgtctttgggcgcgtgttaacagccttctcacgggaacccgacaaccccaagacttacgtccaagatattctacgcactgagttagccgccgaagtacaccgggtgctttgccttgaacggggccatatgttcgtgtgtggagatgtgacaatggctactaacgtgctgcaaacagtacagcgcatactcgcaactgagggggatatggagttggatgaggcaggcgacgtcatcggcgtattaagggatcagcagcgctatcacgaagatatcttcgggctcacacttaggacacaggaggtgacatcacggattcgtacccagagcttctctctacaggaacgccaactgagaggcgctgtgccttgggcctttgatccaccgggcagcgacactaacagcccctag

SEQ ID NO: 13524 - DNA, 3612 bp, Artificial Sequence
  derived and/or modified sequence
atgggcaacctgaagtctgtggcccaggagcccggccccccctgtggcctgggcctgggcctgggcctgggcctgtgtgggaagcagggccctgccaccccagcccctgagcccagccgggccccagccagcctgctgcccccagcccctgagcacagcccccccagcagccccctgacccagcccccagagggccccaagttcccccgggtgaagaactgggaggtgggcagcatcacctatgacaccctgagcgcccaggcccagcaggacggcccctgcaccccccggcgctgcctgggcagcctggtgttccccaggaagctgcagggccggcccagccctggccccccagcccctgagcagctgctgagccaggcccgggacttcatcaaccagtactacagcagcatcaagaggagcggcagccaggcccacgagcagaggctgcaggaggtggaggccgaggtggccgccaccggcacctaccagctgcgggagagcgagctggtgtttggagccaagcaggcctggagaaatgccccccgctgtgtgggccgcatccagtggggcaagctgcaggtgtttgatgcccgggactgccgcagcgcccaggagatgttcacctacatctgcaaccacatcaagtatgccaccaacagaggcaacctgcggagcgccatcaccgtcttcccccagcgctgccccggccgcggggacttccgcatctggaacagccagctggtgcgctatgccggctaccggcagcaggacggctctgtgcggggggaccctgccaacgtggagatcacagagctgtgcatccagcacggctggaccccaggaaatggccgctttgatgtgctgcccctgctgctgcaggccccagatgatcctcctgagctgttcctgctgcccccagagctggtgctggaggtgcccctggagcaccccaccctggagtggtttgctgccctgggcctgcgctggtacgccctgcctgctgtgagcaacatgctgctggagattggaggcctggagttccctgctgcccccttcagcggctggtacatgagcacagagatcggcaccaggaacctgtgtgacccccaccgctacaacatcctggaggatgtggccgtgtgcatggacctggacaccaggaccaccagcagcctgtggaaggacaaggctgctgtggagatcaacgtggccgtgctgcacagctaccagctggccaaggtgaccatcgtggaccaccacgccgccacagccagcttcatgaagcacctggagaatgagcagaaggcccggggcggctgcccagctgactgggcctggatcgtgccccccatcagcggcagcctgacccctgtgttccaccaggagatggtgaactacttcctgagccctgccttccgctaccagcctgacccctggaagggcagcgctgccaagggcaccggcatcaccaggaagaagaccttcaaggaggtggccaatgctgtgaagatcagcgccagcctgatgggcaccgtgatggccaagagggtgaaggccaccatcctgtatggcagcgagaccggccgggcccagagctatgcccagcagctgggccgcctcttcaggaaggcctttgacccccgggtgctgtgcatggatgaatatgatgtggtgtccctggagcacgagaccctggtgctggtggtgaccagcacctttggaaatggagaccccccagaaaatggagagagctttgctgctgccctgatggagatgagcggcccctacaacagcagccccaggcctgagcagcacaagagctacaagatccgcttcaacagcatcagctgcagcgaccccctggtgtcctcctggaggaggaagaggaaggagagcagcaacacagacagcgctggggccctgggcaccctgcgcttctgtgtgtttggcctgggcagccgggcctacccccacttctgtgcctttgcccgggctgtggacacccggctggaggagctgggcggggagcggctgctgcagctgggccagggagatgagctgtgtggccaggaggaggccttccggggctgggcccaggccgccttccaggccgcctgtgagaccttctgtgtgggggaggatgccaaggctgctgcccgggacatcttcagccccaagaggtcctggaagaggcagcgctaccgcctgagcgcccaggccgagggcctgcagctgctgcccggcctcatccacgtgcacaggaggaagatgttccaggccaccatccgctctgtggagaacctgcagagcagcaagagcacccgggccaccatcctggtgcggctggacacaggaggccaggagggcctgcagtaccagcccggggaccacatcggcgtgtgcccccccaacagacctggcctggtggaggccctgctgagccgggtggaggaccccccagcccccacagagcctgtggccgtggagcagctggagaagggcagccctgggggccccccacctggctgggtgcgggacccccggctgcccccctgcaccctgcggcaggccctgaccttcttcctggacatcaccagcccccccagcccccagctgctgcggctgctgagcaccctggccgaggagccccgggagcagcaggagctggaggccctgagccaggacccccggcgctatgaggagtggaagtggttccgctgccccaccctgctggaggtgctggagcagttccccagcgtggccctgcctgcccccctgctgctgacccagctgcccctgctgcagccccgctactacagcgtgagcagcgcccccagcacccaccctggagagatccacctgactgtggccgtgctggcctaccgcacccaggacggcctgggccccctgcactatggagtgtgcagcacctggctgagccagctgaagccaggggaccctgtgccctgcttcatccggggggcccccagcttccggctgcccccagaccccagcctgccctgcatcctggtgggccctggcaccggcatcgcccccttccggggcttctggcaggagcggctgcatgacatcgagagcaagggcctgcagcccacccccatgaccctggtgtttggctgccgctgcagccagctggaccacctgtacagagatgaggtgcagaatgcccagcagaggggcgtgtttggccgggtgctgacagccttcagccgggagccagacaaccccaagacctacgtgcaggacatcctgaggacagagctggccgctgaggtgcaccgggtgctgtgcctggagcggggccacatgtttgtgtgtggagatgtgaccatggccaccaacgtgctgcagacagtgcagaggatcctggccacagaaggagacatggagctggatgaggccggagatgtgattggagtgctgcgggaccagcagcgctaccacgaggacatcttcggcctgaccctgcggacccaggaggtgaccagccgcatccgcacccagagcttcagcctgcaggagcggcagctgcggggagctgtgccctgggcctttgatcctcctggcagtgacaccaacagcccctag

SEQ ID NO: 13525 - DNA, 2994 bp, Artificial Sequence
  derived and/or modified sequence
atgttcacctacatctgcaaccacatcaagtatgccaccaacagaggcaacctgcggagcgccatcaccgtcttcccccagcgctgccccggccgcggggacttccgcatctggaacagccagctggtgcgctatgccggctaccggcagcaggacggctctgtgcggggggaccctgccaacgtggagatcacagagctgtgcatccagcacggctggaccccaggaaatggccgctttgatgtgctgcccctgctgctgcaggccccagatgatcctcctgagctgttcctgctgcccccagagctggtgctggaggtgcccctggagcaccccaccctggagtggtttgctgccctgggcctgcgctggtacgccctgcctgctgtgagcaacatgctgctggagattggaggcctggagttccctgctgcccccttcagcggctggtacatgagcacagagatcggcaccaggaacctgtgtgacccccaccgctacaacatcctggaggatgtggccgtgtgcatggacctggacaccaggaccaccagcagcctgtggaaggacaaggctgctgtggagatcaacgtggccgtgctgcacagctaccagctggccaaggtgaccatcgtggaccaccacgccgccacagccagcttcatgaagcacctggagaatgagcagaaggcccggggcggctgcccagctgactgggcctggatcgtgccccccatcagcggcagcctgacccctgtgttccaccaggagatggtgaactacttcctgagccctgccttccgctaccagcctgacccctggaagggcagcgctgccaagggcaccggcatcaccaggaagaagaccttcaaggaggtggccaatgctgtgaagatcagcgccagcctgatgggcaccgtgatggccaagagggtgaaggccaccatcctgtatggcagcgagaccggccgggcccagagctatgcccagcagctgggccgcctcttcaggaaggcctttgacccccgggtgctgtgcatggatgaatatgatgtggtgtccctggagcacgagaccctggtgctggtggtgaccagcacctttggaaatggagaccccccagaaaatggagagagctttgctgctgccctgatggagatgagcggcccctacaacagcagccccaggcctgagcagcacaagagctacaagatccgcttcaacagcatcagctgcagcgaccccctggtgtcctcctggaggaggaagaggaaggagagcagcaacacagacagcgctggggccctgggcaccctgcgcttctgtgtgtttggcctgggcagccgggcctacccccacttctgtgcctttgcccgggctgtggacacccggctggaggagctgggcggggagcggctgctgcagctgggccagggagatgagctgtgtggccaggaggaggccttccggggctgggcccaggccgccttccaggccgcctgtgagaccttctgtgtgggggaggatgccaaggctgctgcccgggacatcttcagccccaagaggtcctggaagaggcagcgctaccgcctgagcgcccaggccgagggcctgcagctgctgcccggcctcatccacgtgcacaggaggaagatgttccaggccaccatccgctctgtggagaacctgcagagcagcaagagcacccgggccaccatcctggtgcggctggacacaggaggccaggagggcctgcagtaccagcccggggaccacatcggcgtgtgcccccccaacagacctggcctggtggaggccctgctgagccgggtggaggaccccccagcccccacagagcctgtggccgtggagcagctggagaagggcagccctgggggccccccacctggctgggtgcgggacccccggctgcccccctgcaccctgcggcaggccctgaccttcttcctggacatcaccagcccccccagcccccagctgctgcggctgctgagcaccctggccgaggagccccgggagcagcaggagctggaggccctgagccaggacccccggcgctatgaggagtggaagtggttccgctgccccaccctgctggaggtgctggagcagttccccagcgtggccctgcctgcccccctgctgctgacccagctgcccctgctgcagccccgctactacagcgtgagcagcgcccccagcacccaccctggagagatccacctgactgtggccgtgctggcctaccgcacccaggacggcctgggccccctgcactatggagtgtgcagcacctggctgagccagctgaagccaggggaccctgtgccctgcttcatccggggggcccccagcttccggctgcccccagaccccagcctgccctgcatcctggtgggccctggcaccggcatcgcccccttccggggcttctggcaggagcggctgcatgacatcgagagcaagggcctgcagcccacccccatgaccctggtgtttggctgccgctgcagccagctggaccacctgtacagagatgaggtgcagaatgcccagcagaggggcgtgtttggccgggtgctgacagccttcagccgggagccagacaaccccaagacctacgtgcaggacatcctgaggacagagctggccgctgaggtgcaccgggtgctgtgcctggagcggggccacatgtttgtgtgtggagatgtgaccatggccaccaacgtgctgcagacagtgcagaggatcctggccacagaaggagacatggagctggatgaggccggagatgtgattggagtgctgcgggaccagcagcgctaccacgaggacatcttcggcctgaccctgcggacccaggaggtgaccagccgcatccgcacccagagcttcagcctgcaggagcggcagctgcggggagctgtgccctgggcctttgatcctcctggcagtgacaccaacagcccctag

SEQ ID NO: 13526 - DNA, 3612 bp, Artificial Sequence
  derived and/or modified sequence
atgggcaacctgaagagcgtggcccaggagcccggccccccctgcggactcgggcttggcttaggtcttggtctgtgtggcaagcagggccctgcgacaccagcaccagagccctcaagggctcccgcttcactcctgccgccagctcccgagcatagcccacccagttcaccgttaacccagcccccggagggccccaaattcccacgtgtgaagaactgggaggtgggttcaataacctacgatactttgagcgcccaggcccagcaggatggcccctgtacacccaggcgttgtctgggttccctggtattccctaggaagctgcaaggtcggccatctcctggaccaccagcaccggagcagctcctgtcgcaggcacgggacttcattaatcagtactacagctcaatcaagcgctctggatcacaggcacatgaacagcggttacaggaggtagaggccgaagtcgccgccaccgggacgtatcagttgagggagagtgaactggtgtttggtgccaaacaggcctggcgaaacgcccccaggtgtgtaggacggattcagtgggggaagctccaagtattcgatgctcgtgactgtcgctccgcccaagagatgttcacctatatctgcaatcacataaaatatgccaccaaccgtggaaatctgcgcagtgcaataacggtattcccccagcgatgcccaggtcgaggcgatttccgaatctggaatagtcagctcgtcagatatgccggctatagacagcaggacggatctgtgaggggagatcctgctaatgtcgagattaccgagctgtgtatccagcacggctggacgccaggtaacggtcgctttgacgtgctcccgcttctgctgcaggcccccgacgatcctcctgaactctttctgctccctccggaactggtcctcgaggtgcctctggaacaccccaccctagagtggtttgcagcgttgggtctgcgatggtatgcgctgccagcggtctctaacatgcttctcgaaattggcggcctggaattcccggccgccccattttcagggtggtacatgtcaactgagattggaacccggaacttgtgcgacccacacaggtataacatactggaagacgtggcagtttgtatggacctcgatacgagaaccacctcgagcctgtggaaagacaaggccgcagtcgaaattaatgtggcagtcctgcactcatatcaactcgcaaaggtaaccattgtggatcaccacgctgctacagcctccttcatgaagcacctcgaaaatgagcaaaaggcccgcggtgggtgtcctgccgattgggcatggatagtgccaccaataagcggatccctcacaccagtgttccatcaagagatggtgaactacttcttgagtccagcgtttaggtaccagccagacccttggaaaggatccgctgccaagggcactggcattactcggaagaaaacctttaaagaagtcgccaacgcagtgaaaatctcggcttctctgatggggactgtgatggctaagagagtcaaggctaccatcctctatggctcggaaaccggacgggcacagtcatatgcgcaacaattgggaagattgtttagaaaagcttttgatcctagggtcctgtgcatggatgagtacgatgtggtctcactggaacatgagacactggtactggtagtgactagcacattcggcaacggagacccgccagagaacggagagtcttttgccgccgctctgatggagatgagtggcccatataatagcagcccacggccagaacagcataagagttacaagattaggtttaattccatctcttgcagtgaccccctggtgagcagctggcggaggaagcgcaaggagtccagtaacactgactctgctggggcattgggtactctgagattctgcgtatttgggttagggtcacgggcatacccccatttctgcgcttttgcccgcgccgtcgacaccaggcttgaagagctgggtggggagaggcttcttcaactgggtcagggagatgagttatgtggacaggaggaggcgttcaggggctgggctcaagccgcctttcaggcagcatgcgagaccttctgtgtgggagaggatgcaaaagccgccgcgcgggatatattcagtcccaaacgatcctggaagcgacagcggtatcggctgagtgcccaggctgaaggactgcagctgctacctggccttattcatgtgcaccgcaggaagatgttccaagccaccattcggtccgtcgagaatctgcagagctctaaatctactagggcgacaattttagttcggctggacaccgggggccaggagggcttgcagtatcagccaggagatcatattggggtttgcccgcctaatcgtcccggtctggtggaggctcttttatctagagtagaggacccccctgctccgaccgagcccgttgccgtcgagcagctggaaaagggcagccccggcggtccacctccaggctgggttcgggaccccagactgcccccatgcacacttcgccaggcccttacattttttctcgacattacatcccctccatctccgcaacttttgcggcttctctctactttggccgaggagccaagggaacagcaagagctcgaagccctttcccaagaccccagaaggtacgaggaatggaaatggtttagatgcccgacccttctggaagtgcttgagcagtttccctccgttgccctgccagccccgcttttgttgacccagctgcctctgctgcagccaaggtattactcggtaagtagcgccccatctacgcatcccggcgagatccacctcaccgtggctgtgctcgcctatcgtacgcaagacggactcggtcccctgcactatggggtatgttccacctggctgtcgcaactaaagcccggtgaccctgtgccctgtttcatccgtggagcaccatccttccgcttgcctcctgacccaagcctgccctgcatcctggtcggtccagggacaggcatcgctcctttccgtgggttttggcaagagcggctgcatgacatagagtctaaagggctccagcccacacctatgaccctggttttcggctgtagatgcagccaactggatcatctgtatcgggatgaagtgcagaacgcgcagcaacggggggtttttggtcgcgtgttaacagccttcagtcgagaaccagacaacccgaagacctacgtgcaggacattctgcggactgaactcgccgcggaagtgcaccgagtcctgtgcctcgagcggggtcacatgttcgtgtgtggtgatgtgactatggccaccaacgtgctgcagacagtacagagaatcctggctacagaaggcgatatggaactagacgaagccggtgacgttatcggcgttctgcgcgatcagcagaggtatcacgaagatatcttcgggctaactctgcgaacccaggaggtgacaagccgcatcagaactcagagtttctctttgcaggagcgtcagctgaggggggctgtgccatgggcattcgacccgcccggtagtgacactaactccccatag

SEQ ID NO: 13527 - DNA, 2994 bp, Artificial Sequence
  derived and/or modified sequence
atgttcacctacatctgcaaccacatcaagtacgccaccaaccggggaaatcttcgctctgccatcacagtattcccccagcgctgcccgggacggggtgatttcagaatatggaactctcagctggtccgttacgctgggtaccggcagcaggatggctcggtcagaggtgatccagccaacgtggaaattaccgagctttgcatccaacatggctggacaccggggaatggacgcttcgatgtcttaccactgctattgcaggcccctgatgacccacccgagctgtttcttctgccacccgagctggtcctggaggttccacttgagcacccaacattggaatggtttgcggctctcggcctgcgttggtacgcccttcccgccgtgtctaatatgcttttggaaattgggggactggaattccctgcggctcccttctcaggatggtacatgtccaccgaaattggcactcgaaacctatgcgatccgcatagatacaacatcctcgaggatgtggctgtgtgcatggacctggacaccagaactacttcctccctttggaaagacaaggcggctgttgagatcaacgtggcagttctgcactcctaccagctggccaaggttactattgtggaccaccacgccgctaccgcctcattcatgaaacatctggagaacgaacagaaggctcgcgggggatgtccggccgattgggcctggattgttccgcccatttccgggagcctgacaccggtattccaccaggagatggtgaactacttcttgtcacctgcattccggtatcagcctgacccctggaaggggtcagcagcgaaagggacgggaatcactagaaaaaaaacgttcaaggaggtagccaacgccgtgaaaatttctgccagcctgatgggaacagtgatggccaaaagggtgaaagccactatcctgtatggttctgagactggccgcgcccagtcttatgcccagcaattaggcagactttttagaaaagccttcgatccccgcgtgctttgtatggatgagtatgacgtcgtttctctggaacatgaaactctggtactggttgtaaccagtactttcggcaacggagatcctcccgagaacggcgagtcattcgcagcagctcttatggagatgtctggaccatacaactccagcccaaggccagaacaacataaaagctataagatccgcttcaattccatttcgtgttctgacccactggtgtctagttggcgaaggaagcgaaaggaatcctccaacaccgattcagccggagcgctgggcacattaaggttttgtgtgttcggccttggttcccgcgcttacccccacttctgtgcctttgcgagggcggtagacaccaggctggaggagctcggaggcgagagattactgcagctggggcaaggggacgagctgtgtgggcaggaagaggctttccggggctgggcacaagcagcttttcaggcagcgtgtgagaccttttgcgttggagaagatgcaaaggccgccgctcgggatatttttagtcctaagcgatcatggaagcgccagcgatacagactatccgcccaggcagaagggcttcagctccttccaggtctgatccatgtgcatcggagaaagatgtttcaggcgaccattcgctctgtagaaaatttgcagagcagtaaatccactagagcgaccatcctcgtccggctggatacaggtggtcaagaggggttgcagtatcagcccggcgaccacattggcgtgtgcccacccaaccgtccggggctggtcgaagcactattatcacgggtggaggaccctccggctccaacagagccggtggcagtggagcagctggagaaaggcagtccaggaggcccaccacccggatgggtgcgggatccccggctccccccctgtactctgcgccaagcacttacattttttctggatatcacttctccacctagcccacagctgttgcgcctgctctccaccctggcagaagagcctcgcgagcaacaggagctggaagccctctctcaggacccccggcggtacgaagaatggaaatggtttcggtgccccacactgctggaggtccttgaacaattccccagcgtagccctaccagctccactactcctgacacaattgcccctgctgcagcccaggtactatagtgtcagcagcgccccgagcactcaccctggcgagattcacctcaccgtggcagtgctcgcatatcggacccaggatggcttggggccattgcactatggcgtgtgctctacctggctatcccagctgaagcctggtgaccctgttccatgcttcataaggggggccccctcgttccgattgcctccagacccttcgctgccttgcatcctggtcgggcctgggaccggtatcgctcctttcagggggttctggcaggaaagactccacgacatcgagtccaagggactccagccaactccgatgacactcgttttcgggtgccgatgtagccagctggatcatctgtaccgggacgaggtgcaaaacgctcagcagagaggtgtctttggcagggtgctcaccgccttctccagagagccagacaatcccaaaacatacgttcaggatatccttcgcaccgagctggccgccgaggtgcaccgggtgttgtgtctcgagagaggccacatgtttgtctgcggggatgtgacgatggccacgaacgtgctccagacggtgcagagaatcctggccaccgaaggcgacatggagctagacgaggcaggggatgtaataggcgtgctacgtgatcaacagcgataccacgaggatatctttggacttacattacggacgcaggaagtcacaagtaggatacgtacccagagcttctctctccaggagcgacagctcagaggagccgtgccgtgggctttcgatcctcctggctccgacactaacagcccttag

SEQ ID NO: 13528 - DNA, 4388 bp, Artificial Sequence
  derived and/or modified sequence
agcaggtgaccagtggtgactcagttcggagcaggtgatagaagctaggagggggttgtttactgaaactaggggcaaggagacgaagagaacatgaaagttaaactttaagatgaagaacaaagctgaacatactgatgcattggatctttggagaggatctcagaactcattgtacttaatttacaggctaaaaccttagaagaggaatttattatatcctacacaagactccagggaagcacatggccttggactgaaggctggcatctggaagctgtcagccaccagcaccttctgcagcaggaaaaggccagggctctgctggagcaggcagcagagtggacgcacagtaacatgggcaacttgaagagcgtggcccaggagcctgggccaccctgcggcctggggctggggctgggccttgggctgtgcggcaagcagggcccagccaccccggcccctgagcccagccgggccccagcatccctactcccaccagcgccagaacacagccccccgagctccccgctaacccagcccccagaggggcccaagttccctcgtgtgaagaactgggaggtggggagcatcacctatgacaccctcagcgcccaggcgcagcaggatgggccctgcaccccaagacgctgcctgggctccctggtatttccacggaaactacagggccggccctcccccggccccccggcccctgagcagctgctgagtcaggcccgggacttcatcaaccagtactacagctccattaagaggagcggctcccaggcccacgaacagcggcttcaagaggtggaagccgaggtggcagccacaggcacctaccagcttagggagagcgagctggtgttcggggctaagcaggcctggcgcaacgctccccgctgcgtgggccggatccagtgggggaagctgcaggtgttcgatgcccgggactgcaggtctgcacaggaaatgttcacctacatctgcaaccacatcaagtatgccaccaaccggggcaaccttcgctcggccatcacagtgttcccgcagcgctgccctggccgaggagacttccgaatctggaacagccagctggtgcgctacgcgggctaccggcagcaggatggctctgtgcggggggacccagccaacgtggagatcaccgagctctgcattcagcacggctggaccccaggaaacggtcgcttcgacgtgctgcccctgctgctgcaggccccagatgatcccccagaactcttccttctgccccccgagctggtccttgaggtgcccctggagcaccccacgctggagtggtttgcagccctgggcctgcgctggtacgccctcccggcagtgtccaacatgctgctggaaattgggggcctggagttccccgcagcccccttcagtggctggtacatgagcactgagatcggcacgaggaacctgtgtgaccctcaccgctacaacatcctggaggatgtggctgtctgcatggacctggatacccggaccacctcgtccctgtggaaagacaaggcagcagtggaaatcaacgtggccgtgctgcacagttaccagctagccaaagtcaccatcgtggaccaccacgccgccacggcctctttcatgaagcacctggagaatgagcagaaggccagggggggctgccctgcagactgggcctggatcgtgccccccatctcgggcagcctcactcctgttttccatcaggagatggtcaactatttcctgtccccggccttccgctaccagccagacccctggaaggggagtgccgccaagggcaccggcatcaccaggaagaagacctttaaagaagtggccaacgccgtgaagatctccgcctcgctcatgggcacggtgatggcgaagcgagtgaaggcgacaatcctgtatggctccgagaccggccgggcccagagctacgcacagcagctggggagactcttccggaaggcttttgatccccgggtcctgtgtatggatgagtatgacgtggtgtccctcgaacacgagacgctggtgctggtggtaaccagcacatttgggaatggggatcccccggagaatggagagagctttgcagctgccctgatggagatgtccggcccctacaacagctcccctcggccggaacagcacaagagttataagatccgcttcaacagcatctcctgctcagacccactggtgtcctcttggcggcggaagaggaaggagtccagtaacacagacagtgcaggggccctgggcaccctcaggttctgtgtgttcgggctcggctcccgggcatacccccacttctgcgcctttgctcgtgccgtggacacacggctggaggaactgggcggggagcggctgctgcagctgggccagggcgacgagctgtgcggccaggaggaggccttccgaggctgggcccaggctgccttccaggccgcctgtgagaccttctgtgtgggagaggatgccaaggccgccgcccgagacatcttcagccccaaacggagctggaagcgccagaggtaccggctgagcgcccaggccgagggcctgcagttgctgccaggtctgatccacgtgcacaggcggaagatgttccaggctacaatccgctcagtggaaaacctgcaaagcagcaagtccacgagggccaccatcctggtgcgcctggacaccggaggccaggaggggctgcagtaccagccgggggaccacataggtgtctgcccgcccaaccggcccggccttgtggaggcgctgctgagccgcgtggaggacccgccggcgcccactgagcccgtggcagtagagcagctggagaagggcagccctggtggccctccccccggctgggtgcgggacccccggctgcccccgtgcacgctgcgccaggctctcaccttcttcctggacatcacctccccacccagccctcagctcttgcggctgctcagcaccttggcagaagagcccagggaacagcaggagctggaggccctcagccaggatccccgacgctacgaggagtggaagtggttccgctgccccacgctgctggaggtgctggagcagttcccgtcggtggcgctgcctgccccactgctcctcacccagctgcctctgctccagccccggtactactcagtcagctcggcacccagcacccacccaggagagatccacctcactgtagctgtgctggcatacaggactcaggatgggctgggccccctgcactatggagtctgctccacgtggctaagccagctcaagcccggagaccctgtgccctgcttcatccggggggctccctccttccggctgccacccgatcccagcttgccctgcatcctggtgggtccaggcactggcattgcccccttccggggattctggcaggagcggctgcatgacattgagagcaaagggctgcagcccactcccatgactttggtgttcggctgccgatgctcccaacttgaccatctctaccgcgacgaggtgcagaacgcccagcagcgcggggtgtttggccgagtcctcaccgccttctcccgggaacctgacaaccccaagacctacgtgcaggacatcctgaggacggagctggctgcggaggtgcaccgcgtgctgtgcctcgagcggggccacatgtttgtctgcggcgatgttaccatggcaaccaacgtcctgcagaccgtgcagcgcatcctggcgacggagggcgacatggagctggacgaggccggcgacgtcatcggcgtgctgcgggatcagcaacgctaccacgaagacattttcgggctcacgctgcgcacccaggaggtgacaagccgcatacgcacccagagcttttccttgcaggagcgtcagttgcggggcgcagtgccctgggcgttcgaccctcccggctcagacaccaacagcccctgagagccgcctggctttcccttccagttccgggagagcggctgcccgactcaggtccgcccgaccaggatcagccccgctcctcccctcttgaggtggtgccttctcacatctgtccagaggctgcaaggattcagcattattcctccaggaaggagcaaaacgcctcttttccctctctaggcctgttgcctcgggcctgggtccgccttaatctggaaggcccctcccagcagcggtaccccagggcctactgccacccgcttcctgtttcttagtcgaatgttagattcctcttgcctctctcaggagtatcttacctgtaaagtctaatctctaaatcaagtatttattattgaagatttaccataagggactgtgccagatgttaggagaactactaaagtgcctaccccagctca

SEQ ID NO: 13529 - DNA, 3644 bp, Artificial Sequence
  derived and/or modified sequence
aagatgaagaacaaagctgaacatactgatgcattggatctttggagaggatctcagaactcattgtacttaatttacaggctaaaaccttagaagaggaatttattatatcctacacaagactccagggaagcacatggccttggactgaaggctggcatctggaagctgtcagccaccagcaccttctgcagcagccccccgagctccccgctaacccagcccccagaggggcccaagttccctcgtgtgaagaactgggaggtggggagcatcacctatgacaccctcagcgcccaggcgcagcaggtgttcgatgcccgggactgcaggtctgcacaggaaatgttcacctacatctgcaaccacatcaagtatgccaccaaccggggcaaccttcgctcggccatcacagtgttcccgcagcgctgccctggccgaggagacttccgaatctggaacagccagctggtgcgctacgcgggctaccggcagcaggatggctctgtgcggggggacccagccaacgtggagatcaccgagctctgcattcagcacggctggaccccaggaaacggtcgcttcgacgtgctgcccctgctgctgcaggccccagatgatcccccagaactcttccttctgccccccgagctggtccttgaggtgcccctggagcaccccacgctggagtggtttgcagccctgggcctgcgctggtacgccctcccggcagtgtccaacatgctgctggaaattgggggcctggagttccccgcagcccccttcagtggctggtacatgagcactgagatcggcacgaggaacctgtgtgaccctcaccgctacaacatcctggaggatgtggctgtctgcatggacctggatacccggaccacctcgtccctgtggaaagacaaggcagcagtggaaatcaacgtggccgtgctgcacagttaccagctagccaaagtcaccatcgtggaccaccacgccgccacggcctctttcatgaagcacctggagaatgagcagaaggccagggggggctgccctgcagactgggcctggatcgtgccccccatctcgggcagcctcactcctgttttccatcaggagatggtcaactatttcctgtccccggccttccgctaccagccagacccctggaaggggagtgccgccaagggcaccggcatcaccaggaagaagacctttaaagaagtggccaacgccgtgaagatctccgcctcgctcatgggcacggtgatggcgaagcgagtgaaggcgacaatcctgtatggctccgagaccggccgggcccagagctacgcacagcagctggggagactcttccggaaggcttttgatccccgggtcctgtgtatggatgagtatgacgtggtgtccctcgaacacgagacgctggtgctggtggtaaccagcacatttgggaatggggatcccccggagaatggagagagctttgcagctgccctgatggagatgtccggcccctacaacagctcccctcggccggaacagcacaagagttataagatccgcttcaacagcatctcctgctcagacccactggtgtcctcttggcggcggaagaggaaggagtccagtaacacagacagtgcaggggccctgggcaccctcaggttctgtgtgttcgggctcggctcccgggcatacccccacttctgcgcctttgctcgtgccgtggacacacggctggaggaactgggcggggagcggctgctgcagctgggccagggcgacgagctgtgcggccaggaggaggccttccgaggctgggcccaggctgccttccaggccgcctgtgagaccttctgtgtgggagaggatgccaaggccgccgcccgagacatcttcagccccaaacggagctggaagcgccagaggtaccggctgagcgcccaggccgagggcctgcagttgctgccaggtctgatccacgtgcacaggcggaagatgttccaggctacaatccgctcagtggaaaacctgcaaagcagcaagtccacgagggccaccatcctggtgcgcctggacaccggaggccaggaggggctgcagtaccagccgggggaccacataggtgtctgcccgcccaaccggcccggccttgtggaggcgctgctgagccgcgtggaggacccgccggcgcccactgagcccgtggcagtagagcagctggagaagggcagccctggtggccctccccccggctgggtgcgggacccccggctgcccccgtgcacgctgcgccaggctctcaccttcttcctggacatcacctccccacccagccctcagctcttgcggctgctcagcaccttggcagaagagcccagggaacagcaggagctggaggccctcagccaggatccccgacgctacgaggagtggaagtggttccgctgccccacgctgctggaggtgctggagcagttcccgtcggtggcgctgcctgccccactgctcctcacccagctgcctctgctccagccccggtactactcagtcagctcggcacccagcacccacccaggagagatccacctcactgtagctgtgctggcatacaggactcaggatgggctgggccccctgcactatggagtctgctccacgtggctaagccagctcaagcccggagaccctgtgccctgcttcatccggggggctccctccttccggctgccacccgatcccagcttgccctgcatcctggtgggtccaggcactggcattgcccccttccggggattctggcaggagcggctgcatgacattgagagcaaagggctgcagcccactcccatgactttggtgttcggctgccgatgctcccaacttgaccatctctaccgcgacgaggtgcagaacgcccagcagcgcggggtgtttggccgagtcctcaccgccttctcccgggaacctgacaaccccaagacctacgtgcaggacatcctgaggacggagctggctgcggaggtgcaccgcgtgctgtgcctcgagcggggccacatgtttgtctgcggcgatgttaccatggcaaccaacgtcctgcagaccgtgcagcgcatcctggcgacggagggcgacatggagctggacgaggccggcgacgtcatcggcgtgctgcgggatcagcaacgctaccacgaagacattttcgggctcacgctgcgcacccaggaggtgacaagccgcatacgcacccagagcttttccttgcaggagcgtcagttgcggggcgcagtgccctgggcgttcgaccctcccggctcagacaccaacagcccctgagagccgcctggctttcccttccagttccgggagagcggctgcccgactcaggtccgcccgaccaggatcagccccgctcctcccctcttgaggtggtgccttctcacatctgtccagaggctgcaaggattcagcattattcctccaggaaggagcaaaacgcctcttttccctctctaggcctgttgcctcgggcctgggtccgccttaatctggaaggcccctcccagcagcggtaccccagggcctactgccacccgcttcctgtttcttagtcgaatgttagattcctcttgcctctctca

SEQ ID NO: 13530 - DNA, 3612 bp, Artificial Sequence
  derived and/or modified sequence
atgggaaatctgaaatccgtagctcaggagccaggtcctccctgcgggctgggcctgggactcggtttaggattgtgtggaaagcaaggcccagccactccggctccagagccctcccgcgctcctgcttctctgttaccaccagcgccagaacactcgccgcctagttccccactcactcagcctcccgaggggccaaaattcccccgagtgaaaaactgggaagtgggaagcatcacgtacgacacgctcagtgcacaggcccagcaagacgggccttgtacacctagacggtgcttgggaagtctggttttccctaggaagcttcaagggaggcctagccccggaccccctgctcctgagcagctcctcagtcaggcgagagacttcatcaatcagtactactcttcgatcaaacgtagcggttcacaggcgcatgaacagagactacaggaggtcgaagcggaagttgccgctacagggacatatcaactgagggaatcagagctggtgttcggggctaaacaagcatggcgaaacgccccaagatgcgtcggcaggatccaatggggcaagctccaggtgtttgatgctagagactgcaggagtgcccaggaaatgttcacatatatttgtaatcatatcaagtatgcaactaatcgtggaaaccttcggtctgcaattaccgtgtttcctcagcgctgccccggtcgcggtgatttccgcatatggaattctcagctggttaggtacgctggatataggcagcaggatgggtcagtgcgtggtgacccagccaatgtcgaaatcacagaattgtgcatccaacatggctggactcctgggaatgggcgttttgatgtgttgcccctgctgttgcaggccccagacgatccacccgaactgtttctgctgccccctgaactggtactcgaggttcccctggagcatcccacacttgaatggttcgccgctctggggctgaggtggtacgccctgccggcagtgagtaacatgcttcttgagattgggggtctggaattccctgccgctccattctctggatggtatatgtcaacagagatagggacaaggaacctgtgcgatccccacagatataacatcctggaggatgtggctgtgtgtatggacctggatacacgcactacctcaagcctctggaaagacaaggctgccgtggaaataaatgtggctgtcctccactcctatcagctcgcaaaggtgacaattgtggaccatcacgccgctaccgcctcttttatgaagcacctcgaaaatgagcaaaaagcacgtggaggctgccccgctgactgggcatggatcgtgcccccaatatccgggtctctcactcctgttttccaccaggagatggtgaattatttcttgagcccggcattcaggtaccagcccgacccctggaaaggatccgctgccaaaggcacgggcatcacccgcaagaaaactttcaaggaagtggcaaacgccgtgaagatctccgcctcattaatgggtaccgtgatggccaagcgggtaaaggctaccatcctgtatggctcagaaacaggccgtgcccagtcttatgctcagcagttgggcaggttgtttaggaaagcatttgatcccagagtcctgtgcatggacgagtacgacgtagtaagcctggagcatgaaactctggtattggtagtgacatctacattcggaaacggtgacccccctgagaatggagagtccttcgctgctgcccttatggagatgtccgggccttataactcatcccctagaccagagcagcacaaatcctataagatccgtttcaatagcattagctgctcggatccattggtaagcagttggcgcaggaaacgcaaagaaagctccaatacagactctgccggagccctggggacattgcggttctgtgtatttggcctgggatctcgtgcttatcctcacttttgcgctttcgcgagggcagtcgatacacgccttgaggagctaggaggcgagcgcctgctgcagcttggccagggagacgaactatgtggacaggaggaagcgtttcggggatgggctcaggccgcattccaagcagcctgtgagaccttctgtgtgggcgaagatgctaaagccgctgctcgggacatattctcccccaagagatcttggaagagacaaaggtaccgactctccgcacaggctgaaggtctgcagctccttccgggactgatccatgtacaccgcaggaagatgttccaagccaccatccgatcggtggaaaatctgcagagcagtaagtcaacgagggctaccattctggttagattagacacgggcggtcaggagggcctacaataccagccaggggatcatattggagtttgtcctcccaatagaccaggcttagtggaagccttactgtctcgggttgaggatccacccgcacctacagaaccggtcgcagtagagcagctggaaaagggtagtcctggcggaccacctccaggatgggtgcgagacccacgactgccgccatgcactctgcgccaggctcttacgttttttctggacatcacatccccaccatcacctcagctccttcggttactgtcaacactcgctgaggaaccacgtgagcagcaggaactggaggccttaagccaggaccccaggagatatgaagaatggaaatggtttcggtgccccaccctcttggaagtgttggagcagtttcccagtgtggccctacccgctcccctgctattgacacagctgccgcttctccagccacggtactattctgtgtcctccgccccttccactcatcccggagagattcatctcactgtggccgttttggcctacaggacccaggacggtctaggcccactgcattacggtgtttgttccacctggctctcccaattaaaacccggtgatcccgtgccatgttttattcgaggcgcaccctcctttaggttaccgcctgatccgtcgctcccctgcatcctggtgggcccagggaccgggatcgccccatttcgcggattttggcaggaacgcctccatgatatcgagtctaagggccttcagccaacgcctatgacattagttttcgggtgtagatgctcccaactcgatcatctgtaccgcgatgaagttcagaacgcacaacagaggggtgttttcgggagggttctgacagcatttagtcgcgaaccagataacccgaagacatacgtgcaagatatcttaagaaccgaactggccgcagaagttcatagagtcctgtgtcttgagcgtgggcacatgtttgtgtgcggtgatgtcacaatggccacaaacgtgctgcaaacggtgcagcgcattcttgccactgaaggggatatggaactcgatgaggccggtgatgtcataggcgtgctgcgagatcagcaacgctaccacgaagacattttcggcctgacattacgcactcaggaggtgacctcccgtattaggacacaatctttttccctgcaggaacgccagctgcgtggggctgtcccgtgggccttcgacccccctgggagtgacaccaatagcccttag

SEQ ID NO: 13531 - DNA, 2994 bp, Artificial Sequence
  derived and/or modified sequence
atgtttacatatatctgtaatcacatcaaatatgccacgaaccggggaaatctccgcagtgcaataacggtgtttccccagcggtgtcccggaagaggtgacttccgtatctggaacagtcagctggtgcgctatgcaggctacagacaacaggacggatccgtgcgaggggacccagcgaatgtagagataaccgagctgtgcatccagcatggctggactcccggtaatgggaggtttgatgttctcccattactgttacaagcccctgatgacccccctgagctcttcctccttcccccagaactggtccttgaggttccacttgaacaccccacgctggaatggtttgcagccctgggattgagatggtacgctcttcccgctgtgtctaatatgctcctggagataggagggctggagtttccagccgctccgtttagtggctggtacatgtcaaccgaaattggtacaagaaatctgtgcgatccccaccggtataacattctcgaagacgtggccgtgtgcatggacctggatactaggacgacaagctcattatggaaggataaggcagcggttgagattaatgtggctgtactgcactcctatcagctggcaaaagttactatcgtggaccatcacgcagctacagcatcttttatgaagcacctggaaaatgaacaaaaagccaggggcggatgtccagctgattgggcatggatcgtgccccctatcagcggatctctaaccccagtgtttcatcaggaaatggtgaactacttcctgtcccctgcatttagataccagccagatccgtggaagggctccgccgcaaaggggactggtataacccgcaagaaaacgttcaaagaagttgcaaacgccgtgaaaatatctgcttcccttatgggcacagtgatggctaagcgtgtgaaggccaccattttgtacggttccgagacaggacgcgcacaaagctacgctcagcagctgggaaggctcttccgaaaagccttcgatcctagagttctttgtatggatgagtacgatgtggtctctttggagcacgaaacccttgtgctcgttgtcaccagcactttcggtaacggagacccacctgagaacggcgaatccttcgcagccgctcttatggaaatgagcggcccttacaattcttccccaagacctgaacagcataagtcatataaaattcgcttcaatagcatcagctgttctgacccgctggtgtcctcatggaggaggaaaaggaaggagagtagcaataccgactcagcaggggctctggggaccttgagattctgcgtgttcggcctcggctctcgggcatacccacatttttgcgccttcgcacgtgcagtggacactcgactcgaagaactcgggggagagcgcttactccagctggggcaaggagatgagctgtgcggccaagaggaggcatttagggggtgggcacaagctgccttccaggcggcttgcgaaaccttctgcgtcggggaggacgctaaagccgcagcacgggatattttctccccaaaacgctcttggaaacgccagcggtacagattgagcgctcaggccgagggtctgcagctgctgcccggattgatccatgtgcatcggcgaaagatgttccaggcgacaatcagatccgtcgaaaacctacaaagcagcaaaagtacccgcgcaacaattctcgtcagactggatactgggggacaggagggcctgcagtaccagccaggcgaccatattggcgtgtgccctcctaataggccaggccttgtcgaggcgcttctctcccgagtggaggacccaccagccccaaccgagcccgtcgccgtggagcagctcgagaaaggcagccccggtggtcctcccccaggatgggtgcgggaccctaggctgcccccttgcactttgagacaggcgttgacattttttcttgatataacaagtcccccatcgccacagcttctgcgcttactgtcaaccttggcggaggaaccaagagagcagcaggagttggaagctctttcccaggatccgcgtaggtacgaagaatggaaatggtttcgatgccctacactgctggaagttctcgaacagttcccctcagtggcgctgcccgcacccttattgcttactcagctccctttactgcagccccgttactactccgtatcatcagccccatcaacccatccaggtgagatccacctgaccgtggctgtgctggcctatcggactcaggatggtttgggcccacttcattacggagtatgtagtacgtggctgtcacagttgaagccaggtgaccccgttccctgtttcatcaggggcgctccatccttcagactgccacctgaccctagtctcccgtgcattctggtcggaccaggtacaggcatcgcccctttccggggattttggcaggagagattgcacgatattgagtcaaagggcctgcagcccacgcctatgactttagtgtttggatgtcgctgtagtcagctggaccacctgtatagggatgaagttcaaaacgcacagcagagaggtgtcttcggtcgggtgcttaccgctttctctagagaaccagacaacccgaagacatatgtgcaggatattctgcggactgagctggctgctgaggtgcaccgggtgctttgtttagaacgcggacacatgtttgtatgtggggacgtcacaatggctactaacgtcctgcagactgtccagcgcatactagccaccgaaggtgacatggagctggatgaggcaggagatgtgattggcgttctgcgtgaccaacagcgttatcacgaggacattttcggcctgacactcaggactcaggaagtgacgagcaggatccggactcaaagcttttccctccaggaacgccagctgagaggcgctgtcccctgggcttttgatcctcctggttctgatacgaattccccctag

SEQ ID NO: 13532 - DNA, 3612 bp, Artificial Sequence
  derived and/or modified sequence
atgggcaacctgaagagcgtggcccaggagcccggccccccctgcggcctgggcctgggcctgggcctgggcctgtgcggcaagcagggccccgccacccccgcccccgagcccagcagagcccccgccagcctgctgccccccgcccccgagcacagcccccccagcagccccctgacccagccccccgagggccccaagttccccagagtgaagaactgggaggtgggcagcatcacctacgacaccctgagcgcccaggcccagcaggacggcccctgcacccccagaagatgcctgggcagcctggtgttccccagaaagctgcagggcagacccagccccggcccccccgcccccgagcagctgctgagccaggccagagacttcatcaaccagtactacagcagcatcaagagaagcggcagccaggcccacgagcagagactgcaggaggtggaggccgaggtggccgccaccggcacctaccagctgagagagagcgagctggtgttcggcgccaagcaggcctggagaaacgcccccagatgcgtgggcagaatccagtggggcaagctgcaggtgttcgacgccagagactgcagaagcgcccaggagatgttcacctacatctgcaaccacatcaagtacgccaccaacagaggcaacctgagaagcgccatcaccgtgttcccccagagatgccccggcagaggcgacttcagaatctggaacagccagctggtgagatacgccggctacagacagcaggacggcagcgtgagaggcgaccccgccaacgtggagatcaccgagctgtgcatccagcacggctggacccccggcaacggcagattcgacgtgctgcccctgctgctgcaggcccccgacgacccccccgagctgttcctgctgccccccgagctggtgctggaggtgcccctggagcaccccaccctggagtggttcgccgccctgggcctgagatggtacgccctgcccgccgtgagcaacatgctgctggagatcggcggcctggagttccccgccgcccccttcagcggctggtacatgagcaccgagatcggcaccagaaacctgtgcgacccccacagatacaacatcctggaggacgtggccgtgtgcatggacctggacaccagaaccaccagcagcctgtggaaggacaaggccgccgtggagatcaacgtggccgtgctgcacagctaccagctggccaaggtgaccatcgtggaccaccacgccgccaccgccagcttcatgaagcacctggagaacgagcagaaggccagaggcggctgccccgccgactgggcctggatcgtgccccccatcagcggcagcctgacccccgtgttccaccaggagatggtgaactacttcctgagccccgccttcagataccagcccgacccctggaagggcagcgccgccaagggcaccggcatcaccagaaagaagaccttcaaggaggtggccaacgccgtgaagatcagcgccagcctgatgggcaccgtgatggccaagagagtgaaggccaccatcctgtacggcagcgagaccggcagagcccagagctacgcccagcagctgggcagactgttcagaaaggccttcgaccccagagtgctgtgcatggacgagtacgacgtggtgagcctggagcacgagaccctggtgctggtggtgaccagcaccttcggcaacggcgacccccccgagaacggcgagagcttcgccgccgccctgatggagatgagcggcccctacaacagcagccccagacccgagcagcacaagagctacaagatcagattcaacagcatcagctgcagcgaccccctggtgagcagctggagaagaaagagaaaggagagcagcaacaccgacagcgccggcgccctgggcaccctgagattctgcgtgttcggcctgggcagcagagcctacccccacttctgcgccttcgccagagccgtggacaccagactggaggagctgggcggcgagagactgctgcagctgggccagggcgacgagctgtgcggccaggaggaggccttcagaggctgggcccaggccgccttccaggccgcctgcgagaccttctgcgtgggcgaggacgccaaggccgccgccagagacatcttcagccccaagagaagctggaagagacagagatacagactgagcgcccaggccgagggcctgcagctgctgcccggcctgatccacgtgcacagaagaaagatgttccaggccaccatcagaagcgtggagaacctgcagagcagcaagagcaccagagccaccatcctggtgagactggacaccggcggccaggagggcctgcagtaccagcccggcgaccacatcggcgtgtgcccccccaacagacccggcctggtggaggccctgctgagcagagtggaggacccccccgcccccaccgagcccgtggccgtggagcagctggagaagggcagccccggcggccccccccccggctgggtgagagaccccagactgcccccctgcaccctgagacaggccctgaccttcttcctggacatcaccagcccccccagcccccagctgctgagactgctgagcaccctggccgaggagcccagagagcagcaggagctggaggccctgagccaggaccccagaagatacgaggagtggaagtggttcagatgccccaccctgctggaggtgctggagcagttccccagcgtggccctgcccgcccccctgctgctgacccagctgcccctgctgcagcccagatactacagcgtgagcagcgcccccagcacccaccccggcgagatccacctgaccgtggccgtgctggcctacagaacccaggacggcctgggccccctgcactacggcgtgtgcagcacctggctgagccagctgaagcccggcgaccccgtgccctgcttcatcagaggcgcccccagcttcagactgccccccgaccccagcctgccctgcatcctggtgggccccggcaccggcatcgcccccttcagaggcttctggcaggagagactgcacgacatcgagagcaagggcctgcagcccacccccatgaccctggtgttcggctgcagatgcagccagctggaccacctgtacagagacgaggtgcagaacgcccagcagagaggcgtgttcggcagagtgctgaccgccttcagcagagagcccgacaaccccaagacctacgtgcaggacatcctgagaaccgagctggccgccgaggtgcacagagtgctgtgcctggagagaggccacatgttcgtgtgcggcgacgtgaccatggccaccaacgtgctgcagaccgtgcagagaatcctggccaccgagggcgacatggagctggacgaggccggcgacgtgatcggcgtgctgagagaccagcagagataccacgaggacatcttcggcctgaccctgagaacccaggaggtgaccagcagaatcagaacccagagcttcagcctgcaggagagacagctgagaggcgccgtgccctgggccttcgacccccccggcagcgacaccaacagcccctag

SEQ ID NO: 13533 - DNA, 2994 bp, Artificial Sequence
  derived and/or modified sequence
atgttcacctacatctgcaaccacatcaagtacgccaccaacagaggcaacctgagaagcgccatcaccgtgttcccccagagatgccccggcagaggcgacttcagaatctggaacagccagctggtgagatacgccggctacagacagcaggacggcagcgtgagaggcgaccccgccaacgtggagatcaccgagctgtgcatccagcacggctggacccccggcaacggcagattcgacgtgctgcccctgctgctgcaggcccccgacgacccccccgagctgttcctgctgccccccgagctggtgctggaggtgcccctggagcaccccaccctggagtggttcgccgccctgggcctgagatggtacgccctgcccgccgtgagcaacatgctgctggagatcggcggcctggagttccccgccgcccccttcagcggctggtacatgagcaccgagatcggcaccagaaacctgtgcgacccccacagatacaacatcctggaggacgtggccgtgtgcatggacctggacaccagaaccaccagcagcctgtggaaggacaaggccgccgtggagatcaacgtggccgtgctgcacagctaccagctggccaaggtgaccatcgtggaccaccacgccgccaccgccagcttcatgaagcacctggagaacgagcagaaggccagaggcggctgccccgccgactgggcctggatcgtgccccccatcagcggcagcctgacccccgtgttccaccaggagatggtgaactacttcctgagccccgccttcagataccagcccgacccctggaagggcagcgccgccaagggcaccggcatcaccagaaagaagaccttcaaggaggtggccaacgccgtgaagatcagcgccagcctgatgggcaccgtgatggccaagagagtgaaggccaccatcctgtacggcagcgagaccggcagagcccagagctacgcccagcagctgggcagactgttcagaaaggccttcgaccccagagtgctgtgcatggacgagtacgacgtggtgagcctggagcacgagaccctggtgctggtggtgaccagcaccttcggcaacggcgacccccccgagaacggcgagagcttcgccgccgccctgatggagatgagcggcccctacaacagcagccccagacccgagcagcacaagagctacaagatcagattcaacagcatcagctgcagcgaccccctggtgagcagctggagaagaaagagaaaggagagcagcaacaccgacagcgccggcgccctgggcaccctgagattctgcgtgttcggcctgggcagcagagcctacccccacttctgcgccttcgccagagccgtggacaccagactggaggagctgggcggcgagagactgctgcagctgggccagggcgacgagctgtgcggccaggaggaggccttcagaggctgggcccaggccgccttccaggccgcctgcgagaccttctgcgtgggcgaggacgccaaggccgccgccagagacatcttcagccccaagagaagctggaagagacagagatacagactgagcgcccaggccgagggcctgcagctgctgcccggcctgatccacgtgcacagaagaaagatgttccaggccaccatcagaagcgtggagaacctgcagagcagcaagagcaccagagccaccatcctggtgagactggacaccggcggccaggagggcctgcagtaccagcccggcgaccacatcggcgtgtgcccccccaacagacccggcctggtggaggccctgctgagcagagtggaggacccccccgcccccaccgagcccgtggccgtggagcagctggagaagggcagccccggcggccccccccccggctgggtgagagaccccagactgcccccctgcaccctgagacaggccctgaccttcttcctggacatcaccagcccccccagcccccagctgctgagactgctgagcaccctggccgaggagcccagagagcagcaggagctggaggccctgagccaggaccccagaagatacgaggagtggaagtggttcagatgccccaccctgctggaggtgctggagcagttccccagcgtggccctgcccgcccccctgctgctgacccagctgcccctgctgcagcccagatactacagcgtgagcagcgcccccagcacccaccccggcgagatccacctgaccgtggccgtgctggcctacagaacccaggacggcctgggccccctgcactacggcgtgtgcagcacctggctgagccagctgaagcccggcgaccccgtgccctgcttcatcagaggcgcccccagcttcagactgccccccgaccccagcctgccctgcatcctggtgggccccggcaccggcatcgcccccttcagaggcttctggcaggagagactgcacgacatcgagagcaagggcctgcagcccacccccatgaccctggtgttcggctgcagatgcagccagctggaccacctgtacagagacgaggtgcagaacgcccagcagagaggcgtgttcggcagagtgctgaccgccttcagcagagagcccgacaaccccaagacctacgtgcaggacatcctgagaaccgagctggccgccgaggtgcacagagtgctgtgcctggagagaggccacatgttcgtgtgcggcgacgtgaccatggccaccaacgtgctgcagaccgtgcagagaatcctggccaccgagggcgacatggagctggacgaggccggcgacgtgatcggcgtgctgagagaccagcagagataccacgaggacatcttcggcctgaccctgagaacccaggaggtgaccagcagaatcagaacccagagcttcagcctgcaggagagacagctgagaggcgccgtgccctgggccttcgacccccccggcagcgacaccaacagcccctag

SEQ ID NO: 13534 - DNA, 4345 bp, Artificial Sequence
  derived and/or modified sequence
actgaaactaggggcaaggagacgaagagaacatgaaagttaaactttaagatgaagaacaaagctgaacatactgatgcattggatctttggagaggatctcagaactcattgtacttaatttacaggctaaaaccttagaagaggaatttattatatcctacacaagactccagggaagcacatggccttggactgaaggctggcatctggaagctgtcagccaccagcaccttctgcagcaggaaaaggccagggctctgctggagcaggcagcagagtggacgcacagtaacatgggcaacttgaagagcgtggcccaggagcctgggccaccctgcggcctggggctggggctgggccttgggctgtgcggcaagcagggcccagccaccccggcccctgagcccagccgggccccagcatccctactcccaccagcgccagaacacagccccccgagctccccgctaacccagcccccagaggggcccaagttccctcgtgtgaagaactgggaggtggggagcatcacctatgacaccctcagcgcccaggcgcagcaggatgggccctgcaccccaagacgctgcctgggctccctggtatttccacggaaactacagggccggccctcccccggccccccggcccctgagcagctgctgagtcaggcccgggacttcatcaaccagtactacagctccattaagaggagcggctcccaggcccacgaacagcggcttcaagaggtggaagccgaggtggcagccacaggcacctaccagcttagggagagcgagctggtgttcggggctaagcaggcctggcgcaacgctccccgctgcgtgggccggatccagtgggggaagctgcaggtgttcgatgcccgggactgcaggtctgcacaggaaatgttcacctacatctgcaaccacatcaagtatgccaccaaccggggcaaccttcgctcggccatcacagtgttcccgcagcgctgccctggccgaggagacttccgaatctggaacagccagctggtgcgctacgcgggctaccggcagcaggatggctctgtgcggggggacccagccaacgtggagatcaccgagctctgcattcagcacggctggaccccaggaaacggtcgcttcgacgtgctgcccctgctgctgcaggccccagatgatcccccagaactcttccttctgccccccgagctggtccttgaggtgcccctggagcaccccacgctggagtggtttgcagccctgggcctgcgctggtacgccctcccggcagtgtccaacatgctgctggaaattgggggcctggagttccccgcagcccccttcagtggctggtacatgagcactgagatcggcacgaggaacctgtgtgaccctcaccgctacaacatcctggaggatgtggctgtctgcatggacctggatacccggaccacctcgtccctgtggaaagacaaggcagcagtggaaatcaacgtggccgtgctgcacagttaccagctagccaaagtcaccatcgtggaccaccacgccgccacggcctctttcatgaagcacctggagaatgagcagaaggccagggggggctgccctgcagactgggcctggatcgtgccccccatctcgggcagcctcactcctgttttccatcaggagatggtcaactatttcctgtccccggccttccgctaccagccagacccctggaaggggagtgccgccaagggcaccggcatcaccaggaagaagacctttaaagaagtggccaacgccgtgaagatctccgcctcgctcatgggcacggtgatggcgaagcgagtgaaggcgacaatcctgtatggctccgagaccggccgggcccagagctacgcacagcagctggggagactcttccggaaggcttttgatccccgggtcctgtgtatggatgagtatgacgtggtgtccctcgaacacgagacgctggtgctggtggtaaccagcacatttgggaatggggatcccccggagaatggagagagctttgcagctgccctgatggagatgtccggcccctacaacagctcccctcggccggaacagcacaagagttataagatccgcttcaacagcatctcctgctcagacccactggtgtcctcttggcggcggaagaggaaggagtccagtaacacagacagtgcaggggccctgggcaccctcaggttctgtgtgttcgggctcggctcccgggcatacccccacttctgcgcctttgctcgtgccgtggacacacggctggaggaactgggcggggagcggctgctgcagctgggccagggcgacgagctgtgcggccaggaggaggccttccgaggctgggcccaggctgccttccaggccgcctgtgagaccttctgtgtgggagaggatgccaaggccgccgcccgagacatcttcagccccaaacggagctggaagcgccagaggtaccggctgagcgcccaggccgagggcctgcagttgctgccaggtctgatccacgtgcacaggcggaagatgttccaggctacaatccgctcagtggaaaacctgcaaagcagcaagtccacgagggccaccatcctggtgcgcctggacaccggaggccaggaggggctgcagtaccagccgggggaccacataggtgtctgcccgcccaaccggcccggccttgtggaggcgctgctgagccgcgtggaggacccgccggcgcccactgagcccgtggcagtagagcagctggagaagggcagccctggtggccctccccccggctgggtgcgggacccccggctgcccccgtgcacgctgcgccaggctctcaccttcttcctggacatcacctccccacccagccctcagctcttgcggctgctcagcaccttggcagaagagcccagggaacagcaggagctggaggccctcagccaggatccccgacgctacgaggagtggaagtggttccgctgccccacgctgctggaggtgctggagcagttcccgtcggtggcgctgcctgccccactgctcctcacccagctgcctctgctccagccccggtactactcagtcagctcggcacccagcacccacccaggagagatccacctcactgtagctgtgctggcatacaggactcaggatgggctgggccccctgcactatggagtctgctccacgtggctaagccagctcaagcccggagaccctgtgccctgcttcatccggggggctccctccttccggctgccacccgatcccagcttgccctgcatcctggtgggtccaggcactggcattgcccccttccggggattctggcaggagcggctgcatgacattgagagcaaagggctgcagcccactcccatgactttggtgttcggctgccgatgctcccaacttgaccatctctaccgcgacgaggtgcagaacgcccagcagcgcggggtgtttggccgagtcctcaccgccttctcccgggaacctgacaaccccaagacctacgtgcaggacatcctgaggacggagctggctgcggaggtgcaccgcgtgctgtgcctcgagcggggccacatgtttgtctgcggcgatgttaccatggcaaccaacgtcctgcagaccgtgcagcgcatcctggcgacggagggcgacatggagctggacgaggccggcgacgtcatcggcgtgctgcgggatcagcaacgctaccacgaagacattttcgggctcacgctgcgcacccaggaggtgacaagccgcatacgcacccagagcttttccttgcaggagcgtcagttgcggggcgcagtgccctgggcgttcgaccctcccggctcagacaccaacagcccctgagagccgcctggctttcccttccagttccgggagagcggctgcccgactcaggtccgcccgaccaggatcagccccgctcctcccctcttgaggtggtgccttctcacatctgtccagaggctgcaaggattcagcattattcctccaggaaggagcaaaacgcctcttttccctctctaggcctgttgcctcgggcctgggtccgccttaatctggaaggcccctcccagcagcggtaccccagggcctactgccacccgcttcctgtttcttagtcgaatgttagattcctcttgcctctctcaggagtatcttacctgtaaagtctaatctctaaatcaagtatttattattgaagatttaccataagggactgtgccagatgttaggagaactactaaagtgcctaccccagctcatgtggattacaaaaaaaa

SEQ ID NO: 13535 - protein, 188 aa, Artificial Sequence
  derived and/or modified sequence
MALTFALLVALLVLSCKSSCSVGCDLPQTHSLGSRRTLMLLAQMRRISLFSCLKDRHDFGFPQEEFGNQFQKAETIPVLHEMIQQIFNLFSTKDSSAAWDETLLDKFYTELYQQLNDLEACVIQGVGVTETPLMKEDSILAVRKYFQRITLYLKEKKYSPCAWEVVRAEIMRSFSLSTNLQESLRSKE

SEQ ID NO: 13536 - DNA, 564 bp, Artificial Sequence
  derived and/or modified sequence
atggccctgacctttgccctgctcgttgctctgcttgtcttgtcatgtaagtcatcttgctctgttggctgcgacctccctcagacacactctctgggatcacgccgcactcttatgttgttggcgcaaatgagaagaatatcactcttcagctgcctgaaagacagacacgattttggcttcccacaggaggagtttggaaatcagttccagaaagcagaaacgatccccgtcctccatgagatgattcagcagatatttaatctgttttctacgaaagatagctccgccgcatgggacgaaaccctgctcgataaattctacaccgagctctaccagcagctgaacgacttggaggcctgtgttatccagggcgttggggtcactgaaacccccctgatgaaggaggattcaattctggcagtcagaaagtattttcagcggatcactctttaccttaaggaaaagaaatatagcccctgcgcatgggaagtcgtgagggcagaaattatgaggtctttctccctgtccactaatctgcaggagtccctcagatcaaaagag

SEQ ID NO: 13537 - DNA, 564 bp, Artificial Sequence
  derived and/or modified sequence
atggcgctgacctttgcacttcttgtcgcactgctggtcctctcatgcaagtcctcgtgttccgtgggatgcgatctgccacaaactcatagccttgggagcagaagaactctgatgctcctggctcagatgcggcggatcagcctgttctcgtgtctgaaggacagacacgattttggtttcccgcaagaggaatttggcaaccaatttcagaaggcagaaaccatcccagtgctccacgaaatgatccaacaaatctttaacctgttctccaccaaggattcatccgccgcctgggacgaaaccctgctggacaagttctatactgaattgtaccagcagctgaatgatctggaggcctgtgtgatacaaggagtgggagtgactgaaacccctcttatgaaggaagattcgattcttgcagtccggaagtactttcagaggataaccctgtacctgaaggagaagaagtattcgccttgcgcgtgggaagtggtgcgggcagaaatcatgcgttccttctccctttcaactaacctgcaagagagcctgcgatcaaaagaa

SEQ ID NO: 13538 - DNA, 564 bp, Artificial Sequence
  derived and/or modified sequence
atggcccttacctttgcccttcttgtggcgcttcttgtgctgtcctgcaaatcgagctgcagcgttggctgcgacctgccccagactcactcactgggaagcagaagaacccttatgcttcttgcacaaatgcgccgaatttcactgttctcctgcctgaaggataggcatgactttggtttccctcaggaagaattcggcaatcagtttcaaaaggcagaaactatcccagtcctgcacgagatgatccagcaaatctttaatctcttctcgactaaggattcctcggcagcatgggacgagactcttcttgataagttctacaccgaactctaccaacagcttaatgatctggaagcatgtgtgatccagggtgtgggggtcactgaaaccccattgatgaaggaggattcgatcctcgcggtccgcaagtactttcaaagaataaccctgtaccttaaggagaagaagtattcgccctgtgcctgggaagtcgtgagagcagagattatgagatcattttccctttccacgaatcttcaggaatccctcaggtcgaaagaa

SEQ ID NO: 13539 - DNA, 564 bp, Artificial Sequence
  derived and/or modified sequence
atggcccttacattcgctctgctcgtcgcgctactagtccttagttgtaaaagtagctgcagcgtgggttgtgatttgcctcagacgcactctctgggctcgcgccggactctcatgctcctggcacagatgcggcgaatcagcctcttttcctgtctgaaggataggcatgatttcggatttccccaggaggaatttggaaaccagttccagaaggctgagactataccggtgttgcacgagatgattcagcagatcttcaacttgttcagcacaaaggactcatccgccgcttgggatgagactctcctagataaattctatactgaactgtaccagcagttgaacgatttggaagcctgtgttatccagggggtcggggtgaccgaaaccccactaatgaaggaggattccatcctggctgtgcggaaatacttccagagaattaccctttacctgaaagaaaagaaatacagcccctgcgcatgggaagttgtgcgcgcggaaattatgaggtccttctcgctgagtacgaatctccaggaaagcttgcggagcaaggaa

SEQ ID NO: 13540 - DNA, 564 bp, Artificial Sequence
  derived and/or modified sequence
atggccttgacctttgcgttgttggtcgctctgctcgtactctcctgcaaatcttcatgctccgtgggctgcgatcttccgcaaactcactcgcttggatcgcggcgcaccctgatgctgctggcgcagatgagaagaatcagcctgttcagctgtctcaaagatcgccatgacttcggcttcccccaagaggagttcggtaaccaattccaaaaagcagagactatcccggttttgcatgaaatgatccagcaaatcttcaatctcttttcgaccaaggactcttcggcagcgtgggacgagactctgctcgacaaattctacactgaactgtaccaacagctcaacgacttggaggcctgcgtgatccagggcgtgggagtgaccgaaaccccgcttatgaaggaagatagcatcctggcggtccgcaagtactttcagcgaatcactctctaccttaaagaaaagaagtactcaccatgtgcttgggaagtggtgcgggccgaaatcatgcggtcgttctcgctctcgactaatcttcaggaatccctgagatcgaaggaa

SEQ ID NO: 13541 - DNA, 564 bp, Artificial Sequence
  derived and/or modified sequence
atggctctgacttttgcattacttgttgctcttctcgtgttgtcttgtaaatccagttgttccgtcgggtgtgatcttccccagactcactcccttgggtccagacgcactcttatgctcctggctcagatgaggcggatctctttattctcctgtctgaaagataggcacgatttcggattcccccaagaagaatttgggaaccagttccagaaagccgaaacaatcccagttttacacgaaatgatacagcagatatttaacctgttttccacgaaggatagtagtgccgcctgggatgaaacacttctagataagttctatacagaactgtatcagcagttaaatgacctggaagcttgtgttatacagggggtgggagtaacagaaacacctctcatgaaagaagattccatccttgccgtgagaaaatattttcagcggataactctttatctaaaagaaaaaaaatattcaccatgtgcttgggaagtggtgcgcgcagaaataatgcggtcgttttcgctctctactaacctgcaggaaagtctacggtccaaagag

SEQ ID NO: 13542 - DNA, 564 bp, Artificial Sequence
  derived and/or modified sequence
atggctctgacttttgcgctgctcgtggccctgctggtcctgtcatgcaaaagctcatgcagcgtggggtgcgatctgccacaaactcactccctgggctcaagacgcaccctcatgctccttgcccagatgagacgcattagtcttttctcctgcctcaaggatcggcacgactttggcttcccgcaagaggaatttggaaaccagttccaaaaggccgaaactattccggtgctgcacgagatgatccaacaaatcttcaacctcttctccaccaaagactcgagcgccgcgtgggacgaaaccctgctggacaagttctacaccgaactgtaccagcaacttaacgacctcgaagcgtgtgtgatccagggagttggggtgactgaaactcctcttatgaaagaggactccatcctggcagttcggaagtatttccagcggatcacgctctacctgaaagaaaagaagtactcgccgtgtgcgtgggaagtcgtgagggcagaaattatgaggagcttttcgctgtccaccaacctgcaggagagcctcagatcaaaggaa

SEQ ID NO: 13543 - DNA, 564 bp, Artificial Sequence
  derived and/or modified sequence
atggcgttgaccttcgctcttctggtggccttgttggtgttgagttgcaagtccagttgttctgttggttgtgaccttccgcaaacccatagcctgggctcccgcagaactcttatgctgctggcgcaaatgcgccgaatcagccttttcagttgcctaaaggaccggcatgatttcggtttcccacaggaggagttcggcaatcagttccaaaaagctgaaacaatcccagttctccacgagatgatccaacagatttttaatctcttctcgactaaagacagctctgcggcctgggacgaaaccctactggacaaattttacactgagctgtaccaacaactgaatgatctcgaggcttgtgtcatccaaggcgtcggagtaaccgagactcctttgatgaaagaggattcgattctagccgttcggaaatacttccaacggattaccttgtatctaaaggagaaaaagtattctccgtgtgcctgggaagtggtccgtgcggagatcatgcgatcctttagtctaagcactaacctgcaggaatcgttgcgttcaaaggag

SEQ ID NO: 13544 - DNA, 564 bp, Artificial Sequence
  derived and/or modified sequence
atggccctcacgtttgcattgctcgtcgcactgctcgtccttagctgtaagtcgtcatgctcggtgggctgtgatcttcctcaaactcattctcttggtagcagacggactttgatgctgctggcacagatgcggagaatttctcttttctcatgtctgaaggaccgtcacgattttggatttcctcaagaagagtttgggaaccagtttcaaaaggccgagactattcccgtgctgcatgaaatgattcaacagattttcaacctcttcagcaccaaggattcatcggcggcctgggacgaaacgctgcttgacaagttttacactgaactttatcagcaactgaacgatcttgaggcctgcgtgattcaaggagtcggagttactgaaacccctctgatgaaggaggactccatactcgcagtgcgcaaatacttccaacggattaccctttaccttaaagagaagaagtacagcccatgtgcatgggaagtggtcagagcagagattatgcgttcgttcagccttagcaccaatttgcaagaatcgctcaggtccaaagag

SEQ ID NO: 13545 - DNA, 564 bp, Artificial Sequence
  derived and/or modified sequence
atggcgcttactttcgcgttgctggtggcactgctggtgctgtcgtgcaagtctagctgctccgtgggatgcgatctgccccaaacgcactcgctgggctcgcgcagaactctgatgctgcttgcgcaaatgagacggatcagcctgttctcatgtctgaaagacaggcacgacttcggattcccgcaggaagagtttggaaatcagtttcaaaaagccgagactattccggttttgcatgagatgattcaacagatctttaatcttttcagcactaaggattcttccgcagcttgggatgaaaccctgctcgacaagttctacaccgagctttaccagcagctgaacgatcttgaagcctgtgtcatccagggagtgggcgtcaccgaaacccctctcatgaaagaagattcgatcctggctgtgcgcaagtactttcagcgcatcaccctgtacctgaaggagaaaaagtactccccgtgtgcttgggaggtggtgcgggcagaaatcatgcggtcatttagccttagcacgaaccttcaagaatccctcagatcgaaggaa

SEQ ID NO: 13546 - DNA, 564 bp, Artificial Sequence
  derived and/or modified sequence
atggcactcacttttgcgttgcttgtggccttgctcgtgctctcatgcaagtcgtcctgttcggtaggttgtgatctgcctcagactcactccttgggctcgagacggactcttatgctgctggcccagatgcgcaggattagccttttctcttgtctcaaggatagacatgacttcggatttcctcaggaagaatttgggaatcaatttcaaaaagcagaaaccattcccgtgctgcatgaaatgattcaacagatattcaacctgtttagtacgaaagactcctcagccgcgtgggatgagacgttgctggacaagttttacaccgaactctaccagcaactgaacgatctggaagcgtgtgtgatccaaggggtgggggtgacggaaaccccccttatgaaggaggatagcatccttgcagtccgtaagtatttccaacgaattaccctctacctcaaggaaaagaaatactcgccatgtgcatgggaagtggttagggcagagataatgaggagctttagcttgtcaaccaatctgcaagagtcccttcgttccaaggag

SEQ ID NO: 13547 - DNA, 564 bp, Artificial Sequence
  derived and/or modified sequence
atggcattgacctttgcattgttggtcgccctgctcgtgctgtcgtgtaagtcatcgtgttcagtgggctgcgacctgcctcaaacccatagccttggatcccgccggacccttatgctgctggcacaaatgcggagaattagcttgttttcgtgcctgaaggacaggcacgactttggctttcctcaggaggaatttggaaaccaatttcaaaaagcagaaactattccagtccttcatgagatgatccagcagatattcaacctgttttcgaccaaggactcctcggcagcgtgggacgaaactctgctcgacaagttttacaccgagctctaccaacaactcaacgacctggaagcctgcgtcattcagggtgtgggggtcactgaaaccccccttatgaaggaggacagcattctggcggtgagaaagtacttccagaggatcactctttaccttaaggagaaaaagtacagcccatgtgcgtgggaagtggtgagggcggagataatgcgatcgttctccctgtccacgaatcttcaagagagcctgcgtagtaaagaa

SEQ ID NO: 13548 - DNA, 564 bp, Artificial Sequence
  derived and/or modified sequence
atggcccttacctttgcgttgcttgtagctctgctcgtgctgtcatgcaaatcatcctgcagcgtgggttgcgacctgcctcagactcactccctcggctcccgcaggactctcatgctcctggcccaaatgaggcgcatctccctgttctcgtgccttaaggaccggcacgatttcgggttcccgcaggaagagtttggaaatcagttccagaaggcagaaactatccctgtcctgcatgaaatgatccagcagatcttcaacctgttcagtaccaaggacagcagcgcagcctgggatgagactctcctggacaagttctacacggagctgtaccagcagctcaatgacctggaagcatgtgtcatccaaggagtgggagtgaccgagactccactcatgaaggaggattccattctggccgtgcggaagtatttccagcggatcactctgtacctgaaggagaaaaagtactccccatgtgcctgggaggtggttcgcgctgagatcatgagatccttctccctcagcaccaatcttcaggaaagcctgcgctctaaggag

SEQ ID NO: 13549 - DNA, 564 bp, Artificial Sequence
  derived and/or modified sequence
atggcgctgaccttcgcgctcctggtggcccttctggtgctttcatgcaagtcgtcttgcagcgtgggatgcgacctgccgcagacccactccttgggatcaagacgcaccttgatgctgctggctcagatgagacgaatcagcctgttctcctgcctgaaggaccgccatgacttcggtttcccacaagaggaattcggaaaccagttccaaaaggcagaaaccatcccggtgctgcacgaaatgatccaacagatctttaacttgttttcaactaaagatagctcagccgcgtgggatgaaaccctccttgacaaattctacactgaactgtaccagcagctgaatgaccttgaggcatgcgtgatccagggagtcggggtgaccgagactcctctgatgaaggaagattccatcttggcggtccgcaagtacttccagagaatcaccttgtacctcaaagagaagaagtatagcccctgtgcgtgggaagtggtgcgcgccgaaatcatgagatcattcagcctgtccacgaatttgcaggagtcgctccgctctaaggag

SEQ ID NO: 13550 - DNA, 564 bp, Artificial Sequence
  derived and/or modified sequence
atggcgctgaccttcgccttgctcgtggcactgctggtgctgtcctgcaagagctcctgcagcgtggggtgcgatctgcctcagactcattccctcggaagccgacggactctcatgctgctcgctcagatgcggcggatttcgttgttctcctgccttaaggaccggcacgactttgggttcccgcaggaagagtttggaaatcagttccagaaggcggagactatcccggtcttgcacgaaatgatccagcagattttcaatttgttctcgaccaaggattcgtcggctgcctgggacgaaaccctgctcgacaagttctacacggaactctaccagcaactcaacgatctggaggcatgtgtgatccagggagtgggggtcaccgaaacccccctgatgaaggaggactcgatcctggcagtgaggaaatacttccagcggatcaccctttacctgaaggaaaagaagtactccccatgtgcttgggaagtggtcagagccgagatcatgaggagcttctccctctctactaaccttcaggaatctctcagatcgaaggag

SEQ ID NO: 13551 - DNA, 564 bp, Artificial Sequence
  derived and/or modified sequence
atggctctcacctttgcgctcctggtggcactgctggttttgtcatgtaaatcttcgtgctctgtgggttgtgatctgccacagactcattcccttggttctcgccgaacgctgatgcttcttgcccagatgagaagaatctcgctcttctcctgtcttaaggataggcatgacttcgggttccctcaagaagaatttggtaaccaatttcagaaagccgaaactattccagtgctccatgagatgatccaacagatcttcaacctgttttcgacgaaggattccagcgcagcatgggatgagactctcctcgataagttttacactgagctttaccagcaacttaacgaccttgaagcatgtgtcattcaaggggtgggagttaccgaaactcctctgatgaaggaggattccattctcgcggtgcggaagtactttcagagaattactctgtacttgaaggagaaaaagtattcgccttgcgcatgggaggtggtgcgggcagagattatgagatccttttcactgtcaaccaatctccaagagtcgcttagatcgaaagaa

SEQ ID NO: 13552 - DNA, 564 bp, Artificial Sequence
  derived and/or modified sequence
atggcccttacctttgctctgctggtggcgctgctcgtgctttcttgtaagtcatcatgctccgtggggtgcgatcttccacaaacacattcactcggctcacggcggactttgatgttgcttgcccagatgaggcgcattagcctgttttcctgtctgaaagacaggcacgacttcggatttccacaagaggagtttggaaatcagttccagaaagccgaaaccattcccgtgctccacgagatgatacagcagatcttcaacctgttctcaacgaaggattcttctgctgcctgggacgagacactgctggataaattctatacagaactttatcagcaactgaatgacctcgaggcgtgcgtgatacagggggtcggggtgacagaaacccctctgatgaaggaagacagcatccttgccgtgcgaaaatactttcagaggattaccctctacctcaaggaaaaaaaatacagcccctgtgcatgggaggtggtcagggccgagattatgcggagttttagtctctcaacgaacctgcaggaaagcctcagaagtaaagag

SEQ ID NO: 13553 - DNA, 564 bp, Artificial Sequence
  derived and/or modified sequence
atggcgcttaccttcgcactgctggtggcccttcttgtgctctcctgtaaaagctcctgttcggtggggtgtgatctgccgcagacccattcacttggatcgaggagaactctgatgctgctggcacaaatgaggcggatttctctgttttcatgtctgaaggacagacatgactttggattccctcaggaagagttcggaaatcagttccaaaaggctgaaaccataccagtgctccacgagatgattcagcagatcttcaacctgttttccaccaaggatagtagcgcggcctgggatgaaactcttctggacaagttttacaccgaactgtatcaacaactgaacgatctggaagcatgcgtgatccaaggtgtcggcgtgaccgaaacgccccttatgaaggaggactcgatacttgccgtccgcaagtacttccagaggatcactctgtacctcaaggaaaagaagtatagcccatgtgcatgggaagtggtccgtgcagaaatcatgagatctttttcactgtcaaccaacctgcaggagtcgcttaggtcaaaggaa

SEQ ID NO: 13554 - DNA, 564 bp, Artificial Sequence
  derived and/or modified sequence
atggccctaaccttcgctctgctggtcgcactgcttgtgctgtcttgtaagtctagctgctcagtaggatgcgatctgcctcaaacacattccctgggatctcggcgaactcttatgctactggcccagatgcgccgcatcagtctgttctcctgtctgaaagatcgtcacgacttcggctttccccaggaggaatttggtaatcagtttcaaaaagccgagacaatccctgtcctgcacgagatgatacaacagatattcaatctcttctccacgaaggacagctcagccgcctgggacgagactctgctggacaagttctacacagaactgtaccagcaactgaatgacctggaggcatgcgtaatacaaggagtaggcgtaaccgaaacacctctgatgaaggaggatagtattctcgccgtcaggaagtattttcagcgcataactttgtacctcaaagaaaaaaaatactcaccatgcgcgtgggaagttgtacgtgccgaaatcatgcggtctttctccctgtcgacaaatctgcaggagagtttaagaagtaaggaa

SEQ ID NO: 13555 - DNA, 564 bp, Artificial Sequence
  derived and/or modified sequence
atggcattgacctttgcgctgcttgtggctctcctggttctttcatgtaagtcatcgtgttccgtgggttgcgatctccctcagactcacagtctgggctcccgccggactctgatgctgctggcgcaaatgaggcgcatctcactgtttagctgtctgaaggacagacatgattttggattccctcaggaagaattcgggaaccagttccaaaaggccgaaactattcctgtgctgcacgaaatgattcagcagattttcaacctcttttcgaccaaggattcgtccgcagcatgggatgaaactttgctcgataagttttacaccgaactctaccaacagcttaacgaccttgaggcctgtgtcattcaaggtgtcggagtcaccgaaactccactgatgaaggaagattcgattctcgcagtgagaaagtattttcagcgcataactctttacctcaaagaaaagaagtacagcccatgtgcgtgggaagtggtgagggcagaaatcatgcggtcattctcgctttcgactaacctccaggaaagcctgaggtcgaaggag

SEQ ID NO: 13556 - DNA, 564 bp, Artificial Sequence
  derived and/or modified sequence
atggccctgaccttcgctctcctggtcgcgttgttagtgcttagctgtaaatcttcgtgctcagtcggttgtgatttacctcagacacactcactcggcagcaggaggaccctaatgcttctggctcaaatgagaagaatctctttattttcctgcttgaaagaccggcacgactttggattcccacaggaagagttcgggaaccagtttcaaaaggcagagaccataccagtcctgcacgagatgatccagcagatctttaatctgttcagcacgaaagactctagcgctgcatgggacgaaaccttgctcgataagttttataccgaactttaccagcagctgaacgatctggaagcctgtgtcatccagggtgtcggtgtgaccgagacacccctgatgaaggaagacagcattttggctgtccggaaatacttccagagaatcacgttatatctcaaagaaaagaagtacagcccgtgcgcctgggaagttgttagggccgaaatcatgcggtccttcagtctgtcgaccaatctgcaggaaagccttcggagcaaggaa

SEQ ID NO: 13557 - DNA, 564 bp, Artificial Sequence
  derived and/or modified sequence
atggcactaactttcgcactacttgttgcactcctggtcctcagctgtaaaagctcctgtagcgtgggctgcgaccttcctcaaactcacagtctcggaagccggagaactctgatgctgctggcccagatgcgtcgaatttctctgttctcctgcctaaaggatagacacgatttcggattcccacaggaggagtttggcaatcagtttcaaaaagctgagaccatccccgtcctgcatgaaatgatccagcagatcttcaatttattttccacaaaagactctagcgccgcttgggatgagactttattagacaaattctatacagaactttaccagcagctcaatgaccttgaggcctgcgtgatccaaggcgttggagttaccgagacccccctcatgaaagaggattctatattagctgtccgcaagtattttcagcggatcacactgtacctcaaggagaagaagtactcaccgtgcgcgtgggaggtggtgcgggctgaaatcatgcgctccttcagcctttcaactaaccttcaggaatcattacggtctaaagag

SEQ ID NO: 13558 - DNA, 564 bp, Artificial Sequence
  derived and/or modified sequence
atggccctgacttttgcactcctggtggctctcctcgtactcagctgcaaatcctcttgttcagtgggctgtgatcttcctcaaacccattcacttggatcccgaagaaccctgatgcttctggcacagatgcgaagaatttcgctcttctcgtgcctcaaggatcggcacgacttcggattcccacaagaggaatttggcaatcaatttcaaaaggcggagactatccctgtcctgcatgagatgattcaacagatctttaatctctttagcaccaaagattcgagcgcagcctgggatgaaactctgctggataagttttacactgagctttatcagcaacttaacgacctggaggcctgtgtgatccaaggggttggtgtgactgaaacccctctgatgaaagaggacagcatccttgccgtgcggaagtactttcaaagaattaccttgtaccttaaagaaaagaagtactcgccgtgcgcatgggaggtggtgcgagctgagattatgaggtccttttccctgtcgaccaacctccaagaatcactccgctcgaaggag

SEQ ID NO: 13559 - DNA, 564 bp, Artificial Sequence
  derived and/or modified sequence
atggccctgaccttcgccttgctggtagccctactggtgctctcctgtaagagttcatgctcagtgggatgtgatctgccacagactcactcacttggcagccgcagaacactaatgctattagcgcagatgaggcggataagtctgttttcttgcctgaaggatcggcatgacttcggtttcccccaggaagagtttggcaaccagttccagaaagctgagaccattcctgtgctgcatgaaatgatccagcagatcttcaatctattctctacaaaagatagctccgcagcatgggacgaaaccctgctggataagttttacacagagctgtatcaacagcttaacgacctggaagcatgcgtgatacaaggggttggggtgacagaaacaccactgatgaaagaggactctattctggctgtccgtaaatacttccagcgtattactctgtacttaaaggagaagaagtacagtccttgtgcctgggaagtggtgcgagctgagatcatgcgtagtttctccttgtccacaaacctccaggagagcctaagatccaaagag

SEQ ID NO: 13560 - DNA, 564 bp, Artificial Sequence
  derived and/or modified sequence
atggccctgacgtttgccttgctcgtagcactgctggtgctgtcgtgcaagagcagctgttccgttggatgcgacctccctcagacccactcactgggctcccggcgaaccctcatgcttctagcccaaatgcgtagaatctccctgttctcttgtctgaaggatcgccatgatttcggttttccacaagaagaatttgggaaccagtttcaaaaggccgaaacgatccctgtccttcatgagatgatccagcaaatcttcaacttgttctccactaaggatagttccgcggcttgggatgagactctgctggacaagttctataccgaactgtaccaacagctcaacgacttggaggcatgcgtcattcagggggtgggagtgaccgaaactcccctgatgaaagaagattccatattagccgtcaggaaatacttccagaggatcacgctctacctaaaggagaaaaagtactcaccttgcgcatgggaggtggtgcgcgccgaaatcatgaggagcttttctctgtccacaaatctgcaggagtccctgcgctcaaaggag

SEQ ID NO: 13561 - DNA, 564 bp, Artificial Sequence
  derived and/or modified sequence
atggcacttaccttcgctcttctcgtggccctgctggtcctgtcctgtaagagctcctgcagcgtagggtgcgacctgcctcaaacacacagtctggggtctcggagaaccctcatgctgttagcccagatgagacggatcagcctgtttagttgcctgaaggacagacacgatttcgggtttcctcaagaggagtttggtaaccagtttcaaaaggctgaaaccattcctgtgcttcacgaaatgatccagcagatatttaacctgttcagcaccaaggattcatctgctgcctgggacgagacgctccttgataagttttatacggagctctatcagcaactcaacgatctggaggcctgtgtaatccaaggcgtcggcgtgactgaaactcccttgatgaaagaagactctatactggcggtgcggaaatatttccaaaggattaccctgtatttgaaagaaaaaaagtactctccctgcgcttgggaggtggtgagggcggaaattatgagatccttttccctatctacaaacctgcaggagtctttacggtctaaagag

SEQ ID NO: 13562 - DNA, 564 bp, Artificial Sequence
  derived and/or modified sequence
atggcgctgaccttcgccttgctcgtggcgctgctggtgctcagctgcaagagttcttgctccgtcggatgcgacttgccgcaaactcactcacttggctccaggagaaccctgatgctgctcgctcaaatgagacggatcagcttgttctcttgcctgaaggaccgccacgatttcgggttcccgcaagaagagtttggaaaccagtttcaaaaggcggaaactatcccggtgctgcatgagatgatccaacagatcttcaacctgttctcgaccaaggattcgtccgccgcttgggacgagactttgttggataagttctacaccgaactgtaccaacaactcaatgacctggaagcgtgcgtgatccagggagtcggagtgactgaaacccctctgatgaaggaggactcaattctggctgtgcgcaaatactttcagcgcatcacgctgtacctgaaagagaaaaagtacagcccatgcgcgtgggaagtggtgcgggccgaaatcatgcggtcgttctcactgtccaccaacctgcaggaatccctgcggtcgaaagag

SEQ ID NO: 13563 - DNA, 564 bp, Artificial Sequence
  derived and/or modified sequence
atggcactgacttttgcacttttagttgctcttttggtactttcatgtaagtcaagctgctctgtgggctgcgacctcccacagacccattccttaggctccagacgcactcttatgctgctagcccagatgagaaggatatctctcttctcctgcctgaaggaccggcacgatttcgggttccctcaggaggagttcggaaaccagtttcagaaagcggaaacaattcctgttctgcacgagatgatccaacagatcttcaatctgtttagcaccaaagacagcagtgcagcctgggacgaaaccttactggacaagttctataccgaactgtaccaacagttgaatgaccttgaagcttgcgtcatccaaggggtgggggtgactgaaactccactaatgaaggaggattccatactcgcagtgagaaagtactttcagaggataacactgtaccttaaagagaaaaaatactctccctgtgcatgggaagtggtccgcgccgagatcatgcgcagctttagcctgagtaccaatttgcaggagagcttgaggagtaaggag

SEQ ID NO: 13564 - DNA, 564 bp, Artificial Sequence
  derived and/or modified sequence
atggcactgacctttgctctgctcgttgctctgctggtgttgtcctgcaaaagctcctgttcagtgggatgcgatctccctcagacccattccctgggctcaagacgaacactgatgctgctcgcccagatgcggagaattagcctatttagttgtctcaaagaccggcacgactttggtttcccacaagaagaatttgggaaccagttccagaaagcagaaacaattcctgtgctccatgagatgatccagcagatcttcaatctgttctcaaccaaggatagttctgctgcctgggacgagaccttgctggataagttttataccgaactctatcagcagttgaatgacctggaagcctgcgtgatccagggggtgggggtgacagaaacaccactgatgaaggaggactctatcttggctgtcaggaagtattttcaaaggatcacactctatctgaaggagaagaagtactcaccttgtgcgtgggaagtggtgagagctgaaatcatgaggtccttttcactgtccaccaacctccaggaaagtctgcgctccaaggag

SEQ ID NO: 13565 - DNA, 564 bp, Artificial Sequence
  derived and/or modified sequence
atggccctgactttcgcgttgctcgtggcgttactcgttctgtcctgcaaatcctcttgttctgtagggtgtgatttgcctcagacgcattctctaggctctcgtaggacgctgatgctgttggcccagatgagaagaatctccctcttttcttgcctgaaagaccgtcacgattttggcttcccacaggaggaatttggcaatcagttccagaaagctgaaaccatcccggtactccatgaaatgatacagcagatcttcaacttgttcagcactaaagattcttctgctgcgtgggacgaaacgctattggacaagttttacacagaactttaccaacagcttaatgacctggaagcctgcgtcatccagggagtgggtgtgacagaaactcctctgatgaaggaggattctattctggccgttcgtaaatatttccaacgcatcaccctctatttgaaagagaagaagtatagcccctgtgcctgggaagtggttcgtgctgaaattatgcggagtttttctctctctaccaacctccaagagtcactgaggtcaaaagag

SEQ ID NO: 13566 - DNA, 564 bp, Artificial Sequence
  derived and/or modified sequence
atggctctgacttttgcacttctcgttgccctcttggtcctcagctgtaagtccagctgttctgtcggatgcgacctgccccaaactcactcactcggcagcagaagaactcttatgctgcttgctcagatgcgccgtattagcctgttctcctgtctgaaggaccgtcacgatttcggcttccctcaagaagagtttggcaaccagttccagaaggcagagaccattcctgtgctgcatgaaatgatccagcaaatcttcaacctgttcagcaccaaggatagcagcgcagcctgggacgagactctcctggacaagttctacacagagctctaccagcaactaaatgacctggaagcttgtgtgattcagggcgttggagttacggaaacgcctctgatgaaagaagattcaatcttagcggtgcgcaaatacttccaaagaatcactctttacctcaaagaaaagaaatatagtccatgcgcctgggaagtcgtgagggctgagatcatgcggagtttcagccttagtaccaacctgcaggaaagcctcaggtcaaaggag

SEQ ID NO: 13567 - DNA, 564 bp, Artificial Sequence
  derived and/or modified sequence
atggcactgactttcgcactcctggtcgcccttctggtgctctcctgcaagtcctcctgttctgtcggttgtgatcttccccagactcattcacttggatcgcgtcgcacccttatgctcctcgcccagatgagaagaatttcacttttctcctgccttaaggatcggcacgactttggattccctcaagaagagtttggcaaccaatttcaaaaagcggaaaccatacctgtgcttcatgagatgattcaacagatctttaacctcttttcgaccaaggactcgtcagcggcgtgggatgaaacgctcctggacaagttttacactgaactgtaccaacaactgaatgatctggaggcctgtgtcatccagggagttggagttactgaaaccccgctcatgaaagaagattccattcttgcagtcagaaagtatttccagcgaataacgctttaccttaaggagaagaagtacagcccatgtgcttgggaagtggtgagagcagagattatgagatccttctcgctgtcgactaatcttcaggagagcctgagatcgaaggaa

SEQ ID NO: 13568 - DNA, 564 bp, Artificial Sequence
  derived and/or modified sequence
atggctctgacctttgccttgctggtggccctgcttgtcctgtcgtgtaagtcgtcatgctcagtaggatgtgatctgccacagactcattcgctcggtagtcgtagaactctgatgctgctggcacaaatgagacgcattagcctctttagctgtctcaaggatcgccatgacttcgggtttcctcaggaagaatttggaaaccagttccagaaggcagagactatacccgtgttgcacgaaatgattcaacagattttcaacctttttagcaccaaggactcatctgcagcatgggatgaaactctgcttgataagttttacaccgagctgtaccaacaactgaacgacctcgaggcgtgcgtaattcaaggcgtgggcgtgacggagactccactgatgaaagaagattccatcctggccgtccgcaagtactttcaaaggatcacgctttatctgaaagaaaagaaatactcgccgtgtgcttgggaagtggtgagagctgagatcatgcgatcattctcgctttcaaccaatctgcaagagtcgcttcggtcaaaagaa

SEQ ID NO: 13569 - DNA, 564 bp, Artificial Sequence
  derived and/or modified sequence
atggcgttaacgtttgcgttactagttgcgctattagttctatcgtgtaaatcgtcgtgttcggtaggttgtgatttaccgcaaacgcattcgctaggttcgcgacgtacgttaatgctactagcgcaaatgcgacgtatatcgctattttcgtgtttaaaagatcgtcatgattttggttttccgcaagaagaatttggtaatcaatttcaaaaagcggaaacgataccggttctacatgaaatgatacaacaaatatttaatttattttcgacgaaagattcgtcggcggcgtgggatgaaacgctactagataaattttatacggaattatatcaacaactaaatgatttagaagcgtgtgtaatacaaggtgtaggtgttacggaaacgccgttaatgaaagaagattcgatattagcggttcgaaaatattttcaacgaataacgctatatctaaaagaaaaaaaatattcgccgtgtgcgtgggaagtagtacgtgcggaaataatgcgatcgttttcgttatcgacgaatttacaagaatcgctacgatcgaaagaa

SEQ ID NO: 13570 - DNA, 564 bp, Artificial Sequence
  derived and/or modified sequence
atggccctgacctttgccctccttgtggcactgctcgtgttatcctgcaagagctcctgctctgtgggctgcgatctgccgcaaacacacagtcttggttcacgccgcactttgatgctgctggcacagatgagacgcatctctctgttcagctgtcttaaggaccgccatgattttggctttcctcaagaggagttcggcaaccaattccagaaagccgagacaatcccagtgctccatgagatgatccagcaaattttcaacctatttagtactaaagatagcagcgcagcttgggacgagactctgctagacaaattttacactgaactgtatcagcagctgaacgacctcgaagcctgtgtaatacagggtgtgggcgtgactgagacaccgctgatgaaggaggatagtattcttgctgtaaggaagtacttccaacggattacactgtacttaaaagagaagaagtattcaccatgcgcatgggaggtcgtaagggctgagatcatgagaagtttttccttatcgaccaacctgcaggagtctctgcggagcaaagag

SEQ ID NO: 13571 - DNA, 564 bp, Artificial Sequence
  derived and/or modified sequence
atggcactaacattcgcccttctggtggcgttactggttctgtcatgcaagagttcttgctcagtgggctgcgacctgccccaaacacactctctggggagtagacgtacacttatgctgctggcgcaaatgcgtcgaatcagcctgtttagctgtctgaaggataggcacgactttgggtttcctcaagaagagttcggcaaccagtttcagaaagcagaaacgatacctgtgcttcacgagatgattcagcagattttcaacctattctccacaaaggactcatccgcagcctgggatgaaacactcttggataagttctatacggagctgtatcagcagctgaacgacctggaagcttgcgttattcagggcgtcggagtaacagagacacccctgatgaaggaagattcgattttggccgtgcgaaagtatttccagcggattaccctatacctcaaggagaagaagtattctccttgtgcctgggaggtggtccgcgcagagatcatgcggagttttagtttgtcgactaatttgcaagaatccctgcggagcaaggag

SEQ ID NO: 13572 - DNA, 564 bp, Artificial Sequence
  derived and/or modified sequence
atggcattgactttcgcactgcttgttgctctcctggtccttagctgtaagagtagctgtagcgtgggctgtgatcttccacagacccactcccttggcagcagaagaacactgatgttgttggcacagatgagaagaatcagcctgttctcatgtcttaaggataggcacgattttggttttccacaggaagagttcgggaaccagtttcagaaggcagagacaatacctgttcttcacgagatgatccagcagatcttcaacctgttcagcaccaaagattccagcgctgcttgggatgagaccttgcttgataagttctacactgagctgtaccagcagctcaacgacctggaggcctgtgtgattcaaggagtgggtgtgaccgaaactccactgatgaaagaggactcaatactggcggtacgaaagtacttccaaagaatcacactctatctgaaggaaaagaagtacagtccttgtgcctgggaggttgtacgtgctgaaataatgagaagcttctccttgtccactaaccttcaggaaagccttcggagcaaggag

SEQ ID NO: 13573 - DNA, 564 bp, Artificial Sequence
  derived and/or modified sequence
atggccctgacgtttgctctcctcgttgcgctgttggtgttgtcctgcaagagctcctgctctgtgggatgtgatctccctcagacgcatagcctgggatcccgccgcacactcatgctgctggcccagatgcgacggatctcactcttctcatgcctgaaagacagacatgactttggattcccccaggaggaatttgggaaccagtttcagaaggccgagacaattccagtgctgcacgaaatgatccaacagatctttaacctgttctccactaaggattccagcgccgcgtgggacgaaaccctcctggataagttttatacagagctttaccagcaactgaatgatttagaggcgtgcgtcatccaaggggtgggtgtgactgaaacccctctcatgaaggaagactctattttggccgtgcgcaaatactttcagcgtattaccctctacctgaaggagaagaagtacagtccctgcgcatgggaggttgtgcgcgctgagatcatgaggagtttttcactgtcgacaaatctccaggagtcattgaggtctaaagag

SEQ ID NO: 13574 - DNA, 564 bp, Artificial Sequence
  derived and/or modified sequence
atggcactgacctttgccctcctagtggccttgctggtactttcctgtaagtcctcttgctctgtaggatgcgacctgccacagacccacagccttggaagtcgtcgcaccttgatgttgctggcgcagatgaggaggatttctctgttttcatgcctgaaggacagacacgacttcgggttcccgcaggaggagttcggcaatcagttccagaaggccgaaaccattcccgtgctccatgagatgattcaacagatattcaatctcttctcaaccaaagactcgtcagctgcctgggacgagacactgctcgataagttctacacagagctgtaccagcagctgaatgacctggaggcctgtgtaatccagggagtgggagtgacggaaaccccgctgatgaaggaagattcgatcctggccgtcaggaagtacttccagcgcatcacactatatctgaaggaaaagaagtatagtccatgcgcctgggaggtcgtgcgcgctgaaattatgagatcttttagcctttccacgaacctccaggagtccctgcgctcaaaagaa

SEQ ID NO: 13575 - DNA, 564 bp, Artificial Sequence
  derived and/or modified sequence
atggcactcacttttgcacttctggtggcactgcttgtgctgagctgcaagtcaagctgtagcgtgggttgcgatctcccccagactcattcgctggggtcgcggcgcaccctcatgcttctggcccagatgagaaggatttcacttttttcctgtcttaaagatcgccatgactttgggttcccacaagaagaatttggtaatcaatttcaaaaggcagaaacgattccggtgctccacgaaatgatccagcagattttcaacctgttctcgaccaaagattcttccgcggcgtgggatgagactctgcttgacaaattctacaccgaactgtaccaacaactcaatgatctggaggcctgtgtcatccaaggcgtcggagtgacggagactccactgatgaaggaggacagcattttggcagtgagaaagtacttccaacgtatcaccctgtacctcaaggaaaagaagtactccccgtgtgcttgggaagttgttcgggcggagataatgcggagcttctcactcagcactaacttgcaagaatcccttcgtagcaaagag

SEQ ID NO: 13576 - DNA, 564 bp, Artificial Sequence
  derived and/or modified sequence
atggccctcaccttcgccctcctggttgccctgcttgtgctctcatgcaaatcttcctgcagcgtgggatgcgatcttccacaaactcacagcttgggatcgcgccggacccttatgctccttgcccagatgcggcgcatctcgctgttcagctgcctgaaggacagacacgatttcggcttcccgcaggaagaattcggcaatcagttccagaaggcagaaaccattccagtgctgcacgagatgatccagcagatctttaacctcttctccactaaagactcctcagcggcgtgggacgaaaccctcctggacaaattctatactgaactgtaccagcaactgaatgatctggaggcttgcgtgatccaaggagtcggcgttactgagactccgttgatgaaagaggactcgatcttggcagtccgcaagtactttcagcgaatcaccctttacttgaaagaaaagaaatactcgccttgtgcctgggaggtggtcagagctgagatcatgagatcatttagcttgtcgacgaatctccaggaatcgctgcgatctaaagaa

SEQ ID NO: 13577 - DNA, 564 bp, Artificial Sequence
  derived and/or modified sequence
atggcattgacctttgcccttcttgtcgcactgctcgtgctgagttgtaaatcgtcatgttcagtagggtgtgatctgccccaaacccattcccttggtagccgaagaactctcatgctcctggcccagatgagaaggatatcgctcttcagctgtctcaaggacagacatgactttgggtttccacaggaggagttcggaaaccagtttcaaaaagcagaaaccatccctgtgcttcatgagatgatccaacagattttcaacctgttttcgaccaaggattcgtccgcagcctgggatgaaactcttcttgataagttctacactgaactttaccaacagctgaatgacctcgaggcatgtgtgattcaaggtgtgggagtgaccgaaacgccccttatgaaggaagattcgattctcgcagttcgaaaatacttccagagaataactctttacctcaaggaaaagaagtattcaccttgcgcatgggaggtggtgagggcggagattatgaggtccttttcgctgtcgactaacctgcaagaatcccttcgttcaaaggaa

SEQ ID NO: 13578 - DNA, 564 bp, Artificial Sequence
  derived and/or modified sequence
atggcactgaccttcgcacttcttgtggcactcctggtcctctcctgtaaatcatcttgtagcgtgggatgtgatctgccacaaactcactccctgggttcaaggcggactcttatgctgctggcgcaaatgagacggattagcttgtttagctgtctgaaggatagacatgactttggttttccacaagaagaatttgggaaccagtttcagaaagctgaaactattcccgtgctgcatgagatgatccaacagatcttcaatttgttttccaccaaggatagctcagcggcctgggatgaaacccttctggataagttctacaccgaactctaccagcagcttaatgatcttgaggcgtgtgtgatacagggcgtgggagtgaccgaaacccctttgatgaaagaggacagcatcctggccgtgcgcaagtactttcaaaggataactctttacctgaaggagaagaaatactcaccctgcgcctgggaagtggtgagagcagagataatgagatctttctccttgagtaccaacctccaggaaagcctccgatcaaaagag

SEQ ID NO: 13579 - DNA, 564 bp, Artificial Sequence
  derived and/or modified sequence
atggcactgacattcgccctgttggtggccttgctcgtgctgagctgcaagtcctcctgcagtgtaggatgcgacctgccacaaactcactctttgggttcaagaagaacactcatgcttcttgctcagatgcgtcgcattagtctcttctcttgtctgaaggatcgtcatgacttcggatttccacaggaggagtttggcaaccagttccaaaaggccgagactataccagtgctgcacgaaatgattcaacagatcttcaaccttttttccacaaaagactctagtgctgcttgggacgagactttgttggataagttctacactgagctctaccaacagctgaatgatctggaagcctgcgtgatccagggcgtcggagtaacagagactccactcatgaaggaggattctatcctggccgtgcgtaagtacttccagagaatcacactctacctcaaggagaagaagtatagcccctgtgcctgggaggtggtaagagccgagatcatgagatccttcagcctgtccacaaaccttcaggagagtctgcgtagtaaggag

SEQ ID NO: 13580 - DNA, 564 bp, Artificial Sequence
  derived and/or modified sequence
atggcgctgacatttgctttgctggtcgcactgttggttttgtcttgtaaaagcagttgcagtgttggctgcgatcttccacaaacccactctctaggatcgcggaggacactcatgctactcgcacagatgaggcgcatcagcctgttttcttgtttaaaggaccggcacgatttcggcttcccacaggaagagttcgggaaccagttccagaaagctgagactatacccgtcctgcacgagatgattcagcagatcttcaacttattctctaccaaagacagctcggccgcttgggacgagacgctactagataaattctacacagaactgtatcagcaactgaacgacctcgaagcctgcgtaatccagggggtgggcgtcaccgagacccccttaatgaaagaggacagcatcttggccgtcagaaaatatttccagcgcataaccctctatcttaaggaaaaaaagtactcaccctgtgcatgggaagtagtgcgcgcagagatcatgaggagcttttccttgtcaacaaacctgcaggagtcccttaggtcaaaagag

SEQ ID NO: 13581 - DNA, 564 bp, Artificial Sequence
  derived and/or modified sequence
atggctctgacattcgcgctgttggtcgcgctcctggttctctcatgcaaatcttcatgcagcgtgggatgcgacctcccgcagacacattcattagggtcccggcgaacattgatgctgctggcccagatgaggagaatcagtctattctcatgtctcaaggatcgccacgatttcggttttccccaggaggagtttgggaatcaatttcagaaggccgaaaccatccccgtcttacatgagatgatccagcagatttttaacctgttctccactaaggattccagtgccgcctgggacgaaactctgctcgataaattctataccgaactgtatcaacagctgaacgatctcgaggcatgcgtcattcaaggagtcggggttaccgaaaccccactcatgaaggaggactctattctcgccgtgagaaagtatttccagcgaatcactctctatttgaaggagaagaagtactcaccctgcgcttgggaggtggttagagcggagatcatgaggagcttctccctgtcaactaacctgcaagaaagcctacgatcaaaggag

SEQ ID NO: 13582 - DNA, 564 bp, Artificial Sequence
  derived and/or modified sequence
atggcgctcaccttcgccctcctggtagctctgctcgtgctttcgtgcaagagctcgtgctccgttggctgcgacctgccacagacccactcacttggctccagacggacccttatgctcttggcccaaatgcggcgtatctcacttttcagctgtttgaaagaccgacatgactttggtttccctcaggaagagttcggaaaccagtttcaaaaggcagagactatcccggtgctgcacgaaatgattcagcagatcttcaatctcttctcaaccaaggacagctctgctgcgtgggatgaaaccttgcttgataagttttacactgagctgtaccagcaattgaacgacctggaagcctgcgtgattcagggggtgggagtcaccgaaaccccgcttatgaaggaggattccatcctggccgtccggaagtactttcagagaattactctctatctgaaagagaagaaatactcgccctgcgcatgggaggtggttagggccgagatcatgcgctcgttctctctttccaccaacctccaagaatcgctgcggtcgaaggaa

SEQ ID NO: 13583 - DNA, 564 bp, Artificial Sequence
  derived and/or modified sequence
atggctctcacgtttgccctcctcgtcgcattgctggtcctgagctgcaaaagtagctgctcagtgggatgcgatctgccacaaactcactctctgggaagccgcagaacgttgatgctcctcgcccaaatgcggcgcatctccctgttctcttgtctcaaggaccgccatgacttcggcttccctcaggaagagttcggcaatcaattccagaaggcggaaacgatccccgtgttgcatgaaatgatccagcagatcttcaatttgtttagcactaaggattcgtccgccgcgtgggacgaaaccctcctcgacaaattctacaccgaactgtaccaacaactcaacgacctggaggcgtgtgtgattcagggggtcggagtcacggaaaccccgcttatgaaagaagattcgattctggctgtacgcaagtatttccagcgcatcactctgtaccttaaagagaagaaatactcaccatgtgcatgggaagtggtgcgagctgagatcatgcgctcgttttcgctttccaccaacctgcaggagtctctgcggtcaaaggag

SEQ ID NO: 13584 - DNA, 564 bp, Artificial Sequence
  derived and/or modified sequence
atggctctcacttttgctctccttgtagcactgttagtccttagctgcaaaagtagctgcagtgtcggttgcgacctcccccaaactcactcattgggcagccgacgcacgctcatgcttctcgctcagatgagacggatttcactgttcagctgtcttaaggacaggcatgattttggctttccccaggaggagttcggaaatcagttccagaaggccgaaactatacctgtattgcatgagatgatccagcaaatattcaatctcttttccacaaaagattcgtcagccgcttgggatgaaaccttgctcgacaagttctatactgagctgtatcaacagcttaacgatctggaggcctgtgtaatacagggtgtaggggtcaccgaaacacccctgatgaaggaggatagcattttagcagtaagaaaatatttccagcgtataaccctgtatctgaaggagaagaagtactctccctgtgcatgggaggtagtacgtgcagagattatgcggtccttcagcttgtcaaccaatttgcaagagagcctccggagcaaggaa

SEQ ID NO: 13585 - DNA, 564 bp, Artificial Sequence
  derived and/or modified sequence
atggccctaaccttcgcccttttagtggccctgctggttctgtcctgtaagtcatcttgcagcgtcggatgtgatctcccacagacccactcactgggttctcgccgtaccctgatgttgctcgcccagatgaggagaatttcattgttttcctgtctgaaagaccggcacgattttggattcccccaagaggaattcggcaatcaattccagaaagcggaaacaataccagtgctccatgaaatgatccagcaaatctttaacctcttctcaaccaaggactcaagcgccgcctgggacgagacactcttggacaaattttacacagaactctatcagcagctcaacgatctggaggcctgtgtgattcagggtgtaggcgtgacagagaccccgctgatgaaggaagacagcatcttggctgtcagaaaatattttcaacggattactctgtatctcaaagagaaaaagtatagtccatgcgcctgggaggttgtacgagcagaaatcatgcgctctttttccctgagtaccaacttgcaggaaagtctgcgttctaaggaa

SEQ ID NO: 13586 - DNA, 564 bp, Artificial Sequence
  derived and/or modified sequence
atggcactgaccttcgcattgttggtcgccctgctcgtgctgtcgtgcaaatcctcgtgctcggtggggtgtgacctcccgcaaactcactccctcggaagccggcggactctcatgctgctcgcgcagatgagacgcatctccctcttctcgtgcttgaaggaccggcacgatttcggattcccacaagaggaattcgggaatcagttccaaaaagcagaaactatcccggtcctgcacgaaatgatccagcagatcttcaatctgtttagcaccaaagactcctccgcagcatgggacgaaaccctgctggacaaattctacaccgaactctaccagcagcttaacgatttggaggcctgcgtgattcagggagtcggggtcactgagactccgcttatgaaagaagattcaatcctggccgtgaggaagtactttcaacgcatcactctctacctgaaggaaaagaagtactcgccttgcgcgtgggaagtcgtgagggcggaaatcatgcggtccttttccctgtccaccaacttgcaggagtcgcttcgctcaaaggaa

SEQ ID NO: 13587 - DNA, 564 bp, Artificial Sequence
  derived and/or modified sequence
atggcactgactttcgctctcttggtcgctctcctggtgttgtcatgtaaaagcagctgcagcgtcggatgcgatctgccccagactcacagcctcgggtcgaggcgaaccctgatgttgctagcgcaaatgagaagaatttctcttttctcctgtctcaaggataggcacgattttggtttcccacaggaagagtttggtaaccaatttcagaaggcagagactatccccgtcttacacgagatgattcaacagatttttaatttattttccaccaaggattctagcgctgcatgggacgagacacttctggacaaattttacactgagctttaccaacaacttaatgatttagaggcctgtgtgattcaaggtgttggagtgactgaaactcccctgatgaaggaggactccatccttgcagttcgcaagtactttcagcgaatcacactgtacctaaaggagaagaagtactctccttgtgcgtgggaagtcgtgcgggcggagattatgcgttcattttctctctctaccaatctccaggagagcctgaggtcgaaagaa

SEQ ID NO: 13588 - DNA, 564 bp, Artificial Sequence
  derived and/or modified sequence
atggccctgaccttcgccctgcttgtggccctcctcgtgctgtcctgcaagtcgagctgttccgtgggatgcgatctgccacaaacgcacagcctcggatcccggcgtacccttatgctgctcgcgcagatgaggagaatctcactcttctcatgcctgaaagatagacacgacttcggctttccgcaagaggagttcggaaatcagtttcagaaggcggaaacgatcccagtgttgcatgagatgattcagcaaatcttcaacctgttctcgactaaggactcgtcagcggcgtgggatgaaacccttctggacaagttctatactgagctgtaccaacagcttaatgacctcgaagcctgtgtcatccaaggcgtgggcgtgaccgaaactccactcatgaaggaggatagcattctggcggtccgcaaatactttcagcggatcaccctgtacctcaaggaaaagaaatacagcccatgtgcttgggaggtcgtcagagcggaaatcatgaggtcattctcgctttccaccaacctgcaggagtcactgcgctccaaagaa

SEQ ID NO: 13589 - DNA, 564 bp, Artificial Sequence
  derived and/or modified sequence
atggctctcacttttgcgcttcttgtggcattgctggtgctttcctgtaagtcgtcatgcagcgtcggatgtgatctgccgcaaacccactccttgggatcgagaaggactctgatgctgctggcacagatgcggaggatttccctgttttcctgtcttaaggaccggcacgacttcggcttccctcaagaagaattcggcaaccaatttcaaaaagctgaaaccattcctgtcctgcatgagatgatacagcaaatctttaacctgtttagcacgaaggacagcagcgctgcatgggacgagacgctgcttgacaaattctacactgaactgtaccagcagctcaacgacctggaggcatgtgtgattcaaggagtcggggttaccgaaactccacttatgaaagaggactccattctggcagtgcgtaaatactttcagcgcatcaccctgtacctgaaggaaaagaagtactcgccatgcgcctgggaggtcgtgcgggcggaaatcatgagatcattctctctcagcacgaatctgcaagagtcgcttagaagcaaggaa

SEQ ID NO: 13590 - DNA, 564 bp, Artificial Sequence
  derived and/or modified sequence
atggctcttacctttgctttgcttgttgcactcttggttttgtcgtgcaagtcaagctgtagtgttggatgtgaccttcctcagacccactccctaggatcacggagaacattgatgttattggctcaaatgcggaggatttcacttttttcttgtcttaaggataggcatgatttcgggttccctcaagaggaatttggtaaccaattccaaaaggctgagactattcccgtgctacacgaaatgatacagcagatcttcaacttgttctcaaccaaggactcgagtgcagcatgggacgaaactttgctggataagttttacacagaactctatcagcaactcaatgatttagaggcttgtgtgattcagggagttggggttaccgagacaccgctcatgaaagaagactcaatcctagctgtccggaagtattttcagcgaataactctttatctcaaggagaagaaatacagtccatgcgcatgggaagttgtgagagctgagattatgcgttctttttccctttcaacaaatcttcaggagtcacttcgttccaaagag

SEQ ID NO: 13591 - DNA, 564 bp, Artificial Sequence
  derived and/or modified sequence
atggccctgacgttcgcgctgcttgtggctctgctggtcctctcgtgcaagtcatcctgctcggtgggttgcgacctgccacagacccattctctgggatccagacggacccttatgcttctcgcgcagatgcgccgcatcagcctcttctcatgtcttaaagaccggcatgactttggattccctcaggaagaattcgggaatcagtttcagaaggccgaaactatccccgtgctccacgagatgatccaacagattttcaaccttttcagcaccaaggattcatccgcggcgtgggacgaaactcttctcgataagttctacaccgagctttaccagcagcttaacgacctggaggcttgcgtcattcaaggggtcggagttacggagactccgctcatgaaggaggattcgattctggcggtgcgtaagtacttccaaaggatcactttgtacctgaaggagaaaaagtattcgccgtgcgcgtgggaagtggtgcgcgccgagatcatgcggagcttttcgctcagcaccaacctccaagaatccctgcgctcaaaggaa

SEQ ID NO: 13592 - DNA, 564 bp, Artificial Sequence
  derived and/or modified sequence
atggcacttacgttcgcactgcttgtcgcactcctggtgctctcctgtaaatcaagctgttccgtcggatgtgacttgccgcaaacccactccctcggttcgaggcgcaccctgatgcttctggcccaaatgcggagaataagcctgttctcgtgtctgaaagacaggcatgactttggatttccccaggaagagtttggtaatcagtttcaaaaggcggagactattcccgtgctgcacgaaatgatccagcagatattcaacctcttttctactaaggattcatccgcagcatgggatgaaaccctgctggacaagttctacactgaactttaccaacaactgaacgatttggaggcatgcgtgattcaaggcgtgggggttaccgaaacgccactgatgaaggaagatagcatcctggcagtgcgtaagtactttcagaggatcactctctacttgaaagaaaagaagtactcgccgtgtgcttgggaggtggtgagggccgagataatgcggagcttcagcctgtccacgaaccttcaggaatcactgagatcgaaagaa

SEQ ID NO: 13593 - DNA, 564 bp, Artificial Sequence
  derived and/or modified sequence
atggcgctgacttttgctctccttgtcgccctcctggtattgtcttgcaagtcatcttgctccgtgggatgcgatcttccccaaacccacagcctggggtccaggaggaccctcatgctgctcgctcagatgaggagaatttctctgtttagctgtctgaaagaccgccacgacttcgggttccctcaagaagagttcggcaatcagttccagaaagctgaaacaattcccgtactccatgagatgatacagcaaatcttcaatctgttcagcacaaaagacagcagtgccgcctgggatgagactcttttggacaagttttatacggagctgtatcagcagttaaatgatttagaggcatgcgtcatccagggggtgggcgtgacagaaacaccactgatgaaagaagactctatactggctgtccggaagtatttccagaggatcaccctctacctcaaagagaagaagtactctccctgcgcatgggaggtggtacgggctgaaattatgcgtagtttttctttgagcacaaacctgcaggagagcctacgaagtaaggaa

SEQ ID NO: 13594 - DNA, 564 bp, Artificial Sequence
  derived and/or modified sequence
atggccctgaccttcgcccttctagtcgccttgcttgttctctcatgcaagagttcttgcagtgtgggatgtgatcttccacagacgcattccttggggtctagacgcacgttgatgctgctggcccagatgcggagaatttccttgttttcctgcctgaaggatagacacgattttgggttccctcaggaggagttcgggaaccagtttcagaaagcagagactattcctgtgttacacgaaatgattcagcaaatttttaacttgttttctaccaaggactcctcagcggcttgggacgagaccctcctggacaagttctacacagagctctatcagcagctcaatgatcttgaagcctgtgttattcagggggtgggggttacagagacccctctgatgaaagaggattctattctggctgtccgcaaatacttccagagaattacactctacctcaaagaaaaaaaatattccccatgtgcgtgggaggtggtgagggccgagatcatgcgatccttttccctgtccactaacctgcaggagagcctcaggagtaaagag

SEQ ID NO: 13595 - DNA, 564 bp, Artificial Sequence
  derived and/or modified sequence
atggccctgaccttcgccttgttggtggccctgctcgtgctgagctgtaagtcgtcctgctcggtgggctgcgacctgccacaaactcattcgctgggcagccgaagaaccctcatgctgctggctcagatgcggagaatctccctcttctcgtgtttgaaagataggcatgattttggattcccgcaggaggagttcggaaaccagtttcagaaggccgaaaccatccctgtgctgcatgaaatgatccagcagatcttcaacctcttctctaccaaagattcatccgccgcgtgggacgagactttgcttgacaaattctacaccgagctgtaccagcaattgaacgatctggaagcgtgcgtgatccagggcgtgggagtcactgaaacgccgctgatgaaggaggactccattttggcggtccgaaaatactttcaaagaatcaccctgtatctcaaagaaaagaagtactcgccttgcgcctgggaagtggtgcgggcggagatcatgcgctcgttctccctgagcactaacctgcaggagtcgctccgctcaaaggag

SEQ ID NO: 13596 - DNA, 564 bp, Artificial Sequence
  derived and/or modified sequence
atggcgctgactttcgccctgttggtcgccttgctggtgctgtcgtgtaagagctcatgttcggtgggatgcgatctgccacaaacccattcgctcggatccagaagaaccctcatgttgttggctcaaatgcggaggatcagcctcttcagctgccttaaggaccgccacgactttggcttccctcaggaggaattcggaaaccaattccagaaggcggagactataccagtactgcacgagatgattcaacagatcttcaatctgttcagcaccaaggattcatcggccgcttgggacgagactcttttggacaagttctatacggaactctaccagcaactgaatgatctggaggcctgcgtgatccagggggttggcgtgaccgaaacccccctgatgaaggaggactccatcctcgcagtccggaagtattttcagcgcataactctctacctgaaagaaaagaaatactccccgtgcgcatgggaagtcgtgcgcgccgagatcatgcgctcgtttagtctgtccacgaacctgcaggaatccctccggtcaaaagaa

SEQ ID NO: 13597 - DNA, 564 bp, Artificial Sequence
  derived and/or modified sequence
atggctcttaccttcgccttgttggtggctctgcttgtactgagctgcaagtcaagctgctccgtgggctgtgacctcccccagacccactcgttggggagccggagaaccctgatgcttctggcacaaatgagaagaatctccctcttttcttgtctgaaggaccggcacgattttggatttcctcaggaggaattcggcaaccagtttcagaaagcagaaacaataccggtgcttcatgaaatgatccagcagatttttaacttgttcagtacaaaagactctagtgcagcgtgggatgagactctcctcgataagttctataccgaactctatcaacagttgaatgacctagaagcctgtgtcatccagggcgtcggtgtgacagagacccctctaatgaaggaggattcgatcctagcagtgcgcaagtacttccaacggatcactttgtatcttaaggagaagaaatactcaccttgcgcatgggaagtggtcagggcagaaatcatgcggagtttcagcctgtctactaacctgcaggaaagtctcagatctaaggaa

SEQ ID NO: 13598 - DNA, 564 bp, Artificial Sequence
  derived and/or modified sequence
atggccctgaccttcgctctgctggtcgccctgctcgttctgagctgcaaaagcagttgcagtgtggggtgcgaccttcctcagacccacagcttaggctcgcgtaggacattgatgcttttggcacaaatgagacgcattagtctattttcttgtctgaaggatcgtcacgactttggttttccacaggaagaattcggtaatcagttccaaaaggccgagactatccctgttctgcacgaaatgatccagcaaatatttaatctgttcagtaccaaggacagcagcgccgcctgggacgagaccctgctggacaagttttatacggagctctatcagcagctgaatgatttggaagcatgtgtgatccagggtgtgggtgtcactgagactcccctcatgaaagaggacagcattctggcggtgcgcaaatactttcagcgtattaccctgtacctgaaagagaagaaatacagcccttgtgcctgggaggtggtgagggcggagattatgcgcagcttctccctgagcacgaatctgcaggagagcctgcgttcgaaagag

SEQ ID NO: 13599 - DNA, 564 bp, Artificial Sequence
  derived and/or modified sequence
atggctttaacttttgcactattggtggcattattagttttatcatgtaaaagttcatgttcagtaggatgtgatcttccacaaacacactcacttggatcaagacgtactcttatgcttcttgcacaaatgagaagaattagtttattctcatgtcttaaagatagacatgattttggatttccacaagaagaattcggaaatcaatttcaaaaggcagaaactatcccagtgcttcatgaaatgattcaacaaattttcaatcttttttcaactaaagatagttctgcagcatgggacgaaacattattagataaattttatactgagttatatcaacaattaaacgatttagaagcatgtgtaattcaaggagttggagtaacagaaacaccattaatgaaagaagattcgattttagctgtaagaaaatattttcagagaattactctttatttaaaagaaaagaaatattctccttgtgcatgggaagttgttagagcagaaattatgagatcattttctttaagtactaatttacaagagtctttaagatcaaaagaa

SEQ ID NO: 13600 - DNA, 564 bp, Artificial Sequence
  derived and/or modified sequence
atggcactcacgtttgctctattggttgctcttctggtcctcagctgcaaatcttcatgtagtgtgggatgcgacttgccccagacccattccctgggttcccgtcggaccttgatgcttctggcccagatgagaagaataagtctgttttcttgcctgaaagacagacacgattttggcttcccgcaggaggagttcgggaatcaatttcagaaagcagagacgattccggttttgcacgaaatgattcaacagatattcaatctgttcagcacaaaggattcgtctgcagcctgggacgagaccctgctggacaaattttataccgaactatatcagcaattgaatgacctcgaagcatgcgtgattcagggggttggtgtgacagagacccctttgatgaaggaggactctatcctagccgtacggaagtatttccagaggatcaccctctaccttaaagaaaagaagtacagcccctgcgcatgggaggtagtccgagccgagatcatgcggtcattctctttaagtaccaaccttcaggagtctttgagatctaaagaa

SEQ ID NO: 13601 - DNA, 564 bp, Artificial Sequence
  derived and/or modified sequence
atggccctgacgtttgccctactggtcgctcttttggtcttgagttgcaagtccagctgctctgtaggctgcgatttacctcaaacccacagcctgggatccaggagaaccctgatgctactagcccagatgagacgaattagcctatttagctgtctgaaagacagacatgattttggcttccctcaggaggagttcggcaaccagttccaaaaagccgagaccattccagtgctgcacgaaatgatccaacagatcttcaatctgttcagtacgaaggactcttcagccgcctgggacgagacgttacttgataagttttacactgagctgtaccagcagctgaatgatctggaggcctgcgtcatacagggagtaggagtgactgagacccccctgatgaaagaagactcaatcttggcggtaaggaagtactttcagcgtattactctgtacttgaaagagaaaaagtattctccttgcgcctgggaagtggtccgagccgagattatgcgcagttttagcttgagcaccaatctccaggaatctctgcgatccaaagag

SEQ ID NO: 13602 - DNA, 564 bp, Artificial Sequence
  derived and/or modified sequence
atggccttgacttttgctttgctggttgccttgctcgtgctgtcatgtaaaagttcgtgctctgtgggatgcgacctcccgcaaacccactctttaggttcccgacgtacattgatgcttctggcccaaatgcgcagaataagtctatttagctgtctaaaagaccgacacgatttcggttttccacaagaagaattcggcaaccagttccaaaaggctgaaacgattccagttctgcatgaaatgatccaacaaatttttaatctatttagcactaaagactcgtcagcggcttgggatgaaactcttcttgacaaattctatacagagctttatcaacaactgaacgacctcgaggcttgcgtaattcaaggcgttggggttacggagacgccattgatgaaggaagactctattctggctgtacgaaaatattttcaacgcattacactttacttaaaagagaaaaaatattcgccatgtgcatgggaagtcgtccgagctgaaattatgcgcagtttcagccttagcacgaacctacaagaatcactcagatccaaagaa

SEQ ID NO: 13603 - DNA, 564 bp, Artificial Sequence
  derived and/or modified sequence
atggcccttacattcgctctcctggtggcgctgttggtactgagttgtaaatcatcttgtagtgttggatgtgatctgccacagactcattctctagggagtcggaggacactgatgcttctcgcccagatgagacgcatatctctattttcttgcctaaaagatagacacgacttcggattcccgcaggaagagtttggaaaccagttccagaaagcggaaacaatcccagtgctccatgaaatgatccaacagatatttaacctattttccactaaagattcctccgcggcatgggatgagactttgctagataaattctatacagaattgtaccagcagctgaatgatcttgaagcatgtgtcatccaaggagtgggagtcacagaaactccccttatgaaggaggattccatcctggctgtcagaaaatatttccaaagaatcactctgtatcttaaagagaaaaaatactcaccctgcgcttgggaagtcgtgcgggcggaaatcatgagatctttttcactctctacaaatctccaggaatccttaagatccaaagag

SEQ ID NO: 13604 - DNA, 564 bp, Artificial Sequence
  derived and/or modified sequence
atggccttaactttcgcccttctggtagctctgctggtgctgtcttgtaaaagcagctgcagcgtgggctgcgatcttcctcaaacccatagtctgggctccagacggacattaatgttactggcacaaatgcggcgcatcagcctgttttcatgtctgaaggatagacacgattttggattcccacaggaggaatttggcaaccagtttcagaaggccgagacaatccctgtgctgcacgagatgatccagcaaatttttaacttattcagcacaaaggatagcagtgcagcttgggatgaaactcttttagataaattttacaccgagctgtaccagcaactcaatgacttagaggcttgtgttatccagggggtgggtgtgaccgagacacctcttatgaaggaggactcaatcctcgccgttcgaaagtacttccaacggatcaccctgtacctgaaagaaaaaaaatatagcccatgtgcctgggaggtggtacgagcagagataatgaggtctttttctctctccaccaacttacaggaatcactgaggtcaaaagaa

SEQ ID NO: 13605 - DNA, 564 bp, Artificial Sequence
  derived and/or modified sequence
atggctctaacttttgcactgctggtcgccctcctcgtactgagttgcaagtcatcttgtagcgtagggtgtgacctgccacaaacccattctcttggttcaaggcgaaccctgatgctattggcgcagatgcgaagaatctccttgttttcgtgcctcaaggacaggcatgactttggttttcctcaggaggagtttggcaatcagttccagaaggccgagacaattcccgtgttgcacgaaatgattcaacaaatctttaacttgttctccacaaaggacagtagcgctgcctgggatgagacactactggataagttttacaccgaattataccaacagctaaatgatctcgaagcatgtgtgattcaaggcgtgggggtgacagaaactccgttgatgaaggaagactccattcttgccgtccgcaagtattttcagagaataacactgtaccttaaagaaaagaagtactccccttgcgcatgggaagttgtacgtgctgagatcatgagatccttcagccttagcaccaacctgcaggagtcactgcgcagcaaggaa

SEQ ID NO: 13606 - DNA, 564 bp, Artificial Sequence
  derived and/or modified sequence
atggccctgactttcgcactcctcgtcgccctccttgtgctgagctgtaaatcttcgtgctccgtcggatgcgatctgccgcagacccactccttgggatcaagacgaaccttgatgctcctcgcccaaatgcggaggatttcgcttttctcctgtctgaaggaccgccacgactttggttttccccaggaggaattcgggaaccaattccagaaggctgaaactattccggtgctgcatgagatgatccagcaaatcttcaacctgttctccaccaaggactcatcggcggcttgggacgaaactctgctggataagttttataccgagctttaccaacagctgaatgacctggaagcgtgcgtgatccagggagtgggcgtgaccgaaactccactgatgaaggaagattcgatcctggccgtgcgcaagtacttccagcggatcactctctacttgaaggagaaaaagtacagcccttgcgcgtgggaggttgtccgcgcagagatcatgcggagcttctccctctcgacgaacctgcaggaatcactgagaagcaaagaa

SEQ ID NO: 13607 - DNA, 564 bp, Artificial Sequence
  derived and/or modified sequence
atggcacttacatttgcactcctcgtggctctgttggtcctcagttgcaagtcaagctgtagcgttggttgcgatcttccccagactcattcattgggttcccggcgaaccctgatgttgcttgcacagatgcgccggatctccctgtttagttgcttgaaggacagacatgattttggcttcccccaagaagaatttggcaaccagtttcagaaggcggaaaccatcccggtgcttcatgaaatgatacaacagatatttaatttgttttcaacaaaggatagctccgccgcatgggacgagacacttctcgacaagttttacacggaactgtatcagcagctgaacgacctggaagcctgtgtcattcagggagtgggtgtgacagaaactccccttatgaaagaagattctattctcgcagtgcggaagtacttccagcgcatcactctttatctcaaggaaaaaaaatattctccgtgtgcatgggaggtggtgagagctgaaatcatgcgaagcttcagcttgtcaacaaaccttcaagagtcactgcggtccaaggag

SEQ ID NO: 13608 - DNA, 564 bp, Artificial Sequence
  derived and/or modified sequence
atggccctgacgttcgctctcttggtcgcgctcctggtgctgagctgtaagtctagctgctctgtcggttgtgatcttcctcaaacccacagtctaggttcgcgaaggaccctgatgttgctcgctcagatgcgccgaatatctttgtttagctgtttaaaggaccgtcacgacttcggcttcccacaggaggaatttggcaatcagtttcaaaaggccgagacgattcccgtgttgcatgagatgattcaacagatctttaatctcttcagtacgaaggactcctccgcagcctgggatgagaccctgttagacaagttctatacggaactgtatcagcagctgaacgacctggaggcgtgcgtcattcagggcgtaggtgtcacggaaaccccccttatgaaggaggattccatcctagcggtgcgcaaatatttccagcgcataactctgtatctgaaggagaagaagtactccccgtgtgcctgggaagtggtgcgcgcagagataatgcgcagtttctccttgagtactaacctgcaagagtcccttcgtagcaaggag

SEQ ID NO: 13609 - DNA, 564 bp, Artificial Sequence
  derived and/or modified sequence
atggccttgaccttcgcattgctggtcgctctccttgttctttcctgtaaatcttcatgctctgtgggctgcgatctgcctcagactcacagcctgggttctagacgcactctcatgttgctcgcccagatgaggcgcataagcctgttttcctgtttgaaggacaggcacgatttcggtttcccacaagaggaattcggaaaccagtttcaaaaggctgagaccatccccgtgctgcacgagatgatccaacaaattttcaacctgttctcaacgaaggacagctcagctgcctgggacgagacactgctggataagttctatacggaattgtatcagcaacttaatgacttggaagcttgtgttattcaaggcgtgggagtgacggagacccctctgatgaaggaggactcaatcctggctgtgaggaaatacttccaacgcataaccctgtacctgaaggagaaaaagtacagcccgtgcgcttgggaggtcgtacgcgcagagatcatgagatcattctctctttctacgaacctgcaagaatcccttaggtccaaggag

SEQ ID NO: 13610 - DNA, 564 bp, Artificial Sequence
  derived and/or modified sequence
atggccctgaccttcgcgctgttggtcgccctcctggtgttgagctgcaaatcctcctgctccgtggggtgcgacctcccccaaactcactcactgggctcccgtcggactttgatgctactggcacaaatgcgacgaataagtctgttctcttgcctgaaggataggcatgacttcggcttccctcaggaggagttcggaaaccagttccagaaagccgaaacgatcccagtgctgcacgagatgatacagcaaatcttcaacctgttcagtactaaggatagttccgcagcatgggacgagacccttcttgacaagttttataccgaactgtaccagcagctgaatgatttggaagcttgcgtgattcagggcgtgggggtcacggaaactcctttgatgaaggaggacagcatactggctgtcaggaagtattttcagagaatcaccctctatctgaaggaaaaaaagtatagcccgtgcgcttgggaggtcgttcgtgccgaaattatgcgcagctttagtctttcaactaatcttcaggaaagcctgcggtccaaagag

SEQ ID NO: 13611 - DNA, 564 bp, Artificial Sequence
  derived and/or modified sequence
atggccctgacatttgctctgctagtggccctgctggttttgtcttgtaagagttcttgctcggtcgggtgtgacctgccacagacccactccctgggaagccgaagaacactcatgctgctcgcacagatgcgtcgcatcagtttgttctcgtgcttaaaagataggcacgactttggcttcccccaggaagaatttggcaatcaatttcaaaaggccgagactataccagtgctgcacgaaatgatccagcagatatttaatctcttcagcacaaaggattccagtgccgcttgggatgaaacactactagataagttctacaccgagctgtaccaacaattaaatgatttggaagcctgcgttatccagggtgtcggggtcactgagacccctttaatgaaggaagatagtatcctggccgttaggaaatattttcagcgaattacgttgtatctcaaggagaagaagtattcaccatgcgcttgggaggtggtgagggctgaaatcatgcggtcattttcactctctactaacttgcaggaaagtttgcgatctaaggag

SEQ ID NO: 13612 - DNA, 564 bp, Artificial Sequence
  derived and/or modified sequence
atggccctgacgtttgccctgttggtcgccttgttagtcttatcgtgtaaatcctcgtgttccgtgggctgcgatcttccgcagactcattctttaggaagtcgacgaacattaatgcttctggcccagatgcggcgtatctcactgttctcttgcctgaaggatcgtcatgactttggtttccctcaagaagagtttggcaaccagtttcaaaaagctgaaacaatccccgtgttacatgaaatgattcaacagatttttaacttattctcaaccaaagactcgtctgccgcttgggatgaaacactgcttgacaaattttatacagaactgtatcagcagctgaacgatttggaagcttgcgtgatccaaggtgtcggcgttacagaaacacctctgatgaaagaggattcaattctggcggtgagaaaatactttcagcggattacgctgtatctgaaagaaaaaaaatatagtccgtgcgcgtgggaggttgtaagagcggagattatgcgctcttttagtttaagcaccaatttgcaagaatcacttcgctcgaaagaa

SEQ ID NO: 13613 - DNA, 564 bp, Artificial Sequence
  derived and/or modified sequence
atggcgctgacgttcgctctgcttgtcgcacttctcgtcctgtcatgtaagagctcttgctcagtgggctgcgacttgccccagactcactccctgggatcgcggagaaccttgatgctcctggcccagatgagaagaattagccttttctcatgccttaaggaccggcatgactttggtttcccgcaagaagaatttgggaaccagtttcagaaggccgagactatcccagtcctccacgaaatgatccaacagatcttcaacctgttcagcaccaaggactcatcggccgcgtgggatgaaactttgctggacaagttctacactgaactctaccagcaactgaacgatctggaggcctgcgtgatccagggagtgggagtgaccgaaaccccactgatgaaagaggactctatcctcgcggtgcgaaaatacttccagcgcattacgctgtatctgaaagaaaagaaatactctccgtgtgcatgggaggttgtgcgggccgagatcatgaggtcgttttccctgtctaccaatctgcaagagtccctccgctcgaaggag

SEQ ID NO: 13614 - DNA, 564 bp, Artificial Sequence
  derived and/or modified sequence
atggcgcttacctttgcgctgctggtggcactgctggtccttagttgtaaaagctcctgttcggtcggctgcgatcttcctcaaacccattcccttggctcacgccgcactctgatgcttcttgcacagatgcgccgaatcagcctttttagctgcctgaaggacaggcatgactttggtttcccgcaggaagaatttgggaaccagtttcagaaggcagaaaccatccccgtccttcacgaaatgatccaacagatattcaatttgttttccaccaaggactcgtcagcagcatgggatgagacgctgcttgataagttctacactgaactttaccaacagcttaacgacttggaagcgtgcgttattcaaggtgtgggagtcactgaaaccccccttatgaaggaagattccattctcgcagtcaggaaatactttcaacgtattactctgtacttgaaggaaaagaaatactcaccctgtgcatgggaggtggtgagagccgagattatgcggtccttcagcctgagcactaaccttcaggagagccttaggtcgaaggaa

SEQ ID NO: 13615 - DNA, 564 bp, Artificial Sequence
  derived and/or modified sequence
atggccctgacctttgcactgctggtggccttgttggtgctctcatgtaagtcttcttgttcggtgggttgcgatttgcctcagacgcactctctgggcagccgccggacactgatgttgctggcccagatgaggcggatctccctgttttcttgtttgaaggatcgtcacgattttggttttccacaggaagaattcggtaatcaattccagaaggctgaaacaattccggtcttgcatgaaatgattcagcaaattttcaatttgttcagtaccaaagactccagtgccgcatgggatgaaaccctcctggataagttttacaccgagttgtatcagcagctgaatgacctggaagcatgcgtgatccagggagttggcgtgacggaaacacctctgatgaaagaggatagtatccttgctgtcaggaagtacttccaacgtatcactctctatctgaaggaaaaaaaatattctccttgcgcttgggaggtcgttcgggctgagataatgaggagtttttccttaagcaccaatctgcaggaaagtctccgcagcaaagaa

SEQ ID NO: 13616 - DNA, 564 bp, Artificial Sequence
  derived and/or modified sequence
atggctcttaccttcgccctccttgtagctcttctggtgttatcttgtaagagtagctgttccgtgggatgcgacctcccacaaacgcactcacttggttccaggaggacattgatgcttctggcacaaatgcgtagaatctctctgttcagctgcctaaaggaccggcatgatttcggatttccacaggaggagttcgggaatcagttccagaaagcagaaacaatacccgtactgcatgagatgatccagcagatcttcaacctgttcagcacgaaggacagctcagcagcgtgggacgagacactgctggataagttctacaccgagttgtaccaacagctcaacgacctagaagcttgcgtgatccagggagtgggggtgactgagactcctctcatgaaggaggactctattctggccgttcggaaatactttcagcgcattaccctgtacctgaaggagaaaaagtactcaccatgcgcctgggaagttgtccgcgctgagattatgcgcagtttttccctgagtaccaatctccaggagagtttaaggtctaaggag

SEQ ID NO: 13617 - DNA, 564 bp, Artificial Sequence
  derived and/or modified sequence
atggcactgactttcgctctgctcgtggctctgctggtcttgtcgtgcaagagcagctgttcggtgggctgtgatctccctcaaactcactcgctgggatccaggcgtactctcatgctgcttgcccagatgcgccgcatctcgctgttttcgtgtctgaaggacagacacgacttcggtttcccccaagaggaattcggaaaccagttccagaaggcagaaaccatcccagttctgcacgaaatgatccagcagattttcaatctcttctcgaccaaagacagctccgcagcgtgggacgaaaccctgctggacaagttctacaccgagttgtaccagcagctgaacgatctggaggcctgtgtcatccagggagtgggagtgaccgaaaccccgctgatgaaggaggactcaatcctggctgtgcgaaaatacttccagcggatcacgctctacctcaaggagaagaagtactccccgtgcgcgtgggaagttgtccgggccgaaatcatgcggtccttctccctctctactaacttgcaagaaagcctcaggtcaaaggaa

SEQ ID NO: 13618 - DNA, 564 bp, Artificial Sequence
  derived and/or modified sequence
atggcactgacttttgccctcctcgtcgctctgctggtactgagttgtaaatctagttgttctgtgggctgcgacttgccccaaacccattctctgggctcccgccgcaccctcatgctcctggcccaaatgcggagaatctccctcttcagctgtctcaaggatcgtcatgatttcggttttccccaggaggagttcgggaatcaatttcagaaggccgagactatccccgtcctgcacgagatgatccaacagatctttaatctgttcagcactaaggactctagcgccgcttgggacgagaccctgctggataagttttacacggagctctaccagcagctaaacgatttggaggcttgcgttatccagggtgttggggtcacggaaacgcctctcatgaaggaagactcaatcctggcagtgagaaagtactttcaacgtatcaccctgtacttgaaggagaagaagtactccccatgcgcctgggaggtggtgagagctgagattatgcgctcttttagcctgagcaccaacctccaagagagcttgcgttccaaggag

SEQ ID NO: 13619 - DNA, 564 bp, Artificial Sequence
  derived and/or modified sequence
atggcgctcacattcgccctcctggttgccctgctagtcctctcatgcaagagcagttgctctgtcgggtgtgacctgccacagacacacagcctaggatcccgtcgtacccttatgcttctggcgcagatgcgcagaatctccctcttttcttgtttaaaggatcggcatgacttcgggtttcctcaggaggagttcgggaaccagttccagaaggcggagaccatcccagtccttcatgaaatgatacaacaaatattcaacttattctctactaaggatagtagtgcggcatgggacgagaccctgctggacaaattttatactgagctgtatcagcaacttaatgatttagaggcatgcgtgatccagggcgtgggcgttacggagacccccttaatgaaagaggattctattctcgctgtacgtaagtatttccagcgcatcaccctgtatctcaaagaaaagaagtatagcccctgtgcttgggaggtcgtgagagctgagattatgcgatccttttcactgagcaccaatctgcaagagagcctgaggagtaaggag

SEQ ID NO: 13620 - DNA, 564 bp, Artificial Sequence
  derived and/or modified sequence
atggcgctgacctttgcgctcctcgttgcattgttggtcctgtcgtgcaaatcgtcctgctcagtgggctgcgacctcccccagacccatagcctggggagccgccgcaccttgatgctcctggcccaaatgcggcggatctccttgttctcgtgcctgaaagatagacacgactttggattcccgcaggaagaattcggaaatcaattccagaaggcggaaactataccggtgctccatgagatgatccagcagatcttcaacttgttttcgacgaaggactcgtcggctgcttgggatgagactttgctcgacaaattctacactgaattgtaccagcaattgaacgatctcgaagcctgtgtgattcagggtgtcggagtgaccgaaacccctctgatgaaggaagatagcattctggcagtgcgtaagtacttccaaagaatcactctctacctgaaggagaagaagtactccccttgtgcctgggaagtggtgcgggcagaaatcatgcggagcttttcgctgtcaaccaatcttcaggagtcactgaggagcaaggaa

SEQ ID NO: 13621 - DNA, 564 bp, Artificial Sequence
  derived and/or modified sequence
atggctctaactttcgccctattggtggctctgctggtcctctcctgtaagtccagctgctccgtggggtgtgatctcccgcagacccatagcctgggtagccgcaggacacttatgctcttggctcagatgagacgaataagtttgttctcttgccttaaagaccggcatgactttgggttccctcaggaagaatttggcaaccagtttcagaaagctgaaacaattcctgtcctgcacgagatgatccagcagatcttcaacttattttccacaaaagatagcagtgctgcgtgggacgagactctgttggataaattctacacggagctctaccaacagctgaatgacttggaagcctgtgtgatacagggtgtgggggtgacagagactcccctgatgaaggaggattcgatcctggctgtgcgcaagtatttccagagaatcaccctctacctgaaagagaagaaatatagcccttgcgcgtgggaggtggttagagctgagattatgcgttcattttccttgtccacaaatcttcaggaaagtctaagatccaaggag

SEQ ID NO: 13622 - DNA, 710 bp, Artificial Sequence
  derived and/or modified sequence
gggaaataagagagaaaagaagagtaagaagaaatataagagccaccatggccttgacgttcgcccttctcgtagccctgttggtgctctcatgcaaatcgtcctgttccgtcggatgcgatcttccccagacgcattcgctggggtcgcgcagaactctcatgttgttggcgcagatgaggcgaattagccttttctcgtgtcttaaggaccggcacgattttggtttccctcaagaggagtttggcaaccagttccagaaggcggaaacaatccccgtactccacgagatgatccagcagatcttcaacctgttttccacgaaggactcctcagcggcttgggacgaaaccctgctggataagttttacacggagctctatcagcagctgaatgacctcgaagcatgtgtgattcaaggagtgggggtcaccgagacaccgcttatgaaggaagattcaatccttgcagtgcggaaatactttcagaggatcactttgtatcttaaagagaaaaagtacagcccgtgcgcgtgggaagtcgtgagagcggagattatgcgaagcttctcgctgagcacaaatttgcaagagtcgctccgctcaaaagaatgataagctgccttctgcggggcttgccttctggccatgcccttcttctctcccttgcacctgtacctcttggtctttgaataaagcctgagtaggaag

SEQ ID NO: 13623 - DNA, 567 bp, Artificial Sequence
  derived and/or modified sequence
atggccctgaccttcgccctgctggtggccctgctggtgctgagctgcaagagcagctgcagcgtgggctgcgacctgccccagacccacagcctgggcagcagaagaaccctgatgctgctggcccagatgagaagaatcagcctgttcagctgcctgaaggacagacacgacttcggcttcccccaggaggagttcggcaaccagttccagaaggccgagaccatccccgtgctgcacgagatgatccagcagatcttcaacctgttcagcaccaaggacagcagcgccgcctgggacgagaccctgctggacaagttctacaccgagctgtaccagcagctgaacgacctggaggcctgcgtgatccagggcgtgggcgtgaccgagacccccctgatgaaggaggacagcatcctggccgtgagaaagtacttccagagaatcaccctgtacctgaaggagaagaagtacagcccctgcgcctgggaggtggtgagagccgagatcatgagaagcttcagcctgagcaccaacctgcaggagagcctgagaagcaaggagtag

SEQ ID NO: 13624 - DNA, 567 bp, Artificial Sequence
  derived and/or modified sequence
atggcattaacctttgccctgctcgttgcccttcttgtgctctcctgtaaatctagttgcagcgtgggctgtgaccttccgcagacgcattccctgggctctcggaggacgctgatgctactcgctcaaatgcgccggatctctctgttcagttgtcttaaagaccgtcacgacttcggcttcccacaggaggaatttgggaaccagtttcagaaggccgagaccattcctgttttgcatgagatgatacagcagatttttaatctgttttcaactaaggactcatcagcagcatgggatgaaacactcctcgacaaattctacacggagctttaccagcagctaaacgatctcgaagcttgcgtgattcagggcgtgggcgtgacggaaacgcctcttatgaaagaggacagcattctcgctgtcagaaaatactttcagaggattacactttatctcaaagagaagaagtactccccatgcgcctgggaggtcgttcgcgcagagattatgagatccttcagcttgagcacaaacctccaggagtccctcaggtccaaagagtag

SEQ ID NO: 13625 - DNA, 567 bp, Artificial Sequence
  derived and/or modified sequence
atggccctgacctttgccctgctggtggccctgctggtgctgagctgcaagagcagctgcagcgtgggctgtgacctgccccagacccacagcctgggcagcaggaggaccctgatgctgctggcccagatgaggcgcatcagcctcttcagctgcctgaaggacagacatgactttggcttcccccaggaggagtttggaaaccagttccagaaggccgagaccatccctgtgctgcacgagatgatccagcagatcttcaacctcttcagcaccaaggacagcagcgctgcctgggatgagaccctgctggacaagttctacacagagctgtaccagcagctgaatgacctggaggcctgtgtgatccagggcgtgggcgtgacagagacccccctgatgaaggaggacagcatcctggccgtgaggaagtacttccagaggatcaccctgtacctgaaggagaagaagtacagcccctgtgcctgggaggtggtgcgggcagagatcatgaggagcttcagcctgagcaccaacctgcaggagagcctgcggagcaaggagtag

SEQ ID NO: 13626 - DNA, 567 bp, Artificial Sequence
  derived and/or modified sequence
atggccctgaccttcgccctgctggtggccctgctggtgctgagctgtaagagctcctgctctgtggggtgtgatttgccgcagacccactcactgggtagccgtcgaaccctgatgttacttgcccagatgcggcgcattagcttgttttcatgtttaaaggacagacacgacttcggcttccctcaggaggaatttggtaatcagtttcagaaggctgaaactatcccagtgctgcatgagatgatccagcagatctttaaccttttttccaccaaagacagttcagctgcctgggatgagactcttctcgataagttttatacagagctgtatcaacagctaaatgatctggaggcatgcgtcatccagggtgttggagtcacagagaccccactgatgaaagaggattcaattctcgctgtgaggaaatactttcagaggatcacgttgtacctgaaggagaaaaaatatagcccctgcgcctgggaggtggtgagagcagagatcatgcgctcctttagcctctccaccaaccttcaggaatctctgaggtcaaaagagtag

SEQ ID NO: 13627 - DNA, 567 bp, Artificial Sequence
  derived and/or modified sequence
atggccctgacattcgccctgctggttgcattactggtgctgtcttgcaaatccagttgcagtgttgggtgtgacctgcctcagacccattccctgggttcccgcagaacactgatgctgctcgcccagatgagaagaatttctctgttctcatgcctcaaagacagacatgatttcggcttccctcaagaagagttcggcaaccagttccagaaagctgagaccatccctgtcctgcacgagatgatccagcagattttcaatctgttcagcaccaaagactcatctgccgcatgggacgaaaccctcctcgacaagttctacaccgagctgtaccaacagcttaacgaccttgaggcctgcgtcattcagggtgttggcgtgaccgagactccgcttatgaaagaggatagtatcctcgcagtgaggaaatacttccagaggattaccttatatttgaaggaaaaaaagtacagcccctgcgcctgggaagtggtgagggctgaaattatgaggtccttctcactgtccactaacttgcaggaaagtctgaggtccaaagagtag

SEQ ID NO: 13628 - DNA, 1143 bp, Artificial Sequence
  derived and/or modified sequence
gagaacctggagcctaaggtttaggctcacccatttcaaccagtctagcagcatctgcaacatctacaatggccttgacctttgctttactggtggccctcctggtgctcagctgcaagtcaagctgctctgtgggctgtgatctgcctcaaacccacagcctgggtagcaggaggaccttgatgctcctggcacagatgaggagaatctctcttttctcctgcttgaaggacagacatgactttggatttccccaggaggagtttggcaaccagttccaaaaggctgaaaccatccctgtcctccatgagatgatccagcagatcttcaatctcttcagcacaaaggactcatctgctgcttgggatgagaccctcctagacaaattctacactgaactctaccagcagctgaatgacctggaagcctgtgtgatacagggggtgggggtgacagagactcccctgatgaaggaggactccattctggctgtgaggaaatacttccaaagaatcactctctatctgaaagagaagaaatacagcccttgtgcctgggaggttgtcagagcagaaatcatgagatctttttctttgtcaacaaacttgcaagaaagtttaagaagtaaggaatgaaaactggttcaacatggaaatgattttcattgattcgtatgccagctcacctttttatgatctgccatttcaaagactcatgtttctgctatgaccatgacacgatttaaatcttttcaaatgtttttaggagtattaatcaacattgtattcagctcttaaggcactagtcccttacagaggaccatgctgactgatccattatctatttaaatatttttaaaatattatttatttaactatttataaaacaacttatttttgttcatattatgtcatgtgcacctttgcacagtggttaatgtaataaaatatgttctttgtatttggtaaatttattttgtgttgttcattgaacttttgctatggaaacttttgtacttgtttattctttaaaatgaaattccaagcctaattgtgcaacctgattacagaataactggtacacttcatttatccatcaatattatattcaagatataagtaaaaataaactttctgtaaacca

SEQ ID NO: 13629 - DNA, 567 bp, Artificial Sequence
  derived and/or modified sequence
atggctttgacattcgccttgcttgttgctctgttagttctaagctgtaagtcctcttgttctgtgggatgcgacctcccacagacccatagcctcgggtcaaggcggacgctgatgctcctcgcccagatgagaagaatctcacttttcagctgcttaaaagacagacacgacttcggcttcccacaggaagagttcggcaaccagttccagaaggctgaaaccattcctgtcctgcacgaaatgatacagcaaatttttaatttattttcaactaaggatagtagtgctgcatgggatgaaacgttactggataagttttacaccgagctatatcaacaactgaacgatctcgaggcgtgcgttatccagggggtgggcgttaccgaaactccactgatgaaagaggattccatcctagcagttagaaagtatttccaacgaatcacgctctaccttaaagagaagaaatattcaccctgcgcatgggaagttgtgcgggctgagattatgaggagcttctctctgagtaccaaccttcaagaatctcttcggtccaaggaatag

SEQ ID NO: 13630 - DNA, 567 bp, Artificial Sequence
  derived and/or modified sequence
atggccctgacattcgcccttctggtggccctcctagtcctgtcctgcaagtccagctgttcagtgggctgcgatctgccccagacacattccctgggctcacgccgcactctcatgttactagcccagatgcgccgaatttctctcttctcttgcttgaaagaccgtcacgatttcgggttcccacaggaagaatttggaaatcagttccaaaaagcggagacaatacccgtgctgcatgaaatgatacaacagatattcaacttattttctactaaagattcctcggccgcctgggatgaaaccctgttagataaattctacacagaactctaccaacagcttaatgatctcgaagcatgtgtcattcagggtgtgggcgtgacagagacccccctgatgaaggaagattccatattggcagtccggaaatactttcagcgaatcactctatacctgaaagaaaagaaatacagcccttgtgcgtgggaagtggtgcgcgcagaaattatgcgctcattcagcttgagcacaaatctacaagaatcattgcgaagcaaagagtag

SEQ ID NO: 13631 - RNA, 710 nt, Artificial Sequence
  derived and/or modified sequence
gggaaauaagagagaaaagaagaguaagaagaaauauaagagccaccauggccuugacguucgcccuucucguagcccuguuggugcucucaugcaaaucguccuguuccgucggaugcgaucuuccccagacgcauucgcuggggucgcgcagaacucucauguuguuggcgcagaugaggcgaauuagccuuuucucgugucuuaaggaccggcacgauuuugguuucccucaagaggaguuuggcaaccaguuccagaaggcggaaacaauccccguacuccacgagaugauccagcagaucuucaaccuguuuuccacgaaggacuccucagcggcuugggacgaaacccugcuggauaaguuuuacacggagcucuaucagcagcugaaugaccucgaagcaugugugauucaaggagugggggucaccgagacaccgcuuaugaaggaagauucaauccuugcagugcggaaauacuuucagaggaucacuuuguaucuuaaagagaaaaaguacagcccgugcgcgugggaagucgugagagcggagauuaugcgaagcuucucgcugagcacaaauuugcaagagucgcuccgcucaaaagaaugauaagcugccuucugcggggcuugccuucuggccaugcccuucuucucucccuugcaccuguaccucuuggucuuugaauaaagccugaguaggaag

SEQ ID NO: 13632 - RNA, 567 nt, Artificial Sequence
  derived and/or modified sequence
auggcuuugacauucgccuugcuuguugcucuguuaguucuaagcuguaaguccucuuguucugugggaugcgaccucccacagacccauagccucgggucaaggcggacgcugaugcuccucgcccagaugagaagaaucucacuuuucagcugcuuaaaagacagacacgacuucggcuucccacaggaagaguucggcaaccaguuccagaaggcugaaaccauuccuguccugcacgaaaugauacagcaaauuuuuaauuuauuuucaacuaaggauaguagugcugcaugggaugaaacguuacuggauaaguuuuacaccgagcuauaucaacaacugaacgaucucgaggcgugcguuauccagggggugggcguuaccgaaacuccacugaugaaagaggauuccauccuagcaguuagaaaguauuuccaacgaaucacgcucuaccuuaaagagaagaaauauucacccugcgcaugggaaguugugcgggcugagauuaugaggagcuucucucugaguaccaaccuucaagaaucucuucgguccaaggaauag

SEQ ID NO: 13633 - RNA, 567 nt, Artificial Sequence
  derived and/or modified sequence
auggcccugacauucgcccuucugguggcccuccuaguccuguccugcaaguccagcuguucagugggcugcgaucugccccagacacauucccugggcucacgccgcacucucauguuacuagcccagaugcgccgaauuucucucuucucuugcuugaaagaccgucacgauuucggguucccacaggaagaauuuggaaaucaguuccaaaaagcggagacaauacccgugcugcaugaaaugauacaacagauauucaacuuauuuucuacuaaagauuccucggccgccugggaugaaacccuguuagauaaauucuacacagaacucuaccaacagcuuaaugaucucgaagcaugugucauucagggugugggcgugacagagaccccccugaugaaggaagauuccauauuggcaguccggaaauacuuucagcgaaucacucuauaccugaaagaaaagaaauacagcccuugugcgugggaaguggugcgcgcagaaauuaugcgcucauucagcuugagcacaaaucuacaagaaucauugcgaagcaaagaguag

SEQ ID NO: 13634 - protein, 201 aa, Artificial Sequence
  derived and/or modified sequence
MALSWVLTVLSLLPLLEAQIPLCANLVPVPITNATLDRITGKWFYIASAFRNEEYNKSVQEIQATFFYFTPNKTEDTIFLREYQTRQDQCIYNTTYLNVQRENGTISRYVGGQEHFAHLLILRDTKTYMLAFDVNDEKNWGLSVYADKPETTKEQLGEFYEALDCLRIPKSDVVYTDWKKDKCEPLEKQHEKERKQEEGES

SEQ ID NO: 13635 - DNA, 606 bp, Artificial Sequence
  derived and/or modified sequence
atggccctatcctgggtgctgaccgtcctgagcctgctcccgctgttagaagcgcaaatcccactgtgcgccaatttggtgcccgtaccaattacaaatgccactctggatcgcattacgggaaaatggttttacattgcctccgcattcaggaacgaggagtacaacaagagtgtccaggagatccaagctacttttttctatttcacaccaaacaagactgaggatacaatcttcctccgcgagtaccaaacgcgccaagatcagtgcatttataataccacatacttgaacgtccagagagagaatggtactattagtagatacgtgggaggtcaagagcacttcgctcacctgcttatcctaagggacaccaagacatacatgttggcattcgacgtgaatgatgagaagaattggggtttgagcgtctacgccgacaagccagagacgactaaggaacagctgggcgagttttacgaggccctggactgtttaagaatccctaaatctgacgttgtctacacagattggaagaaagacaagtgtgagcccctggagaagcaacatgagaaagagagaaagcaggaagagggcgaaagttag

SEQ ID NO: 13636 - DNA, 585 bp, Artificial Sequence
  derived and/or modified sequence
atggccctgagttgggtcctgacagtcttgagcctgcttccgttactggaggctcagatacccctctgcgcaaatctggtgcccgtgccaataaccaatgccaccctggatcgcgtaagtgcttgggccagccctgttttgtccacttgggctgccgcaagcctgttgtgggccagcctctccctcttggccgttgtgggacccccgcttcccgctctgccttttagcctactgggcccccagggcgaaattcttacatcccctggggactccggcggtaccccgtgcctccaaactcaaaagcctcactgccgtgtgttacatggcggaagattctgcgccgggccaggcggcgccgcttggggcgctatgaccgaccctcagggcgaactcctccacgcccattgccccccaggcgcatcttctccccacttacagaaccagggtgagatatgcctgtctctgttgccagccgactcccaaaggttcagcataaaacctccctcaccagctcccacgttttcccctgaccattggcaggtcgtattgtaccggattggtcttagcaagcgaggcgtccaatag

SEQ ID NO: 13637 - DNA, 585 bp, Artificial Sequence
  derived and/or modified sequence
atggccctgtcatgggtcctgacagtgctgagcctccttcccttgctcgaagcgcagatccctctttgtgccaacctggtgcctgtgccaatcaccaacgctaccctagaccgggtgagcgcgtgggcatctcctgtgttgtccacttgggcggcagcctccctgctctgggcctccctgtatctgttggcggtggtagcgcctccattacccgctttgcctttttcacttctggggccccaaggagaaattctgactagtccaggcgactctgggggcactccatgtctgcaaactcaaaagccacactgcagagtgttgcacggcggccgcttttgcgccggccccggaggggcggcctggggcgcaatgaccgacccccagggcgaactcctccacgcccactgccccccaggtgcaagcagtccacacctgcagaatcaaggtgagatatgcctgtctctcctgcccgctgactcccagaggtttagtatcaagcccccatctcccgcccctcctttcagccctgaccactggcaggttgttctgtaccggatcggattatcaaagagaggcgtccagtag

SEQ ID NO: 13638 - DNA, 606 bp, Artificial Sequence
  derived and/or modified sequence
atggccctgtcctgggtgctgactgtgctgagcctgctgcccctgctggaggcccagatccccctgtgtgccaacctggtgcctgtgcccatcaccaatgccaccctggaccgcatcaccgggaagtggttctacatcgccagcgccttcagaaatgaggagtacaacaagtctgtgcaggagatccaggccaccttcttctacttcacccccaacaagacagaggacaccatcttcctgcgggagtaccagacccggcaggaccagtgcatctacaacaccacctacctgaatgtgcagcgggagaatggcaccatcagccgctacgtgggcggccaggagcactttgcccacctgctgatcctgcgggacaccaagacctacatgctggcctttgatgtgaatgatgagaagaactggggcctgtctgtgtatgctgacaagccagagaccaccaaggagcagctgggggagttctatgaggccctggactgcctgcgcatccccaagagtgatgtggtgtacacagactggaagaaggacaagtgtgagcccctggagaagcagcacgagaaggagaggaagcaggaggagggggagagctag

SEQ ID NO: 13639 - DNA, 585 bp, Artificial Sequence
  derived and/or modified sequence
atggccctgtcctgggtgctgactgtgctgagcctgctgcccctgctggaggcccagatccccctgtgtgccaacctggtgcctgtgcccatcaccaatgccaccctggacagagtgtctgcctgggccagccctgtgctgagcacctgggccgccgccagcctgctgtgggccagcctgagcctgctggccgtggtgggcccccccctgcctgccctgcccttcagcctgctgggcccccagggcgagatcctgaccagccctggggacagcggcggcaccccctgcctgcagacccagaagccccactgccgggtgctgcacggcggccgcttctgtgccggccctgggggcgccgcctggggcgccatgacagacccccagggcgagctgctgcacgcccactgccccccaggggccagcagcccccacctgcagaaccagggcgagatctgcctgagcctgctgcctgctgacagccagcgcttcagcatcaagccacccagccctgcccccaccttctccccagaccactggcaggtggtgctgtaccgcatcggcctgagcaagaggggcgtgcagtag

SEQ ID NO: 13640 - DNA, 585 bp, Artificial Sequence
  derived and/or modified sequence
atggccctgtcctgggtgctgactgtgctgagcctgctgcccctgctggaggcccagatccccctgtgtgccaacctggtgcctgtgcccatcaccaatgccaccctggacagagtgtctgcctgggccagccctgtgctgagcacctgggccgccgccagcctgctgtgggccagcctgtacctgctggccgtggtggccccacccctgcctgccctgcccttcagcctgctgggcccccagggcgagatcctgaccagccctggggacagcggcggcaccccctgcctgcagacccagaagccccactgccgggtgctgcacggcggccgcttctgtgccggccctgggggcgccgcctggggcgccatgacagacccccagggcgagctgctgcacgcccactgccccccaggggccagcagcccccacctgcagaaccagggcgagatctgcctgagcctgctgcctgctgacagccagcgcttcagcatcaagccacccagccctgccccacccttctccccagaccactggcaggtggtgctgtaccgcatcggcctgagcaagaggggcgtgcagtag

SEQ ID NO: 13641 - DNA, 606 bp, Artificial Sequence
  derived and/or modified sequence
atggccctgagctgggtgctgaccgtgctgagcctgctgcccctgttggaagcacagattcccttgtgcgctaacttggtgccagtccccattactaatgctaccctggacagaatcacaggaaagtggttctacattgcctctgctttcagaaatgaggagtacaacaaaagcgttcaggaaatccaggcgacctttttctactttacaccgaataagacagaggacacaatttttctccgcgaataccaaacaagacaggaccaatgcatctataataccacttacctgaacgtgcagagagagaacggcaccatctccaggtatgtgggtggccaggaacacttcgcgcacctgctgatccttagggacactaagacctacatgctggcctttgacgtgaatgacgagaaaaattggggactcagcgtctacgcagacaagcccgaaaccacaaaggaacaattgggtgagttttacgaagccctcgattgtctgagaattcctaagagtgatgtggtctatacagactggaagaaagacaagtgcgaacctttagagaaacagcacgagaaagaaagaaagcaggaggaaggcgaatcctag

SEQ ID NO: 13642 - DNA, 585 bp, Artificial Sequence
  derived and/or modified sequence
atggccctgagctgggtgctgaccgtgctgagcctgctgcccctgcttgaggcacagattccactgtgcgccaatcttgtccctgtgcctatcacaaacgccacactggaccgggttagtgcatgggcatctcctgtgctcagtacttgggctgctgccagcctactctgggcctcgctcagcctcctcgctgtggtgggtcccccactgcctgctctaccgttctctctactgggaccccagggtgaaatcctgaccagcccaggtgatagcggcggcaccccatgcctgcagacccagaagccccattgcagggtgctgcatggcggtcgcttttgtgctggccctgggggcgccgcctggggcgccatgacggatccacagggtgaactgttgcatgctcattgtcccccgggagcatcctcacctcacctgcaaaatcagggagagatttgcctcagtctgttgccagccgatagtcagagattcagcattaagccgccttcccccgcaccaaccttcagtcccgaccattggcaggtggtgctgtatcggatcgggctgtcgaagcgaggagtccagtag

SEQ ID NO: 13643 - DNA, 585 bp, Artificial Sequence
  derived and/or modified sequence
atggccctgagctgggtgctgaccgtgctgagcctgctgcccctgctggaggcgcaaatccctctctgtgccaacctcgtcccggtcccaattacaaacgcaactcttgatagggtgtccgcctgggcctccccagttctgtccacctgggcagccgcctccctactgtgggcttccttatacctgctggccgtggtagcgcctcctctccccgccctgccatttagcctcttgggcccgcagggcgagatcctgacaagtcccggggacagcgggggaactccctgtctgcagacacaaaagccacactgccgagtcctgcacggaggacggttttgtgctggacctggaggtgcggcctggggggccatgaccgacccacaaggagaactgttgcatgctcactgtccaccaggagccagcagtcctcacttacagaaccagggtgaaatatgtctgagccttctgccagctgactctcaacgattcagcatcaagcccccttctccagccccccccttttcccccgatcattggcaggtagttctctaccgcatcggcttaagtaagagaggagtgcaatag

SEQ ID NO: 13644 - DNA, 802 bp, Artificial Sequence
  derived and/or modified sequence
gcccatagtttattataaaggtgactgcaccctgcagccaccagcactgcctggctccacgtgcctcctggtctcagtatggcgctgtcctgggttcttacagtcctgagcctcctacctctgctggaagcccagatcccattgtgtgccaacctagtaccggtgcccatcaccaacgccaccctggaccggatcactggcaagtggttttatatcgcatcggcctttcgaaacgaggagtacaataagtcggttcaggagatccaagcaaccttcttttacttcacccccaacaagacagaggacacgatctttctcagagagtaccagacccgacaggaccagtgcatctataacaccacctacctgaatgtccagcgggaaaatgggaccatctccagatacgtgggaggccaagagcatttcgctcacttgctgatcctcagggacaccaagacctacatgcttgcttttgacgtgaacgatgagaagaactgggggctgtctgtctatgctgacaagccagagacgaccaaggagcaactgggagagttctacgaagctctcgactgcttgcgcattcccaagtcagatgtcgtgtacaccgattggaaaaaggataagtgtgagccactggagaagcagcacgagaaggagaggaaacaggaggagggggaatcctagcaggacacagccttggatcaggacagagacttgggggccatcctgcccctccaacccgacatgtgtacctcagctttttccctcacttgcatcaataaagcttctgtgtttggaacag

SEQ ID NO: 13645 - DNA, 996 bp, Artificial Sequence
  derived and/or modified sequence
cagcactgcctggctccacgtgcctcctggtctcagtatggcgctgtcctgggttcttacagtcctgagcctcctacctctgctggaagcccagatcccattgtgtgccaacctagtaccggtgcccatcaccaacgccaccctggaccgggtgagtgcctgggctagccctgtcctgagcacatgggcagctgcctcccttctctgggcttccctttccctgctggctgtggtcggacccccactcccggctctgcctttttctcttctgggtccccagggtgaaattctcaccagcccaggggactctggaggcaccccctgcctccaaacacagaagcctcactgcagagtccttcacggaggacggttctgtgctgggcctggaggggctgcctggggggcaatgactgatcctcagggtgagctcctgcatgcgcactgcccaccaggggcctcatctccccatctgcaaaatcagggagagatctgcctgagtctcctcccagctgacagtcaaagattcagcatcaagcccccatcaccagctcccaccttctccccagatcactggcaagtggttttatatcgcatcggcctttcgaaacgaggagtacaataagtcggttcaggagatccaagcaaccttcttttacttcacccccaacaagacagaggacacgatctttctcagagagtaccagacccgacaggaccagtgcatctataacaccacctacctgaatgtccagcgggaaaatgggaccatctccagatacggtgagggccagccctcaggcaggagggttcactgtgggaacagggcaggccagcataaggtgggggctggatgtagagccctggaggctttgggcacagagaaataaccactaacatttttgagctctaacgatgtgctcagaaacaactctaagaggacactgagagaattagaggaggaaaaagaagaacagagacctcaaatagtttccccaa

SEQ ID NO: 13646 - DNA, 606 bp, Artificial Sequence
  derived and/or modified sequence
atggccctgtcctgggtactgacggtcttgtccttgctgccgctgctcgaggcacagatacctctgtgcgccaacctcgtaccagtgccaattacgaacgcaactctggataggattacgggtaagtggttttatatcgccagcgcattcagaaacgaagaatacaacaaatctgttcaggaaattcaggctacgtttttctacttcacacctaacaagaccgaggatacaatcttcctcagagagtatcagacaagacaggatcagtgcatatataataccacatacctgaacgtgcagagagaaaatggcacaatttcaaggtacgttggcggacaggaacactttgcccacttactcatcttaagagataccaagacatacatgctggcttttgacgtgaacgatgagaaaaactgggggctttccgtctacgctgacaagccagaaacaaccaaagaacaactgggcgaattctacgaagccctcgactgtcttaggattcccaagtccgatgtagtttacactgattggaagaaggataagtgtgagcctctggagaaacagcacgaaaaggagaggaaacaggaagaaggggagagttag

SEQ ID NO: 13647 - DNA, 585 bp, Artificial Sequence
  derived and/or modified sequence
atggcactatcgtgggtgctgaccgttctgagtctgctgcccctcctggaggcccagatcccgctgtgtgctaatctggtgcccgtgccaattaccaacgctaccctcgatcgggtgtcagcatgggcatcccctgtcctctcaacatgggccgctgcctctctgctgtgggcgagtctttctctgctggcagtcgtcggaccccctctgccggctctaccattttccttgctggggcctcaaggcgagatcctgacttctcctggagattcagggggaacaccgtgtttacagactcagaaaccacattgcagagtactgcacgggggacggttctgcgctggacctgggggagctgcctggggggctatgacagacccccagggcgaattattacacgcccattgtcctcctggcgctagttcccctcaccttcagaaccagggcgagatctgcctttcactcctgcccgcagactcacagcggttctcaattaaaccaccttcgcccgctcccacatttagtcccgatcactggcaggttgtgctgtatagaattggacttagcaagagaggggtacaatag

SEQ ID NO: 13648 - DNA, 585 bp, Artificial Sequence
  derived and/or modified sequence
atggccttgagctgggtactgacggtgctttccctgctgcctctccttgaggctcaaattcctctctgcgccaacctggtaccagtgccaataaccaacgcgacactcgacagagtgagtgcctgggccagccctgttctctccacatgggccgctgctagtctgttgtgggcttctctgtacctactggctgtggtggctcccccacttccagcactgccattcagcctgttgggcccacaaggggaaatcctgacatccccgggagattctggaggaactccttgtctgcaaacgcagaagccccattgtcgagtcctgcatggtggaagattttgtgctggtcccggaggagctgcttggggtgccatgacagaccctcaaggtgaactcctacatgcccactgccctccaggcgctagctcccctcatttgcagaatcagggggaaatatgcttgtctctgttaccagcagattctcagcgctttagcattaagccacccagcccagctcctccgtttagcccagaccattggcaggtggtcctgtaccggatcggactatctaagcggggagtgcagtag

SEQ ID NO: 13649 - DNA, 606 bp, Artificial Sequence
  derived and/or modified sequence
atggccctgagctgggtgctgaccgtgctgagcctgctgcccctgctggaggcccagatccccctgtgcgccaacctggtgcccgtgcccatcaccaacgccaccctggacagaatcaccggcaagtggttctacatcgccagcgccttcagaaacgaggagtacaacaagagcgtgcaggagatccaggccaccttcttctacttcacccccaacaagaccgaggacaccatcttcctgagagagtaccagaccagacaggaccagtgcatctacaacaccacctacctgaacgtgcagagagagaacggcaccatcagcagatacgtgggcggccaggagcacttcgcccacctgctgatcctgagagacaccaagacctacatgctggccttcgacgtgaacgacgagaagaactggggcctgagcgtgtacgccgacaagcccgagaccaccaaggagcagctgggcgagttctacgaggccctggactgcctgagaatccccaagagcgacgtggtgtacaccgactggaagaaggacaagtgcgagcccctggagaagcagcacgagaaggagagaaagcaggaggagggcgagagctag

SEQ ID NO: 13650 - DNA, 585 bp, Artificial Sequence
  derived and/or modified sequence
atggccctgagctgggtgctgaccgtgctgagcctgctgcccctgctggaggcccagatccccctgtgcgccaacctggtgcccgtgcccatcaccaacgccaccctggacagagtgagcgcctgggccagccccgtgctgagcacctgggccgccgccagcctgctgtgggccagcctgagcctgctggccgtggtgggcccccccctgcccgccctgcccttcagcctgctgggcccccagggcgagatcctgaccagccccggcgacagcggcggcaccccctgcctgcagacccagaagccccactgcagagtgctgcacggcggcagattctgcgccggccccggcggcgccgcctggggcgccatgaccgacccccagggcgagctgctgcacgcccactgcccccccggcgccagcagcccccacctgcagaaccagggcgagatctgcctgagcctgctgcccgccgacagccagagattcagcatcaagccccccagccccgcccccaccttcagccccgaccactggcaggtggtgctgtacagaatcggcctgagcaagagaggcgtgcagtag

SEQ ID NO: 13651 - DNA, 585 bp, Artificial Sequence
  derived and/or modified sequence
atggccctgagctgggtgctgaccgtgctgagcctgctgcccctgctggaggcccagatccccctgtgcgccaacctggtgcccgtgcccatcaccaacgccaccctggacagagtgagcgcctgggccagccccgtgctgagcacctgggccgccgccagcctgctgtgggccagcctgtacctgctggccgtggtggccccccccctgcccgccctgcccttcagcctgctgggcccccagggcgagatcctgaccagccccggcgacagcggcggcaccccctgcctgcagacccagaagccccactgcagagtgctgcacggcggcagattctgcgccggccccggcggcgccgcctggggcgccatgaccgacccccagggcgagctgctgcacgcccactgcccccccggcgccagcagcccccacctgcagaaccagggcgagatctgcctgagcctgctgcccgccgacagccagagattcagcatcaagccccccagccccgccccccccttcagccccgaccactggcaggtggtgctgtacagaatcggcctgagcaagagaggcgtgcagtag

SEQ ID NO: 13652 - protein, 194 aa, Artificial Sequence [sequence omitted]

SEQ ID NO: 13653 - protein, 194 aa, Artificial Sequence [sequence omitted]

SEQ ID NO: 13654 - protein, 201 aa, Artificial Sequence
  derived and/or modified sequence
MALSWVLTVLSLLPLLEAQIPLCANLVPVPITNATLDRITGKWFYIASAFRNEEYNKSVQEIQATFFYFTPNKTEDTIFLREYQTRQNQCFYNSSYLNVQRENGTVSRYEGGREHVAHLLFLRDTKTLMFGSYLDDEKNWGLSFYADKPETTKEQLGEFYEALDCLCIPRSDVMYTDWKKDKCEPLEKQHEKERKQEEGES

SEQ ID NO: 13655 - DNA, 606 bp, Artificial Sequence
  derived and/or modified sequence
atggctctgagttgggttctgacagtgctgtccctgctgccactacttgaggcgcagatacctctgtgtgctaacttggtgccggtgccaatcactaatgccaccctcgatcggatcacagggaaatggttctatattgctagtgcttttcggaatgaagagtacaataagtctgtgcaggaaatacaggccacatttttttattttacacccaacaaaacagaagacacgattttcttacgcgagtaccaaacaaggcaaaatcagtgcttttacaacagttcctatctgaacgtgcagagggagaatggcactgtgagcagatacgagggcggtagagagcacgtcgcccatctgctgtttctgagggataccaagaccctgatgttcggcagttacctggatgacgagaaaaattggggtctgagcttctacgccgacaagcccgagactaccaaggaacagctgggagagttttacgaggcactagattgcctgtgtattcctagatctgacgtcatgtataccgattggaaaaaggacaaatgtgagcccctggaaaagcagcacgagaaagaacggaagcaggaggagggagaatcttag

SEQ ID NO: 13656 - DNA, 606 bp, Artificial Sequence
  derived and/or modified sequence
atggccctgtcctgggtgctgactgtgctgagcctgctgcccctgctggaggcccagatccccctgtgtgccaacctggtgcctgtgcccatcaccaatgccaccctggaccgcatcaccgggaagtggttctacatcgccagcgccttcagaaatgaggagtacaacaagtctgtgcaggagatccaggccaccttcttctacttcacccccaacaagacagaggacaccatcttcctgcgggagtaccagacccggcagaaccagtgcttctacaacagcagctacctgaatgtgcagcgggagaatggaacagtgagccgctatgaaggaggccgggagcacgtggcccacctgctcttcctgcgggacaccaagaccctgatgtttggcagctacctggatgatgagaagaactggggcctgtccttctacgccgacaagccagagaccaccaaggagcagctgggggagttctatgaggccctggactgcctgtgcatccccaggagtgatgtgatgtacacagactggaagaaggacaagtgtgagcccctggagaagcagcacgagaaggagaggaagcaggaggagggggagagctag

SEQ ID NO: 13657 - DNA, 606 bp, Artificial Sequence
  derived and/or modified sequence
atggccctgagctgggtgctgaccgtgctgagcctgctgcccctgttggaggcacagatccctttatgcgctaatctggtaccagtaccgattacgaatgccaccctagatcggatcaccggcaagtggttctatatcgccagcgcttttcgcaacgaggagtacaataagtctgtccaagagatacaggccacttttttttattttacccccaataagactgaggacacaatattcctgcgtgagtatcagacccgccaaaaccaatgcttttacaactccagctacttgaacgttcagcgcgagaatggcactgttagccggtacgaaggcggcagagagcacgttgcgcacctgctcttcctgagagatactaaaacccttatgttcggatcctatctggacgatgagaaaaactgggggttgtccttttacgccgacaagcctgagacaaccaaggagcaactgggcgagttctacgaggccctggactgcttgtgtatcccacgcagtgacgtgatgtacactgattggaaaaaggataagtgcgaaccactggagaagcagcacgaaaaggagcggaaacaagaggaaggcgaatcgtag

SEQ ID NO: 13658 - DNA, 980 bp, Artificial Sequence
  derived and/or modified sequence
actgcctggctccacgtgcctcctggtctcagtatggcgctgtcctgggttcttacagtcctgagcctcctacctctgctggaagcccagatcccattgtgtgccaacctagtaccggtgcccatcaccaacgccaccctggaccgggtgagtgcctgggctagccctgtcctgagcacatgggcagctgcctcccttctctgggcttccctttacctgctggctgtggtcgcacccccactcccagctctgcctttttctcttctgggtccccagggtgaaattctcaccagcccaggggactctggaggcaccccctgcctccaaacacagaagcctcactgcagagtccttcacggaggacggttctgtgctgggcctggaggggctgcctggggggcaatgactgatcctcagggtgagctcctgcatgcgcactgcccaccaggggcctcatctccccatctgcaaaatcagggagagatctgcctgagtctcctcccagctgacagtcaaagattcagcatcaagcccccatcaccagctccccccttctccccagatcactggcaagtggttttatatcgcatcggcctttcgaaacgaggagtacaataagtcggttcaggagatccaagcaaccttcttttactttacccccaacaagacagaggacacgatctttctcagagagtaccagacccgccagaaccagtgcttctataactccagttacctgaatgtccagcgggagaatgggaccgtctccagatacgagggaggccgagaacatgttgctcacctgctgttccttagggacaccaagaccttgatgtttggttcctacctggacgatgagaagaactgggggctgtctttctatgctgacaagccagagacgaccaaggagcaactgggagagttctacgaagctctcgactgcttgtgcattcccaggtcagatgtcatgtacaccgact

SEQ ID NO: 13659 - DNA, 760 bp, Artificial Sequence
  derived and/or modified sequence
agcactgcctggctccacgtgcctcctggtctcagtatggcgctgtcctgggttcttacagtcctgagcctcctacctctgctggaagcccagatcccattgtgtgccaacctagtaccggtgcccatcaccaacgccaccctggaccggatcactggcaagtggttttatatcgcatcggcctttcgaaacgaggagtacaataagtcggttcaggagatccaagcaaccttcttttactttacccccaacaagacagaggacacgatctttctcagagagtaccagacccgccagaaccagtgcttctataactccagttacctgaatgtccagcgggagaatgggaccgtctccagatacgagggaggccgagaacatgttgctcacctgctgttccttagggacaccaagaccttgatgtttggttcctacctggacgatgagaagaactgggggctgtctttctatgctgacaagccagagacgaccaaggagcaactgggagagttctacgaagctctcgactgcttgtgcattcccaggtcagatgtcatgtacaccgactggaaaaaggataagtgtgagccactggagaagcagcacgagaaggagaggaaacaggaggagggggaatcctagcaggacacagccttggatcaggacagagacttgggggccatcctgcccctccaacccgacatgtgtacctcagctttttccctcacttgcatcaataaagcttctgtgtttggaacag

SEQ ID NO: 13660 - DNA, 606 bp, Artificial Sequence
  derived and/or modified sequence
atggcactctcgtgggtccttactgtgctgtctttgttaccactcctagaggcacagatcccgttgtgtgcgaatcttgttccagtgcccataaccaatgccaccttggacaggatcacggggaaatggttctacatagcgtccgcattccggaatgaggagtacaacaaaagcgtgcaggaaatccaggctacattcttctatttcacgccaaacaagactgaagataccattttcctgcgcgagtaccagacacggcagaatcagtgcttttacaacagctcttacctgaatgtgcagagagagaatgggaccgtgagccgctacgagggaggaagagaacacgttgcccacttgctgtttctacgagataccaagactctaatgttcgggtcctacctcgacgacgaaaagaattgggggctgtccttctacgccgataagcccgaaacgaccaaggagcagctaggtgaattctacgaggctctggactgtctgtgtattccaagaagcgatgtgatgtatacagattggaagaaagataagtgcgaaccgttggagaagcagcacgaaaaggagcggaagcaggaggaaggcgaatcatag

SEQ ID NO: 13661 - DNA, 606 bp, Artificial Sequence
  derived and/or modified sequence
atggccctgagctgggtgctgaccgtgctgagcctgctgcccctgctggaggcccagatccccctgtgcgccaacctggtgcccgtgcccatcaccaacgccaccctggacagaatcaccggcaagtggttctacatcgccagcgccttcagaaacgaggagtacaacaagagcgtgcaggagatccaggccaccttcttctacttcacccccaacaagaccgaggacaccatcttcctgagagagtaccagaccagacagaaccagtgcttctacaacagcagctacctgaacgtgcagagagagaacggcaccgtgagcagatacgagggcggcagagagcacgtggcccacctgctgttcctgagagacaccaagaccctgatgttcggcagctacctggacgacgagaagaactggggcctgagcttctacgccgacaagcccgagaccaccaaggagcagctgggcgagttctacgaggccctggactgcctgtgcatccccagaagcgacgtgatgtacaccgactggaagaaggacaagtgcgagcccctggagaagcagcacgagaaggagagaaagcaggaggagggcgagagctag

SEQ ID NO: 13662 - protein, 93 aa, Artificial Sequence
  derived and/or modified sequence
MNAKVVVVLVLVLTALCLSDGKPVSLSYRCPCRFFESHVARANVKHLKILNTPNCALQIVARLKNNNRQVCIDPKLKWIQEYLEKALNKRFKM

SEQ ID NO: 13663 - DNA, 282 bp, Artificial Sequence
  derived and/or modified sequence
atgaacgccaaggtggtggtggtgctggtgctggtgctgaccgccctgtgcctgagcgacggcaagcccgtgagcctgagctacagatgcccctgcagattcttcgagagccacgtggccagagccaacgtgaagcacctgaagatcctgaacacccccaactgcgccctgcagatcgtggccagactgaagaacaacaacagacaggtgtgcatcgaccccaagctgaagtggatccaggagtacctggagaaggccctgaacaagagattcaagatgtag

SEQ ID NO: 13664 - DNA, 3532 bp, Artificial Sequence
  derived and/or modified sequence
actttcactctccgtcagccgcattgcccgctcggcgtccggcccccgacccgcgctcgtccgcccgcccgcccgcccgcccgcgccatgaacgccaaggtcgtggtcgtgctggtcctcgtgctgaccgcgctctgcctcagcgacgggaagcccgtcagcctgagctacagatgcccatgccgattcttcgaaagccatgttgccagagccaacgtcaagcatctcaaaattctcaacactccaaactgtgcccttcagattgtagcccggctgaagaacaacaacagacaagtgtgcattgacccgaagctaaagtggattcaggagtacctggagaaagctttaaacaagaggttcaagatgtgagagggtcagacgcctgaggaacccttacagtaggagcccagctctgaaaccagtgttagggaagggcctgccacagcctcccctgccagggcagggccccaggcattgccaagggctttgttttgcacactttgccatattttcaccatttgattatgtagcaaaatacatgacatttatttttcatttagtttgattattcagtgtcactggcgacacgtagcagcttagactaaggccattattgtacttgccttattagagtgtctttccacggagccactcctctgactcagggctcctgggttttgtattctctgagctgtgcaggtggggagactgggctgagggagcctggccccatggtcagccctagggtggagagccaccaagagggacgcctgggggtgccaggaccagtcaacctgggcaaagcctagtgaaggcttctctctgtgggatgggatggtggagggccacatgggaggctcacccccttctccatccacatgggagccgggtctgcctcttctgggagggcagcagggctaccctgagctgaggcagcagtgtgaggccagggcagagtgagacccagccctcatcccgagcacctccacatcctccacgttctgctcatcattctctgtctcatccatcatcatgtgtgtccacgactgtctccatggccctgcaaaaggactctcaggaccaaagctttcatgtaaactgtgcaccaagcaggaaatgaaaatgtcttgtgttacctgaaaacactgtgcacatctgtgtcttgtttggaatattgtccattgtccaatcctatgtttttgttcaaagccagcgtcctcctctgtgaccaatgtcttgatgcatgcactgttccccctgtgcagccgctgagcgaggagatgctccttgggccctttgagtgcagtcctgatcagagccgtggtcctttggggtgaactaccttggttcccccactgatcacaaaaacatggtgggtccatgggcagagcccaagggaattcggtgtgcaccagggttgaccccagaggattgctgccccatcagtgctccctcacatgtcagtaccttcaaactagggccaagcccagcactgcttgaggaaaacaagcattcacaacttgtttttggtttttaaaacccagtccacaaaataaccaatcctggacatgaagattctttcccaattcacatctaacctcatcttcttcaccatttggcaatgccatcatctcctgccttcctcctgggccctctctgctctgcgtgtcacctgtgcttcgggcccttcccacaggacatttctctaagagaacaatgtgctatgtgaagagtaagtcaacctgcctgacatttggagtgttccccttccactgagggcagtcgatagagctgtattaagccacttaaaatgttcacttttgacaaaggcaagcacttgtgggtttttgttttgtttttcattcagtcttacgaatacttttgccctttgattaaagactccagttaaaaaaaattttaatgaagaaagtggaaaacaaggaagtcaaagcaaggaaactatgtaacatgtaggaagtaggaagtaaattatagtgatgtaatcttgaattgtaactgttcttgaatttaataatctgtagggtaattagtaacatgtgttaagtattttcataagtatttcaaattggagcttcatggcagaaggcaaacccatcaacaaaaattgtcccttaaacaaaaattaaaatcctcaatccagctatgttatattgaaaaaatagagcctgagggatctttactagttataaagatacagaactctttcaaaaccttttgaaattaacctctcactataccagtataattgagttttcagtggggcagtcattatccaggtaatccaagatattttaaaatctgtcacgtagaacttggatgtacctgcccccaatccatgaaccaagaccattgaattcttggttgaggaaacaaacatgaccctaaatcttgactacagtcaggaaaggaatcatttctatttctcctccatgggagaaaatagataagagtagaaactgcagggaaaattatttgcataacaattcctctactaacaatcagctccttcctggagactgcccagctaaagcaatatgcatttaaatacagtcttccatttgcaagggaaaagtctcttgtaatccgaatctctttttgctttcgaactgctagtcaagtgcgtccacgagctgtttactagggatccctcatctgtccctccgggacctggtgctgcctctacctgacactcccttgggctccctgtaacctcttcagaggccctcgctgccagctctgtatcaggacccagaggaaggggccagaggctcgttgactggctgtgtgttgggattgagtctgtgccacgtgtttgtgctgtggtgtgtccccctctgtccaggcactgagataccagcgaggaggctccagagggcactctgcttgttattagagattacctcctgagaaaaaaggttccgcttggagcagaggggctgaatagcagaaggttgcacctcccccaaccttagatgttctaagtctttccattggatctcattggacccttccatggtgtgatcgtctgactggtgttatcaccgtgggctccctgactgggagttgatcgcctttcccaggtgctacacccttttccagctggatgagaatttgagtgctctgatccctctacagagcttccctgactcattctgaaggagccccattcctgggaaatattccctagaaacttccaaatcccctaagcagaccactgataaaaccatgtagaaaatttgttattttgcaacctcgctggactctcagtctctgagcagtgaatgattcagtgttaaatgtgatgaatactgtattttgtattgtttcaattgcatctcccagataatgtgaaaatggtccaggagaaggccaattcctatacgcagcgtgctttaaaaaataaataagaaacaactctttgagaaacaacaatttctactttgaagtcataccaatgaaaaaatgtatatgcacttataattttcctaataaagttctgtactcaaatgta

SEQ ID NO: 13665 - DNA, 282 bp, Artificial Sequence
  derived and/or modified sequence
atgaacgctaaggtggtggtggtcctcgtattggtcttgactgccctgtgccttagcgacggcaaacctgtgtcattgagttaccgctgtccttgccgcttcttcgaaagtcatgtggcaagggccaacgtcaagcacttgaagattctgaacacccccaattgcgccctgcaaatcgttgctcggctcaagaacaacaaccgacaggtgtgcattgatccgaaactgaaatggattcaggagtatctggagaaggccctgaacaaaagattcaagatgtag

SEQ ID NO: 13666 - DNA, 282 bp, Artificial Sequence
  derived and/or modified sequence
atgaatgccaaggtggtggtggtgctggtgctggtgctgacagccctgtgcctgagtgatggcaagcctgtgtccctgagctaccgctgcccctgccgcttctttgagagccacgtggcccgggccaacgtgaagcacctgaagatcctgaacacccccaactgtgccctgcagatcgtggcccggctgaagaacaacaaccggcaggtgtgcatcgaccccaagctgaagtggatccaggagtacctggagaaggccctgaacaagcgcttcaagatgtag

SEQ ID NO: 13667 - DNA, 282 bp, Artificial Sequence
  derived and/or modified sequence
atgaacgccaaggtggtggtggtgctggtgctggtgctgaccgccctctgtctgtcggatggcaagcctgtgtcactcagctaccgctgtccctgtcgcttctttgaatctcatgttgccagggcaaatgtcaaacaccttaagatactcaacactcctaactgtgcgctgcaaatagtggctcgtcttaagaacaacaatcggcaggtctgcattgatccgaagctgaagtggatacaggagtatcttgagaaggccctcaataaacggttcaaaatgtag

SEQ ID NO: 13668 - DNA, 282 bp, Artificial Sequence
  derived and/or modified sequence
atgaatgccaaagtggttgtggtcctggtgctggtgctgacggctctgtgtctctcagatggaaagcctgtttccttatcctacaggtgcccttgcagattttttgaaagtcacgtggctagggccaacgtcaaacacctgaaaatattaaatacccccaactgtgcattacaaatcgtggccaggctcaaaaataataataggcaagtgtgtatagaccccaagcttaaatggattcaggagtacctggagaaagccctgaataagcgctttaagatgtag

SEQ ID NO: 13669 - DNA, 282 bp, Artificial Sequence
  derived and/or modified sequence
atgaatgcaaaggttgtggtagttctcgtcctggtgcttacggctttatgcctatctgatggtaagccagtgtccctttcctacagatgcccttgcaggtttttcgagtcacatgtcgctagggccaacgtgaaacatctaaaaattctcaatacaccaaattgcgcattacagatcgtggcaaggctgaaaaataataacaggcaggtttgtatcgatcctaagctgaaatggattcaggagtatctcgaaaaagcacttaataaacgcttcaagatgtag

SEQ ID NO: 13670 - RNA, 282 nt, Artificial Sequence
  derived and/or modified sequence
augaaugcaaagguugugguaguucucguccuggugcuuacggcuuuaugccuaucugaugguaagccagugucccuuuccuacagaugcccuugcagguuuuucgagucacaugucgcuagggccaacgugaaacaucuaaaaauucucaauacaccaaauugcgcauuacagaucguggcaaggcugaaaaauaauaacaggcagguuuguaucgauccuaagcugaaauggauucaggaguaucucgaaaaagcacuuaauaaacgcuucaagauguag

SEQ ID NO: 13671 - protein, 742 aa, Artificial Sequence
  derived and/or modified sequence
MDKFWWHAAWGLCLVPLSLAQIDLNITCRFAGVFHVEKNGRYSISRTEAADLCKAFNSTLPTMAQMEKALSIGFETCRYGFIEGHVVIPRIHPNSICAANNTGVYILTSNTSQYDTYCFNASAPPEEDCTSVTDLPNAFDGPITITIVNRDGTRYVQKGEYRTNPEDIYPSNPTDDDVSSGSSSERSSTSGGYIFYTFSTVHPIPDEDSPWITDSTDRIPATTLMSTSATATETATKRQETWDWFSWLFLPSESKNHLHTTTQMAGTSSNTISAGWEPNEENEDERDRHLSFSGSGIDDDEDFISSTISTTPRAFDHTKQNQDWTQWNPSHSNPEVLLQTTTRMTDVDRNGTTAYEGNWNPEAHPPLIHHEHHEEEETPHSTSTIQATPSSTTEETATQKEQWFGNRWHEGYRQTPKEDSHSTTGTAAASAHTSHPMQGRTTPSPEDSSWTDFFNPISHPMGRGHQAGRRMDMDSSHSITLQPTANPNTGLVEDLDRTGPLSMTTQQSNSQSFSTSHEGLEEDKDHPTTSTLTSSNRNDVTGGRRDPNHSEGSTTLLEGYTSHYPHTKESRTFIPVTSAKTGSFGVTAVTVGDSNSNVNRSLSGDQDTFHPSGGSHTTHGSESDGHSHGSQEGGANTTSGPIRTPQIPEWLIILASLLALALILAVCIAVNSRRRCGQKKKLVINSGNGAVEDRKPSGLNGEASKSQEMVHLVNKESSETPDQFMTADETRNLQNVDMKIGV

SEQ ID NO: 13672 - DNA, 2229 bp, Artificial Sequence
  derived and/or modified sequence
atggataagttttggtggcatgccgcgtggggactctgtctggtacccctgagtctcgcccagattgatttaaatattacatgtcggtttgccggcgtctttcatgttgaaaaaaatgggcgttattctatcagtcgtacagaggccgcagatctctgtaaagcttttaactctacgctcccaactatggcacagatggagaaggcgttgtccatcgggttcgaaacctgtagatacggcttcatcgaggggcacgtcgtgatccctcggattcaccctaactcaatatgtgctgcaaacaacacaggagtctatattctcacttcaaataccagccaatatgacacctattgttttaacgctagcgctcctcctgaagaggactgtacttccgtgaccgatcttcctaatgcttttgacggcccaatcacaattacaatagtgaatagagacggaacgcgctacgttcagaaaggtgaataccggaccaacccggaggacatatacccttctaatcctaccgacgacgacgttagcagcggttcttcaagtgaacgttcatcgacgtctggtggttatatcttctatacattctcgacagttcacccaattccagacgaggatagtccatggatcacagacagcacagaccgcatccccgctactacattaatgtcaacttccgcaactgccaccgagaccgccacgaaaagacaggagacatgggactggttctcatggctgtttctgccctccgaaagcaagaatcatctgcacacaaccacccaaatggccgggacctcctctaatacaatctccgcaggctgggaacccaacgaagaaaacgaggacgagcgggatagacaccttagcttctcaggtagtgggatagatgacgacgaagatttcatttcatctacaatctctaccacacctagagcgtttgaccatacaaaacagaaccaggattggactcagtggaatccttctcacagcaatcctgaagtcctgcttcagactacaacccgcatgaccgatgtggataggaacgggacaaccgcttatgaaggcaattggaatcctgaggcacatcccccactcatccaccacgaacaccatgaagaagaagaaactccgcacagtacttctaccattcaggcgaccccaagttcaacaacagaagaaacagcaacgcagaaggagcagtggtttggcaaccgatggcacgaggggtatcgccaaacgccaaaagaggattcccacagcacgacgggcaccgctgctgccagtgctcacacatctcaccccatgcaaggaaggacaactccgtcccctgaggactccagctggacagatttcttcaatcccatcagccaccccatgggcaggggacaccaggcaggaagacgtatggatatggactcttcccacagcattacgttgcagcctacggccaacccaaatactggattggtggaagacctggaccgtactgggcccttatccatgaccactcagcagtcaaatagtcagtccttttctaccagccacgaaggcctggaagaagacaaagatcacccaacaacaagtaccctcacttccagtaatcgcaatgatgtcaccggaggtaggcgagatcctaaccactcagagggctccaccacactgttggaagggtatacaagccactatccccacacgaaagagtcgcgcacctttatccccgtgacctccgccaaaacaggttcctttggtgtgactgccgtgacagttggagacagcaactctaacgtgaataggagcctctccggggatcaggatacattccacccgagcggaggcagccacaccactcatggatccgagagcgacggtcatagccacggctcacaggaaggcggtgctaataccacctcgggccccatacggacccctcaaattcctgaatggctaattattctggcttcactcttagccctagccctgatcctggccgtgtgcattgccgtcaattctcggaggaggtgtgggcagaagaagaagctggtgatcaactccggaaatggggccgtggaggacagaaagccttccggtctgaatggcgaagcctctaaatctcaggaaatggtccacttggtgaacaaagagtcttctgagacacccgatcagttcatgaccgcagatgagacccgcaacctccagaacgtcgacatgaagatcggagtgtag

SEQ ID NO: 13673 - DNA, 2229 bp, Artificial Sequence
  derived and/or modified sequence
atggacaagttctggtggcacgccgcctggggcctgtgcctggtgcccctgagcctggcccagattgacctgaacatcacctgccgctttgctggggtcttccacgtggagaagaatggccgctacagcatcagcaggacagaagctgctgacctgtgcaaggccttcaacagcaccctgcccaccatggcccagatggagaaggccctgagcatcggctttgagacctgccgctatggcttcatcgagggccacgtggtgatcccccgcatccaccccaacagcatctgtgccgccaacaacacaggagtgtacatcctgaccagcaacaccagccagtatgacacctactgcttcaatgccagcgcccccccagaggaggactgcacctctgtgacagacctgcccaatgcctttgatggccccatcaccatcaccatcgtgaacagagatggcaccaggtatgtgcagaagggggagtaccgcaccaaccctgaggacatctaccccagcaaccccacagatgatgatgtgagcagcggcagcagcagcgagaggagcagcaccagcggcggctacatcttctacaccttcagcacagtgcaccccatcccagatgaggacagcccctggatcacagacagcacagaccgcatcccagccaccaccctgatgagcaccagcgccacagccacagaaacagccaccaagaggcaggagacctgggactggttctcctggctgttcctgcccagcgagagcaagaaccacctgcacaccaccacccagatggccggcaccagcagcaacaccatctctgctggctgggagcccaatgaagaaaatgaagatgagcgggacagacacctgtccttcagcggcagcggcattgatgatgatgaggacttcatcagcagcaccatcagcaccaccccccgggcctttgaccacaccaagcagaaccaggactggacccagtggaaccccagccacagcaaccctgaggtgctgctgcagaccaccaccaggatgacagatgtggacagaaatggcaccacagcctatgagggcaactggaaccctgaggcccaccccccactcatccaccacgagcaccacgaggaggaggagaccccccacagcaccagcaccatccaggccacccccagcagcaccacagaggagacagccacccagaaggagcagtggtttggaaaccgctggcatgagggctaccggcagacccccaaggaggacagccacagcaccaccggcacagctgctgccagcgcccacaccagccaccccatgcagggccgcaccacccccagccctgaggacagctcctggacagacttcttcaaccccatcagccaccccatgggccggggccaccaggccggccgcaggatggacatggacagcagccacagcatcaccctgcagcccacagccaaccccaacacaggcctggtggaggacctggacagaacaggccccctgtccatgaccacccagcagagcaacagccagagcttcagcaccagccatgagggcctggaggaggacaaggaccaccccaccaccagcaccctgaccagcagcaacagaaatgatgtgactggaggccggcgggaccccaaccacagcgagggcagcaccaccctgctggagggctacaccagccactacccccacaccaaggagagcaggaccttcatccctgtgaccagcgccaagacaggcagctttggagtgacagctgtgacagtgggggacagcaacagcaatgtgaacagaagcctgagcggggaccaggacaccttccaccccagcggcggcagccacaccacccacggcagcgagagtgatggccacagccacggcagccaggagggcggggccaacaccaccagcggccccatccgcaccccccagatccctgagtggctgatcatcctggccagcctgctggccctggccctgatcctggccgtgtgcatcgctgtgaacagcagaagaagatgtggccagaagaagaagctggtgatcaacagcggaaatggagctgtggaggacaggaagcccagcggcctgaatggagaggccagcaagagccaggagatggtgcacctggtgaacaaggagagcagcgagaccccagaccagttcatgacagcagatgagaccaggaacctgcagaatgtggacatgaagattggagtgtag

SEQ ID NO: 13674 - DNA, 2229 bp, Artificial Sequence
  derived and/or modified sequence
atggacaagttctggtggcacgccgcctggggcctgtgcctggtgcccctgtccctggcacaaatcgatctcaacatcacatgtcgatttgccggtgtcttccatgtggaaaaaaacggacgctactctatctcacggaccgaagcagctgatctctgcaaagcattcaattcgacgctgcctaccatggctcagatggaaaaagcattgtccataggtttcgaaacctgcagatacggctttattgaaggccacgtggtcattcccaggatccacccaaattccatttgcgccgccaacaacaccggggtgtacatcttaacatctaacacctcccagtacgacacgtattgtttcaacgcttctgcccccccagaggaggactgtacgtccgtcaccgacctgccgaatgccttcgatgggcccatcacaattactattgttaacagagatggcactaggtatgttcagaaaggagaataccgcaccaaccccgaggatatctacccttcaaaccctacagacgatgatgtaagcagtgggtcgagctctgagcgatcctctactagcggagggtatattttttatacctttagcactgtgcatccaatccctgacgaggattctccgtggataaccgattccactgacaggataccagccacaacccttatgtccacctcagcaacagcaactgagacagccaccaagagacaagaaacatgggactggttcagctggctgtttttgccctctgaatccaagaatcatctccacacaacaactcagatggcagggacaagctccaacactataagcgcgggttgggagcccaacgaagagaatgaggatgagagagatcgtcacctgagcttctccggctctggtatcgatgatgatgaggattttatctctagcacaattagcactactccacgagcgttcgaccacacaaagcagaaccaggattggacacagtggaatcccagccattccaatcccgaggtcctgctacagaccaccaccaggatgaccgatgtcgaccgaaacggaacaactgcttatgaaggcaattggaacccagaggcacacccacccttgatccaccatgagcatcatgaggaagaagagacgcctcacagtacctcaactatacaggccaccccctcatctacaacagaggaaacagccacacaaaaagaacagtggtttggaaacaggtggcatgaaggctatcgtcagacacccaaagaggattctcactccacaactggcaccgcagcagctagcgcccacacatcccaccctatgcaaggcaggaccacaccaagccctgaagacagctcctggactgatttctttaatccaatctcacaccccatgggcagaggtcaccaggcgggtcgacggatggacatggacagctcccattccattaccctgcagcccactgcgaacccaaatactggcctggttgaggacctcgatcgcaccgggcctctttcaatgacaactcagcaatctaatagccagagcttctccacttctcatgaaggtctggaggaagataaggatcaccccacaacttcaacactgacctcctcaaacagaaatgacgtcaccgggggtcgtagggatcccaaccacagtgagggatctacgaccctcctcgaggggtacactagtcattacccccatactaaggaatccaggaccttcattccggtgacctcagcgaagacaggttctttcggggtgaccgccgtcacagttggagattctaactcgaacgtcaacagatctctaagcggagaccaggataccttccacccgagcggtgggtcacacaccacgcacgggtccgaatctgatggacatagtcatgggtctcaggagggtggggctaatactacttctgggccaattcgcacgccccaaatccctgaatggctgatcattctagcttctttgttagctctggctttaattcttgcagtctgcattgcagtcaactcccggcgtcgctgtgggcagaagaaaaaactggtaataaactctgggaacggtgctgtcgaagaccgtaaaccttccggcttgaacggggaagcaagcaaaagccaggagatggtgcacctggtgaataaagagagttctgagacaccagaccagtttatgactgctgatgagacgaggaaccttcaaaatgtggacatgaaaatcggcgtgtag

SEQ ID NO: 13675 - DNA, 2229 bp, Artificial Sequence
  derived and/or modified sequence
atggacaagttttggtggcacgcggcttggggtctgtgtctggtcccgctgagcctcgcccaaatcgacttaaatattacgtgtcggtttgcaggtgtgtttcacgtcgagaaaaacggccgatattctatctcccgcacagaggctgcagatctttgcaaggccttcaattctacactccctacaatggcacagatggagaaagcactctcaatcggctttgaaacatgccggtatggattcattgaaggccacgttgttatccctcggattcatcccaattctatctgtgctgccaataatacaggtgtgtacattctgacatctaatacatcccagtatgacacgtactgcttcaacgcatctgcaccccctgaggaggactgcacctccgttaccgatctgccgaacgcctttgatggcccaattacaatcaccattgtgaaccgggacggaactaggtacgtgcagaaaggcgagtaccgcactaatccggaagacatttacccttccaacccaactgatgacgacgtgtccagtggcagcagctccgaacgctccagtacatcgggcggatatatcttctacacattctcaactgtccatcccatccccgacgaggactcaccctggatcacagacagcacagacaggattcctgccaccacattgatgagtactagcgccactgctacagaaacagccacaaagcggcaagagacatgggattggttttcatggcttttcctgccctcagagtccaagaatcatttgcacactacaacccagatggcaggcaccagctcgaacactatttccgcaggctgggagccaaatgaagaaaatgaggatgaaagagacagacacttgagcttctccgggtccggtatcgatgacgacgaagactttatcagcagtacaatatctacaacacctagggctttcgaccacaccaaacaaaaccaggattggacccagtggaatcctagtcactctaatcctgaagtcctgctgcagacaacaacacgaatgaccgacgtagaccggaatggaaccaccgcctacgaggggaactggaaccctgaggcacatccgccactcatccatcatgaacaccacgaggaggaggagaccccccactccacaagcacaatccaggctacacccagttcaacaaccgaggaaacggctactcagaaggaacagtggtttggcaacagatggcatgaagggtaccggcagacacccaaggaggattcgcactctaccactggcacagcggctgcctcagctcacacgtcccaccccatgcaaggccgtacgacgcctagccctgaggactccagttggacagacttcttcaatccaatttcccatccaatggggcgagggcaccaggccggtcgtcgcatggatatggactccagccactctatcactttgcagcccaccgcaaatccaaatacaggcctggttgaggatttggataggacgggaccattgtctatgacaacacagcagagtaatagccagtctttcagtacatcccatgagggtctggaggaagacaaagaccaccccaccacttctacattgacatcctccaatcggaacgatgttaccgggggtaggcgcgaccccaatcactcagaaggatccaccacacttttagagggctatacatctcattacccgcacactaaagagtctcgcactttcatacctgtgacgagcgctaaaacaggcagcttcggggtgaccgcggtgacagtcggggactctaacagtaacgtaaaccgaagtcttagtggcgaccaagatactttccatccgtcgggtgggagccatactacccacggatcagaatccgatggacatagtcatgggtcccaggaaggcggagcaaacaccacgagcggcccaattagaacccctcaaatcccagagtggttgatcattctggctagtctgttggcattagctctcattcttgctgtgtgcatcgcggtgaattcacgcaggcggtgtggacagaagaagaagcttgtgattaattccgggaatggcgcagtggaggatcggaagccctcgggcttgaacggcgaagcgagtaaatctcaggagatggtgcacctagttaataaagagagttctgaaactcctgaccagttcatgaccgccgatgaaaccagaaatttacagaacgtggatatgaagattggagtatag

SEQ ID NO: 13676 - DNA, 3046 bp, Artificial Sequence
  derived and/or modified sequence
agcggaccccagcctctgccaggttcggtccgccatcctcgtcccgtcctccgccggcccctgccccgcgcccagggatcctccagctcctttcgcccgcgccctccgttcgctccggacaccatggacaagttttggtggcacgcagcctggggactctgcctcgtgccgctgagcctggcgcagatcgatttgaatataacctgccgctttgcaggtgtattccacgtggagaaaaatggtcgctacagcatctctcggacggaggccgctgacctctgcaaggctttcaatagcaccttgcccacaatggcccagatggagaaagctctgagcatcggatttgagacctgcaggtatgggttcatagaagggcacgtggtgattccccggatccaccccaactccatctgtgcagcaaacaacacaggggtgtacatcctcacatccaacacctcccagtatgacacatattgcttcaatgcttcagctccacctgaagaagattgtacatcagtcacagacctgcccaatgcctttgatggaccaattaccataactattgttaaccgtgatggcacccgctatgtccagaaaggagaatacagaacgaatcctgaagacatctaccccagcaaccctactgatgatgacgtgagcagcggctcctccagtgaaaggagcagcacttcaggaggttacatcttttacaccttttctactgtacaccccatcccagacgaagacagtccctggatcaccgacagcacagacagaatccctgctaccactttgatgagcactagtgctacagcaactgagacagcaaccaagaggcaagaaacctgggattggttttcatggttgtttctaccatcagagtcaaagaatcatcttcacacaacaacacaaatggctggtacgtcttcaaataccatctcagcaggctgggagccaaatgaagaaaatgaagatgaaagagacagacacctcagtttttctggatcaggcattgatgatgatgaagattttatctccagcaccatttcaaccacaccacgggcttttgaccacacaaaacagaaccaggactggacccagtggaacccaagccattcaaatccggaagtgctacttcagacaaccacaaggatgactgatgtagacagaaatggcaccactgcttatgaaggaaactggaacccagaagcacaccctcccctcattcaccatgagcatcatgaggaagaagagaccccacattctacaagcacaatccaggcaactcctagtagtacaacggaagaaacagctacccagaaggaacagtggtttggcaacagatggcatgagggatatcgccaaacacccaaagaagactcccattcgacaacagggacagctgcagcctcagctcataccagccatccaatgcaaggaaggacaacaccaagcccagaggacagttcctggactgatttcttcaacccaatctcacaccccatgggacgaggtcatcaagcaggaagaaggatggatatggactccagtcatagtataacgcttcagcctactgcaaatccaaacacaggtttggtggaagatttggacaggacaggacctctttcaatgacaacgcagcagagtaattctcagagcttctctacatcacatgaaggcttggaagaagataaagaccatccaacaacttctactctgacatcaagcaataggaatgatgtcacaggtggaagaagagacccaaatcattctgaaggctcaactactttactggaaggttatacctctcattacccacacacgaaggaaagcaggaccttcatcccagtgacctcagctaagactgggtcctttggagttactgcagttactgttggagattccaactctaatgtcaatcgttccttatcaggagaccaagacacattccaccccagtggggggtcccataccactcatggatctgaatcagatggacactcacatgggagtcaagaaggtggagcaaacacaacctctggtcctataaggacaccccaaattccagaatggctgatcatcttggcatccctcttggccttggctttgattcttgcagtttgcattgcagtcaacagtcgaagaaggtgtgggcagaagaaaaagctagtgatcaacagtggcaatggagctgtggaggacagaaagccaagtggactcaacggagaggccagcaagtctcaggaaatggtgcatttggtgaacaaggagtcgtcagaaactccagaccagtttatgacagctgatgagacaaggaacctgcagaatgtggacatgaagattggggtgtaacacctacaccattatcttggaaagaaacaaccgttggaaacataaccattacagggagctgggacacttaacagatgcaatgtgctactgattgtttcattgcgaatcttttttagcataaaattttctactctttttgttttttgtgttttgttctttaaagtcaggtccaatttgtaaaaacagcattgctttctgaaattagggcccaattaataatcagcaagaatttgatcgttccagttcccacttggaggcctttcatccctcgggtgtgctatggatggcttctaacaaaaactacacatatgtattcctgatcgccaacctttcccccaccagctaaggacatttcccagggttaatagggcctggtccctgggaggaaatttgaatgggtccattttgcccttccatagcctaatccctgggcattgctttccactgaggttgggggttggggtgtactagttacacatcttcaacagaccccctctagaaatttttcagatgcttctgggagacacccaaagggtgaagctatttatctgtagtaaactatttatctgtgtttttgaaatattaaaccctggatcagtcctttgatcagtataattttttaaagttactttgtcagaggcacaaaagggtttaaactgattcataataaatatctgtacttcttcgatcttca

SEQ ID NO: 13677 - DNA, 2229 bp, Artificial Sequence
  derived and/or modified sequence
atggacaagttctggtggcacgccgcctggggcctgtgcctggtgcccctgagcctggcccagatcgacctgaacatcacctgcagattcgccggcgtgttccacgtggagaagaacggcagatacagcatcagcagaaccgaggccgccgacctgtgcaaggccttcaacagcaccctgcccaccatggcccagatggagaaggccctgagcatcggcttcgagacctgcagatacggcttcatcgagggccacgtggtgatccccagaatccaccccaacagcatctgcgccgccaacaacaccggcgtgtacatcctgaccagcaacaccagccagtacgacacctactgcttcaacgccagcgccccccccgaggaggactgcaccagcgtgaccgacctgcccaacgccttcgacggccccatcaccatcaccatcgtgaacagagacggcaccagatacgtgcagaagggcgagtacagaaccaaccccgaggacatctaccccagcaaccccaccgacgacgacgtgagcagcggcagcagcagcgagagaagcagcaccagcggcggctacatcttctacaccttcagcaccgtgcaccccatccccgacgaggacagcccctggatcaccgacagcaccgacagaatccccgccaccaccctgatgagcaccagcgccaccgccaccgagaccgccaccaagagacaggagacctgggactggttcagctggctgttcctgcccagcgagagcaagaaccacctgcacaccaccacccagatggccggcaccagcagcaacaccatcagcgccggctgggagcccaacgaggagaacgaggacgagagagacagacacctgagcttcagcggcagcggcatcgacgacgacgaggacttcatcagcagcaccatcagcaccacccccagagccttcgaccacaccaagcagaaccaggactggacccagtggaaccccagccacagcaaccccgaggtgctgctgcagaccaccaccagaatgaccgacgtggacagaaacggcaccaccgcctacgagggcaactggaaccccgaggcccacccccccctgatccaccacgagcaccacgaggaggaggagaccccccacagcaccagcaccatccaggccacccccagcagcaccaccgaggagaccgccacccagaaggagcagtggttcggcaacagatggcacgagggctacagacagacccccaaggaggacagccacagcaccaccggcaccgccgccgccagcgcccacaccagccaccccatgcagggcagaaccacccccagccccgaggacagcagctggaccgacttcttcaaccccatcagccaccccatgggcagaggccaccaggccggcagaagaatggacatggacagcagccacagcatcaccctgcagcccaccgccaaccccaacaccggcctggtggaggacctggacagaaccggccccctgagcatgaccacccagcagagcaacagccagagcttcagcaccagccacgagggcctggaggaggacaaggaccaccccaccaccagcaccctgaccagcagcaacagaaacgacgtgaccggcggcagaagagaccccaaccacagcgagggcagcaccaccctgctggagggctacaccagccactacccccacaccaaggagagcagaaccttcatccccgtgaccagcgccaagaccggcagcttcggcgtgaccgccgtgaccgtgggcgacagcaacagcaacgtgaacagaagcctgagcggcgaccaggacaccttccaccccagcggcggcagccacaccacccacggcagcgagagcgacggccacagccacggcagccaggagggcggcgccaacaccaccagcggccccatcagaaccccccagatccccgagtggctgatcatcctggccagcctgctggccctggccctgatcctggccgtgtgcatcgccgtgaacagcagaagaagatgcggccagaagaagaagctggtgatcaacagcggcaacggcgccgtggaggacagaaagcccagcggcctgaacggcgaggccagcaagagccaggagatggtgcacctggtgaacaaggagagcagcgagacccccgaccagttcatgaccgccgacgagaccagaaacctgcagaacgtggacatgaagatcggcgtgtag

SEQ ID NO: 13678 - protein, 200 aa, Artificial Sequence
  derived and/or modified sequence
MAFTEHSPLTPHRRDLCSRSIWLARKIRSDLTALTESYVKHQGLNKNINLDSADGMPVASTDQWSELTEAERLQENLQAYRTFHVLLARLLEDQQVHFTPTEGDFHQAIHTLLLQVAAFAYQIEELMILLEYKIPRNEADGMPINVGDGGLFEKKLWGLKVLQELSQWTVRSIHDLRFISSHQTGIPARGSHYIANNKKM

SEQ ID NO: 13679 - DNA, 603 bp, Artificial Sequence
  derived and/or modified sequence
atggccttcaccgagcacagccccctgaccccccacagaagagacctgtgcagcagaagcatctggctggccagaaagatcagaagcgacctgaccgccctgaccgagagctacgtgaagcaccagggcctgaacaagaacatcaacctggacagcgccgacggcatgcccgtggccagcaccgaccagtggagcgagctgaccgaggccgagagactgcaggagaacctgcaggcctacagaaccttccacgtgctgctggccagactgctggaggaccagcaggtgcacttcacccccaccgagggcgacttccaccaggccatccacaccctgctgctgcaggtggccgccttcgcctaccagatcgaggagctgatgatcctgctggagtacaagatccccagaaacgaggccgacggcatgcccatcaacgtgggcgacggcggcctgttcgagaagaagctgtggggcctgaaggtgctgcaggagctgagccagtggaccgtgagaagcatccacgacctgagattcatcagcagccaccagaccggcatccccgccagaggcagccactacatcgccaacaacaagaagatgtag

SEQ ID NO: 13680 - DNA, 749 bp, Artificial Sequence
  derived and/or modified sequence
gggaaataagagagaaaagaagagtaagaagaaatataagagccaccatggctttcacagagcattcccctttgacgccgcatcggagggatctgtgctcccgctcaatctggttggcccggaagattaggagcgacctgaccgcgctgacagagtcgtatgtcaaacaccagggccttaacaagaatatcaatcttgactcagccgatggtatgccagtcgcttcgacggatcagtggtcggagctcacagaggcagaacgactgcaagagaacctccaagcgtatcgaacttttcacgtacttcttgcgagattgttggaggaccagcaagtgcatttcactcccaccgaaggggacttccaccaggcaattcacacgctcctccttcaagtggcggcgtttgcgtaccagatcgaggagctgatgatcctcctcgaatacaaaattccccggaacgaagccgacggtatgccgatcaatgtgggagatggaggattgtttgaaaagaaactctggggattgaaggtactgcaagaactttcccagtggacggtcagatcaattcacgatttgaggttcatctcgagccatcagaccgggatccccgcacgcgggtcgcactacatcgccaacaataagaaaatgtgataataggctgccttctgcggggcttgccttctggccatgcccttcttctctcccttgcacctgtacctcttggtctttgaataaagcctgagtaggaag

SEQ ID NO: 13681 - DNA, 603 bp, Artificial Sequence
  derived and/or modified sequence
atggccttcaccgaacactctccacttacgcctcatcgccgtgacctctgttcacgttcgatatggctggcaaggaaaataagatccgacttaacggccctgacggaaagctatgtaaagcaccagggacttaacaaaaacattaatctggactccgccgatggcatgcccgtcgcctcgaccgatcagtggagtgagctcactgaagcagaaaggttgcaagagaatttgcaagcgtacagaacattccacgtgctgttggctcgcttgttggaggaccagcaggtgcactttacaccaacagagggggactttcaccaggccatccacactctcttgcttcaggtggccgcttttgcttatcagatcgaggaattgatgatcttgctagagtacaagattcctcggaacgaagctgacggcatgcccattaacgtgggcgatgggggactttttgaaaagaaactgtggggactcaaagtgttacaggagctgagccagtggacagttcggtccatccacgatctgcggttcatatcatcacatcaaaccggcattcccgcccggggcagccattatattgctaataacaagaaaatgtag

SEQ ID NO: 13682 - DNA, 1886 bp, Artificial Sequence
  derived and/or modified sequence
agagtcacatctcttatttggaccagtatagacagaagtaaacccagctgacttgtttcctgggacagttgagttaagggatggctttcacagagcattcaccgctgacccctcaccgtcgggacctctgtagccgctctatctggctagcaaggaagattcgttcagacctgactgctcttacggaatcctatgtgaagcatcagggcctgaacaagaacatcaacctggactctgcggatgggatgccagtggcaagcactgatcagtggagtgagctgaccgaggcagagcgactccaagagaaccttcaagcttatcgtaccttccatgttttgttggccaggctcttagaagaccagcaggtgcattttaccccaaccgaaggtgacttccatcaagctatacatacccttcttctccaagtcgctgcctttgcataccagatagaggagttaatgatactcctggaatacaagatcccccgcaatgaggctgatgggatgcctattaatgttggagatggtggtctctttgagaagaagctgtggggcctaaaggtgctgcaggagctttcacagtggacagtaaggtccatccatgaccttcgtttcatttcttctcatcagactgggatcccagcacgtgggagccattatattgctaacaacaagaaaatgtagcagttagtcccttctctcttccttgctttctcttctaatggaatatgcgtagttccctggggcctcgctttcccatcttaaatttctaaaaacagttaagacaacaggcattttctttcttttttctctgaccacctgcagcctgttgaaggactacaggtattttcatcaagtagcgttggagacatacacaaatgggcatacaagtttagcctggggggtgtgatttgtgtgcgtgcttgcatgtgctgcaggtgtaagagagtgggagcagggacaacgtccttccacttcagggttctaacctttctaacccactaagtaacctctacaggcatttaactgccttacagacagaatatacatatgttaattctagtcctggatgactcggtctgagaagattcaatttaaaatcagactctttagttgatttaaactcttagagaataagaataataatggctaacttttattatcttctatattaaggcagtatgccaagggtctttatgtatattatgtacagcgtttacaaccttgtgagcaaggtggtgttactcccattaggtagatgagaaaacaggctcacagagatttggttaagctcacacagctaacaagtagcacactgagtttgaacacagatcattctccttgtaaaagcctatgtgcctttcactttagaggcttgatcatgaatcactgcacctctttgtcacagggtgttggaagatgcatccatgtaatctattcccatcgctggaaaacagctgctgttagatgtcctcagaagtcagttgcaaattttagcgttaaagtcaggatttattgttcatacttggcggtgaggagggcagctggagatcttaagattccattttggaaaatgattaggcccgccaaacttctgaactttggaagctggggatgtttagtaatacagcctggtttttaagtactcactaaaagttctcaaatattgggttgggcacggcttataccaggttacctcacttttaattagtgatgcaggcagtgtaacccaagcatttgtggacaatgagtggaatactaaagttaaaaagtcaaactttcacctcagattttctggacttagtcatgaggagagggtgaggcccactctgttcctactggagataccagagactctgaaactatagaataaagcctctgtgctgc

SEQ ID NO: 13683 - DNA, 603 bp, Artificial Sequence
  derived and/or modified sequence
atggccttcacagagcacagccccctgaccccccacagaagagacctgtgcagccgcagcatctggctggccaggaagatccgcagtgacctgacagccctgacagagagctatgtgaagcaccagggcctgaacaagaacatcaacctggacagcgcagatggcatgcctgtggccagcacagaccagtggagcgagctgacagaggccgagcggctgcaggagaacctgcaggcctaccgcaccttccacgtgctgctggcccggctgctggaggaccagcaggtgcacttcacccccacagaaggagacttccaccaggccatccacaccctgctgctgcaggtggccgcctttgcctaccagatcgaggagctgatgatcctgctggagtacaagatccccagaaatgaagcagatggcatgcccatcaacgtgggagatggcggcctgtttgagaagaagctgtggggcctgaaggtgctgcaggagctgagccagtggacagtgcgcagcatccatgacctgcgcttcatcagcagccaccagacaggcatcccagcccggggcagccactacatcgccaacaacaagaagatgtag

SEQ ID NO: 13684 - DNA, 603 bp, Artificial Sequence
  derived and/or modified sequence
atggccttcaccgagcacagccccctgaccccccaccggcgggacctctgttcccggagcatttggctggccagaaagatacgttccgatttgacagcccttaccgagagctacgtgaaacaccaagggcttaataaaaacatcaatttagactccgctgatggcatgcctgttgcctccacggaccagtggagtgagttaaccgaggctgagcggcttcaggagaacctgcaggcgtacaggacgtttcacgtgctgttggctaggctcctggaggatcaacaagtgcatttcactcccactgagggcgattttcaccaggctatccacacactcctgctccaagtcgctgctttcgcttaccagatcgaagaactgatgatcctcctggagtataagatcccaagaaacgaagctgacggaatgccaattaacgtcggggatggaggcttatttgagaaaaaactgtgggggctgaaggtcctccaggaactcagccagtggacagtgaggagcatccacgacctgagattcatctcatcccatcaaaccggaatacccgccagagggtcacactacatcgctaataataaaaagatgtag

SEQ ID NO: 13685 - DNA, 603 bp, Artificial Sequence
  derived and/or modified sequence
atggctttcactgagcattcaccacttaccccacaccgacgagacctgtgttctagaagtatctggctagcaaggaagataagaagtgatctcacggccctgaccgaatcttacgttaagcatcagggcctgaacaagaatatcaatttggactctgcagacggcatgcctgtggcatctacggaccagtggtcagagctgacagaagccgagcggctccaggaaaacctccaagcgtacagaacgtttcacgttttgctggcacgactgttggaggatcagcaggttcatttcaccccaacagagggagatttccaccaggcaattcatactctcctgctgcaggtggcggcttttgcttaccagattgaggaacttatgatccttctcgaatacaaaatacccaggaacgaagcagatggaatgccgattaatgtaggcgatggaggacttttcgagaagaaactgtgggggctcaaggtgctccaggagctgagccagtggactgtgcgttccatccatgatctgcgtttcatctccagtcaccagaccgggatccccgctcgcggttcacactacattgccaacaacaaaaagatgtag

SEQ ID NO: 13686 - RNA, 749 nt, Artificial Sequence
  derived and/or modified sequence
gggaaauaagagagaaaagaagaguaagaagaaauauaagagccaccauggcuuucacagagcauuccccuuugacgccgcaucggagggaucugugcucccgcucaaucugguuggcccggaagauuaggagcgaccugaccgcgcugacagagucguaugucaaacaccagggccuuaacaagaauaucaaucuugacucagccgaugguaugccagucgcuucgacggaucaguggucggagcucacagaggcagaacgacugcaagagaaccuccaagcguaucgaacuuuucacguacuucuugcgagauuguuggaggaccagcaagugcauuucacucccaccgaaggggacuuccaccaggcaauucacacgcuccuccuucaaguggcggcguuugcguaccagaucgaggagcugaugauccuccucgaauacaaaauuccccggaacgaagccgacgguaugccgaucaaugugggagauggaggauuguuugaaaagaaacucuggggauugaagguacugcaagaacuuucccaguggacggucagaucaauucacgauuugagguucaucucgagccaucagaccgggauccccgcacgcgggucgcacuacaucgccaacaauaagaaaaugugauaauaggcugccuucugcggggcuugccuucuggccaugcccuucuucucucccuugcaccuguaccucuuggucuuugaauaaagccugaguaggaag

SEQ ID NO: 13687 - protein, 313 aa, Artificial Sequence
  derived and/or modified sequence
MEGIVTIVGLKPETTYAVRLAALNGKGLGEISAASEFKTQPVHSPPPPASASSSTPVPLSPPDTGEPSAPKLEGQMGEDGNSIKVNLIKQDDGGSPIRHYLVRYRALSSEWKPEIRLPSGSDHVMLKSLDWNAEYEVYVVAENQQGKSKAAHFVFRTSAQPTAIPANGSPTSGLSTGAIVGILIVIFVLLLVVVDITCYFLNKCGLFMCIAVNLCGKAGPGAKGKDMEEGKAAFSKDESKEPIVEVRTEEERTPNHDGGKHTEPNETTPLTEPEKGPVEAKPECQETETKPAPAEVKTVPNDATQTKENESKA

SEQ ID NO: 13688 - DNA, 942 bp, Artificial Sequence
  derived and/or modified sequence
atggagggcatcgtgaccatcgtgggcctgaagcccgagaccacctacgccgtgagactggccgccctgaacggcaagggcctgggcgagatcagcgccgccagcgagttcaagacccagcccgtgcacagcccccccccccccgccagcgccagcagcagcacccccgtgcccctgagcccccccgacaccggcgagcccagcgcccccaagctggagggccagatgggcgaggacggcaacagcatcaaggtgaacctgatcaagcaggacgacggcggcagccccatcagacactacctggtgagatacagagccctgagcagcgagtggaagcccgagatcagactgcccagcggcagcgaccacgtgatgctgaagagcctggactggaacgccgagtacgaggtgtacgtggtggccgagaaccagcagggcaagagcaaggccgcccacttcgtgttcagaaccagcgcccagcccaccgccatccccgccaacggcagccccaccagcggcctgagcaccggcgccatcgtgggcatcctgatcgtgatcttcgtgctgctgctggtggtggtggacatcacctgctacttcctgaacaagtgcggcctgttcatgtgcatcgccgtgaacctgtgcggcaaggccggccccggcgccaagggcaaggacatggaggagggcaaggccgccttcagcaaggacgagagcaaggagcccatcgtggaggtgagaaccgaggaggagagaacccccaaccacgacggcggcaagcacaccgagcccaacgagaccacccccctgaccgagcccgagaagggccccgtggaggccaagcccgagtgccaggagaccgagaccaagcccgcccccgccgaggtgaagaccgtgcccaacgacgccacccagaccaaggagaacgagagcaaggcctag

SEQ ID NO: 13689 - DNA, 942 bp, Artificial Sequence
  derived and/or modified sequence
atggaaggcattgtcacaatagttgggctcaaaccagagaccacctacgccgtgagactggccgcactgaatggcaaaggcttaggtgaaatttccgctgcgtcagagttcaagactcaaccggtacacagtccgcccccccctgcatcagcctcttcgtccacgcctgtccccctttctcctcctgatacgggtgagccttccgcacctaagctggagggacagatgggagaagatgggaactccatcaaggtgaacctgattaagcaggatgacggcggtagtcctataagacactatttggtgaggtatagagcattatcaagtgaatggaaaccagaaataaggctgccctcgggctccgatcacgtcatgctgaaatcactcgattggaacgccgaatacgaggtttatgtcgttgcggaaaaccagcagggcaagtccaaagcagcccacttcgtgttcagaactagcgcccagcccacagccattccagccaatgggagtccgacatcgggcctgagcacgggagccattgtggggatactcattgtcatctttgtcctcctgttggtcgtcgtcgatataacctgttacttcctcaacaagtgtggactgttcatgtgcattgccgtgaacctatgcggcaaggccggcccaggtgctaaagggaaagacatggaagagggtaaggctgccttctccaaggacgaaagcaaggaacctattgttgaggtaagaaccgaagaagagaggacccctaaccacgacggtgggaaacacaccgaacccaacgaaactacccccttaactgaaccggagaaaggaccagttgaggccaaaccagaatgtcaggagactgaaaccaaaccagcccctgctgaagtgaaaaccgttccaaatgacgcgacgcaaactaaagagaatgaaagcaaggcatag

SEQ ID NO: 13690 - DNA, 942 bp, Artificial Sequence
  derived and/or modified sequence
atggagggcatcgtgaccatcgtgggcctgaagccagagaccacctatgctgtgcggctggccgccctgaatggcaagggcctgggggagatctctgctgccagcgagttcaagacccagcctgtgcacagccccccacctccagccagcgccagcagcagcacccctgtgcccctgagccccccagacaccggggagcccagcgcccccaagctggagggccagatgggagaagatggcaacagcatcaaggtgaacctgatcaagcaggatgatggcggcagccccatccgccactacctggtgcgctaccgggccctgagcagcgagtggaagccagagatccggctgcccagcggcagtgaccacgtgatgctgaagagcctggactggaatgcagaatatgaggtgtatgtggtggccgagaaccagcagggcaagagcaaggccgcccactttgtgttccgcaccagcgcccagcccacagccatcccagccaacggcagccccaccagcggcctgagcactggagccatcgtgggcatcctgattgtcatctttgtgctgctgctggtggtggtggacatcacctgctacttcctgaacaagtgtggcctcttcatgtgcatcgctgtgaacctgtgtgggaaggccggccctggggccaagggcaaggacatggaggagggcaaggccgccttcagcaaggatgagagcaaggagcccatcgtggaggtgaggacagaggaggagaggacccccaaccatgatggcggcaagcacacagagcccaatgagaccacccccctgacagagcctgagaagggccctgtggaggccaagccagagtgccaggagacagagaccaagccagccccagctgaggtgaagacagtgcccaatgatgccacccagaccaaggaaaatgaaagcaaggcctag

SEQ ID NO: 13691 - DNA, 942 bp, Artificial Sequence
  derived and/or modified sequence
atggagggcatcgtgaccatcgtgggcctgaagcccgagaccacctatgcggttcgcctagccgcactcaatggaaaaggacttggagaaatcagtgcagcgtctgagtttaaaacccagccagtgcacagtccgccccctccagcatcagcttcctctagtactcccgtgccactctccccacccgatacaggagagccgtctgcccctaaacttgaaggccagatgggtgaagacggcaattcgattaaagttaaccttatcaagcaagacgacggaggatcccctattagacattacctggtgcgttaccgagctctctcctccgagtggaagccagagatccggctgccgagcgggtctgatcatgttatgctcaagagcctcgattggaatgccgaatatgaggtgtacgtggtcgccgagaatcaacagggcaaatctaaggccgcacacttcgtgtttcggacatccgcacagccgactgcgattcccgccaatggatcaccaacaagtggtttgtccacgggcgcaattgttgggatactgatcgtgatctttgtgctgttactagtggttgtcgacattacctgttatttcttgaataaatgtggcttatttatgtgtattgccgtgaatctttgcggcaaagcaggaccgggggccaagggaaaagatatggaagagggcaaagccgccttttccaaggacgaaagcaaggagccaatcgtagaggtccggacagaagaagagcgcacacccaaccacgatggcggaaagcacacagaacctaatgagacaacacccttaaccgagcctgaaaagggtcccgtggaagctaagcccgaatgtcaggagaccgagactaagcctgcccctgctgaggtcaaaactgtccctaatgacgccacccagactaaagagaacgaatctaaggcctag

SEQ ID NO: 13692 - DNA, 1182 bp, Artificial Sequence
  derived and/or modified sequence
cagacaccccctcttcaccatccatcgaccaggtggagccatactccagcacagcccaggtgcagtttgatgaaccagaggccacaggtggggtgcccatcctcaaatacaaagctgagtggagagcagttggtgaagaagtatggcattccaagtggtatgatgccaaggaagccagcatggagggcatcgtcaccatcgtgggcctgaagcccgaaacaacgtacgccgtaaggctggcggcgctcaatggcaaagggctgggtgagatcagcgcggcctccgagttcaagacgcagccagtccatagccctcctccaccggcatctgctagctcgtctacccctgttccattgtctccaccagatacaggggaacccagtgcacctaagctcgaagggcagatgggagaggatggaaactctattaaagtgaacctgatcaagcaggatgacggcggctcccccatcagacactatctggtcaggtaccgagcgctctcctccgagtggaaaccagagatcaggctcccgtctggcagtgaccacgtcatgctgaagtccctggactggaatgctgagtatgaggtctacgtggtggctgagaaccagcaaggaaaatccaaggcggctcattttgtgttcaggacctcggcccagcccacagccatcccagccaacggcagccccacctcaggcctgagcaccggggccatcgtgggcatcctcatcgtcatcttcgtcctgctcctggtggttgtggacatcacctgctacttcctgaacaagtgtggcctgttcatgtgcattgcggtcaacctgtgtggaaaagccgggcccggggccaagggcaaggacatggaggagggcaaggccgccttctcgaaagatgagtccaaggagcccatcgtggaggttcgaacggaggaggagaggaccccaaaccatgatggagggaaacacacagagcccaacgagaccacgccactgacggagcccgagaagggccccgtagaagcaaagccagagtgccaggagacagaaacgaagccagcgccagccgaagtcaagacggtccccaatgacgccacacagacaaaggagaacgagagcaaagcatgatgggtgaagagaaccgagcaaagatcaaaataaaaagtgacacagcagcttcaccagagca

SEQ ID NO: 13693 - DNA, 942 bp, Artificial Sequence
  derived and/or modified sequence
atggagggtatcgtgaccatcgttggacttaagccagaaaccacctacgctgtccgtctggcagcactaaacggaaagggcctcggcgaaatcagcgccgcatcagagtttaaaacccaaccagtgcatagccctccacccccagcttctgcctcctcctcaaccccagtgccgctgtctcctccggacaccggggaaccaagcgctccaaaactggagggacagatgggtgaagacggcaactctattaaggtcaaccttattaaacaggatgacggaggttcccctatccgccattacctggtgcggtatcgtgcccttagtagcgaatggaagccagagattcggctgcctagtggctccgatcacgtgatgctgaaaagcctggactggaacgccgaatatgaagtatacgtggtggctgaaaaccagcaaggcaagtcgaaggcagctcattttgtcttccgcacatctgcccagcccaccgcaattcccgctaacggtagtccaacaagtgggctgtctaccggagccatcgtcggcattctgatcgtgatctttgtgctgctgctggtcgtcgtggatatcacatgttattttctcaacaaatgtggtctatttatgtgcatcgctgtcaatttatgtgggaaagctggccctggcgctaaaggcaaagacatggaggaaggtaaggcagcattctcaaaggacgagtcgaaagaacccatcgtcgaagtgcggacagaggaggagcgcaccccgaatcacgacggtggcaagcacacggagccaaacgagaccactccactgacagaaccggaaaaaggtcctgtcgaggccaagcccgaatgtcaagagaccgaaaccaagcccgctcctgccgaggtgaagaccgttccaaatgatgcaactcagaccaaggagaacgaatctaaagcgtag

SEQ ID NO: 13694 - protein, 458 aa, Artificial Sequence
  derived and/or modified sequence
MNRGVPFRHLLLVLQLALLPAATQGKKVVLGKKGDTVELTCTASQKKSIQFHWKNSNQIKILGNQGSFLTKGPSKLNDRADSRRSLWDQGNFPLIIKNLKIEDSDTYICEVEDQKEEVQLLVFGLTANSDTHLLQGQSLTLTLESPPGSSPSVQCRSPRGKNIQGGKTLSVSQLELQDSGTWTCTVLQNQKKVEFKIDIVVLAFQKASSIVYKKEGEQVEFSFPLAFTVEKLTGSGELWWQAERASSSKSWITFDLKNKEVSVKRVTQDPKLQMGKKLPLHLTLPQALPQYAGSGNLTLALEAKTGKLHQEVNLVVMRATQLQKNLTCEVWGPTSPKLMLSLKLENKEAKVSKREKAVWVLNPEAGMWQCLLSDSGQVLLESNIKVLPTWSTPVQPMALIVLGGVAGLLLFIGLGIFFCVRCRHRRRQAERMSQIKRLLSEKKTCQCPHRFQKTCSPI

SEQ ID NO: 13695 - DNA, 1377 bp, Artificial Sequence
  derived and/or modified sequence
atgaatcgaggagtccccttcaggcatctgctgctagtcttacagctcgctttgctaccagcggccactcaggggaagaaggtggttctgggcaaaaaaggcgacaccgttgaactaacgtgcaccgcatcacagaagaagtcaatacagtttcactggaagaatagcaaccagatcaagatccttggaaaccaagggtcttttttgacaaaagggccatccaagctaaatgatcgggcagactcccgcagaagcctgtgggatcagggaaactttccactgatcattaagaatctgaaaattgaggatagcgatacctacatttgcgaggttgaagatcagaaggaggaggttcaattgctcgtttttgggctaaccgcgaactctgatactcatctcctgcagggacagtctctcacgctgacgctcgaatccccaccaggctcttctcctagcgtacagtgcaggtcgccccgtggaaagaatatccaggggggcaagactctcagtgtgtctcagttggaattgcaggattccggaacatggacatgtacagttttacagaaccagaaaaaagtggagtttaagatagacattgtggttctggcgttccagaaagccagttccatcgtctacaagaaagaaggcgaacaggtggagttctccttcccactcgcttttaccgtcgaaaagctgactggctctggcgaactctggtggcaggctgagagagcatcttctagtaaatcgtggattacatttgacctgaagaacaaggaagtctctgtgaaaagggtcacccaggatcctaagcttcagatgggtaagaagctccctctccacttaaccctgccacaagcgctcccccagtatgcgggatcaggcaatttgaccctggccctcgaagcgaaaaccgggaagctccaccaagaggtgaacctggtggtgatgcgcgccactcaactccagaagaaccttacttgtgaagtctggggccctacgtctcccaagttgatgctctcactgaagttagaaaataaggaagctaaagtgagcaaacgggagaaagcagtctgggtgttaaacccggaggccggcatgtggcagtgcttgctctctgacagcgggcaagtgctgctggagagcaatatcaaggtactgcctacatggtctactccagtccagccgatggcccttattgtcttagggggagtggctggcctcctgctgtttataggcctgggtatttttttttgtgtgcgttgccgtcataggagaagacaggccgagcgcatgtcacagatcaagaggctgttgtctgagaagaaaacatgccagtgtccgcatcggttccagaagacttgctctccaatttag

SEQ ID NO: 13696 - DNA, 1377 bp, Artificial Sequence
  derived and/or modified sequence
atgaacagaggagtgcccttccgccacctgctgctggtgctgcagctggccctgctgcctgctgccacccagggcaagaaggtggtgctgggcaagaagggggacacagtggagctgacctgcacagccagccagaagaagagcatccagttccactggaagaacagcaaccagatcaagatcctgggcaaccagggcagcttcctgaccaagggccccagcaagctgaatgacagagctgacagcagaagaagcctgtgggaccagggcaacttccccctcatcatcaagaacctgaagattgaggacagcgacacctacatctgtgaggtggaggaccagaaggaggaggtgcagctgctggtgtttggcctgacagccaacagcgacacccacctgctgcagggccagagcctgaccctgaccctggagagccccccaggcagcagccccagcgtgcagtgccgcagcccccggggcaagaacatccagggcggcaagaccctgtctgtgtcccagctggagctgcaggacagcggcacctggacctgcaccgtgctgcagaaccagaagaaggtggagttcaagattgatattgtggtgctggccttccagaaggccagcagcatcgtgtacaagaaggagggggagcaggtggagttctccttccccctggccttcaccgtggagaagctgactggaagtggagagctgtggtggcaggccgagcgggccagcagcagcaagtcctggatcacctttgacctgaagaacaaggaggtgtctgtgaagagggtgacccaggaccccaagctgcagatgggcaagaagctgcccctgcacctgaccctgccccaggccctgccccagtatgccggcagcggcaacctgaccctggccctggaggccaagacaggcaagctgcaccaggaggtgaacctggtggtgatgagggccacccagctgcagaagaacctgacctgtgaggtgtggggccccaccagccccaagctgatgctgagcctgaagctggagaacaaggaggccaaggtgtccaagcgggagaaggctgtgtgggtgctgaaccctgaggccggcatgtggcagtgcctgctgagtgacagcggccaggtgctgctggagagcaacatcaaggtgctgcccacctggagcacccctgtgcagcccatggccctgattgtgctgggcggcgtggccggcctgctgctcttcatcggcctgggcatcttcttctgtgtgcgctgccgccacagaagacggcaggccgagaggatgagccagatcaagaggctgctgtctgagaagaagacctgccagtgcccccaccgcttccagaagacctgcagccccatctag

SEQ ID NO: 13697 - DNA, 1377 bp, Artificial Sequence
  derived and/or modified sequence
atgaaccggggcgtgcccttccggcacctgctgctggtgctgcagttggccctgctgcctgcggcaactcagggaaagaaggtcgttctcggcaagaagggcgacacggtggagctgacctgcacggcttcacagaaaaagtcaatccagtttcactggaaaaattctaaccagattaagattctcggcaaccagggctcctttttaactaaggggccctcaaagttaaacgacagggctgacagtaggcgctccttgtgggaccaagggaacttccctctcattatcaagaacttgaagatcgaagatagcgatacatacatttgtgaagtcgaggaccagaaggaagaggttcaattgcttgtgtttggactgactgccaattctgacacacatctcctccagggtcagagtctgactctaacccttgagtctcctcccggaagcagcccctctgttcagtgccggtcgccccgcggaaagaacatacaagggggcaagaccctcagcgtcagccagctggagctgcaggactctgggacatggacctgtaccgtgctccagaaccagaaaaaagtggaattcaagattgatatcgtcgttcttgcttttcagaaggcctccagcatagtttacaaaaaagagggagagcaggtggagtttagtttccctctggctttcacagtagagaagttaaccggcagcggcgaattgtggtggcaggccgaacgtgctagctccagcaaaagctggatcacctttgatttgaagaacaaggaggtgagcgtgaagagggtcactcaagatcctaagcttcagatgggaaagaaactgccgctgcacctaaccctgccccaggcactgccccaatatgcaggttccggaaacctgaccttagcgttagaggccaagactggcaagctgcaccaggaggtcaaccttgtcgtcatgcgggcaactcagctccagaaaaatctgacttgcgaggtgtggggaccaacgagcccaaaactgatgctctcgctcaaactggagaataaagaggcaaaggtgtctaagcgggaaaaagctgtctgggttctgaatcctgaggctggtatgtggcagtgcctattgtcagactctggccaggttctgctggaaagcaatatcaaggtattgcccacttggtccacccccgtgcagccaatggccttgatcgtactgggaggtgttgcaggactgttactattcatcgggctagggattttcttctgtgtacgctgtcggcaccgccgaagacaggccgaacgcatgagccagattaagcggctgcttagcgagaaaaagacctgtcagtgcccgcacaggttccagaagacgtgtagtccgatctag

SEQ ID NO: 13698 - DNA, 1377 bp, Artificial Sequence
  derived and/or modified sequence
atgaatcgaggggtgcctttcaggcacctgctcctggttctgcaattggccctcttgcccgctgctacccaggggaagaaggtcgtgctcgggaagaagggggacaccgtagagcttacctgtacagctagccaaaagaagtctattcagttccattggaaaaattcaaatcagatcaaaatactcgggaaccagggcagtttccttaccaagggaccatcaaagcttaacgaccgcgctgatagccgccgatccctatgggaccaaggcaattttcctttgatcattaaaaaccttaagatcgaggacagcgacacttacatctgcgaagtggaggatcagaaggaagaagtgcagctgctggtctttgggctgaccgctaactctgacacacacctgctccagggacaatcattaacgctgaccctggagtcacctcctggctcctctcccagtgttcagtgtcgctccccgagaggtaagaacattcaggggggaaagaccttatctgtttcccagttagagttgcaggatagcggcacctggacctgcaccgtgctgcagaaccagaaaaaggtagaatttaaaatcgatatcgtggtgctcgctttccaaaaagcttcatcaatcgtgtataagaaggaaggggaacaagtggagttctccttcccactggccttcaccgttgagaagctgactggaagcggagagttgtggtggcaggcagaaagagcatcctcaagtaagtcctggatcaccttcgacttgaagaataaagaggtgtctgttaagcgtgtcacccaagaccctaagctgcagatgggtaaaaagcttcccctgcatctcacccttccacaagcgctcccacagtacgcgggatccggtaacctgactctagccctggaagcgaagacaggaaagctgcatcaagaagttaatctggtggttatgcgggctacgcagctgcagaaaaacctcacctgcgaagtttggggtccaaccagtcccaaacttatgctcagcctcaaactggagaacaaggaggctaaggtttcaaagagggagaaggctgtctgggtgcttaatcctgaggctggcatgtggcagtgcctgttgagcgatagcggccaggtgctgcttgaatccaacataaaggtccttcctacatggtcaactccagtgcagcctatggctctgattgtgctcgggggtgtagccggattgctccttttcatcggcttgggcatatttttttgcgtaagatgtaggcaccgcagaaggcaggctgagcgcatgagccagatcaaacgccttctgtcggagaaaaagacctgccagtgtccccatagattccagaaaacatgttctccaatatag

SEQ ID NO: 13699 - DNA, 1377 bp, Artificial Sequence
  derived and/or modified sequence
atgaaccgaggcgtgccctttcgccaccttttgctagttctgcagctggcactgctgcctgctgcgactcagggtaaaaaagtagttttgggaaagaagggagacactgttgaactcacctgcaccgctagtcagaagaagtccatccagttccactggaaaaactcaaatcaaattaaaattctcggaaatcagggcagttttctcacaaagggtccctcgaagttgaatgatagggccgatagccggagatcactctgggaccaagggaactttcccctgatcatcaagaatcttaagatagaagacagcgacacatacatctgcgaggtcgaggaccaaaaagaggaagttcaactcctggtatttggactcaccgctaactcggatacacatttactgcaggggcagtctctgaccttaaccttggaatcccctccaggcagttcgccatccgtgcaatgtcggtccccgcgaggaaagaacattcagggcggcaagacactgagcgtgagccaattggagcttcaagatagtggtacatggacctgtactgtcttgcaaaatcagaagaaggtggaatttaaaatcgacattgtagtgctagcatttcagaaagcatcgagcattgtttacaaaaaagagggggagcaagttgaatttagcttccccctcgcgtttaccgtcgaaaaattgactggatcaggagaactatggtggcaggctgaacgagccagttcaagcaagtcatggattacatttgatcttaagaataaagaagtgtcagtgaaaagagtgacacaggatccgaagctgcagatggggaagaaactgccccttcacctcactctcccccaagctctcccccagtacgcaggcagcggaaacctgacactagctctggaagcaaagaccggaaagctgcatcaggaggtcaacctggttgttatgcgggccactcaactgcagaaaaatctaacctgtgaggtctggggacccacaagccccaagctaatgttatctttgaagctggagaataaggaggcgaaggtttctaagagagagaaggctgtttgggtgctaaacccagaagccggcatgtggcaatgtctgttgtctgattctggccaggtcctgttagagtccaatatcaaggtcttacccacttggagtaccccagtgcaaccaatggctcttatcgtcctggggggggtagcaggcctacttcttttcattggcttaggcatcttcttttgtgtcagatgccgccatcggaggaggcaggcggagcgaatgagtcagataaaaagactactgagcgaaaagaagacctgtcagtgcccacaccgcttccaaaaaacatgctctcctatatag

SEQ ID NO: 13700 - DNA, 1377 bp, Artificial Sequence
  derived and/or modified sequence
atgaaccgtggagtgccctttagacacctgcttctcgttctgcagcttgccctcttgcctgccgcaacccaaggtaagaaagtcgtacttggcaagaaaggcgacacagtcgaattaacctgtacggcttcacagaaaaaatctattcaatttcactggaaaaatagtaatcagatcaaaatactagggaaccagggctctttcttaaccaagggcccctctaaactgaatgaccgagccgacagtaggagatcactgtgggatcaggggaattttcctctaatcataaagaatttgaagattgaagactcggacacctatatctgcgaggtcgaggatcagaaagaggaggtgcagctgctggtgttcggtcttaccgctaactcagatacccacttacttcaaggtcaaagcctaacgctaactctggaatcaccgcccggaagctcccctagcgtccagtgccgttctcctcgaggcaagaacatccagggggggaaaacgctaagtgtgtctcagctggaactgcaggacagcgggacgtggacttgcacagttcttcaaaatcaaaaaaaggttgagtttaagatcgatatagtcgtgctcgcatttcaaaaggcatcttcaattgtttataaaaaggaaggagaacaggtggagttcagttttccgttggcattcaccgttgaaaaactcaccgggagtggagaactgtggtggcaggccgagcgcgcgtcaagtagtaaaagttggatcacattcgacctcaaaaacaaggaagtcagcgtcaagcgagtcacccaggaccctaaactgcaaatgggtaagaagctccctctgcacctgaccctgccccaggccctcccccaatacgcaggctcaggtaatctgacacttgctttagaggcaaagacaggcaagcttcatcaggaagtcaacctcgttgtgatgagggctacccagctgcaaaaaaacctcacttgcgaggtgtgggggcccacaagcccgaaactgatgctgtcacttaaactcgaaaacaaggaagcgaaggtcagcaaacgcgaaaaagcggtatgggtgctcaatcccgaggctggaatgtggcagtgcctgcttagcgactccggacaagtgcttctggaatctaacattaaagtgctccccacttggtctacgcctgtacaacccatggccctcattgtcctaggcggtgtagccggattattgctatttattggcttgggtattttcttctgtgtgagatgtagacatagacgccgacaggcagaaagaatgtcgcagattaagagactgttgtctgagaaaaaaacgtgccagtgccctcatcggttccagaagacgtgctccccaatctag

SEQ ID NO: 13701 - DNA, 3114 bp, Artificial Sequence
  derived and/or modified sequence
gtttggggccggcccaggcctagggtgtggaggagccttgccatcgggcttcctgtctctcttcatttaagcacgactctgcagaaggaacaaagcaccctccccactgggctcctggttgcagagctccaagtcctcacacagatacgcctgtttgagaagcagcgggcaagaaagacgcaagcccagaggccctgccatttctgtgggctcaggtccctactggctcaggcccctgcctccctcggcaaggccacaatgaaccggggagtcccttttaggcacttgcttctggtgctgcaactggcgctcctcccagcagccactcagggaaagaaagtggtgctgggcaaaaaaggggatacagtggaactgacctgtacagcttcccagaagaagagcatacaattccactggaaaaactccaaccagataaagattctgggaaatcagggctccttcttaactaaaggtccatccaagctgaatgatcgcgctgactcaagaagaagcctttgggaccaaggaaactttcccctgatcatcaagaatcttaagatagaagactcagatacttacatctgtgaagtggaggaccagaaggaggaggtgcaattgctagtgttcggattgactgccaactctgacacccacctgcttcaggggcagagcctgaccctgaccttggagagcccccctggtagtagcccctcagtgcaatgtaggagtccaaggggtaaaaacatacagggggggaagaccctctccgtgtctcagctggagctccaggatagtggcacctggacatgcactgtcttgcagaaccagaagaaggtggagttcaaaatagacatcgtggtgctagctttccagaaggcctccagcatagtctataagaaagagggggaacaggtggagttctccttcccactcgcctttacagttgaaaagctgacgggcagtggcgagctgtggtggcaggcggagagggcttcctcctccaagtcttggatcacctttgacctgaagaacaaggaagtgtctgtaaaacgggttacccaggaccctaagctccagatgggcaagaagctcccgctccacctcaccctgccccaggccttgcctcagtatgctggctctggaaacctcaccctggcccttgaagcgaaaacaggaaagttgcatcaggaagtgaacctggtggtgatgagagccactcagctccagaaaaatttgacctgtgaggtgtggggacccacctcccctaagctgatgctgagtttgaaactggagaacaaggaggcaaaggtctcgaagcgggagaaggcggtgtgggtgctgaaccctgaggcggggatgtggcagtgtctgctgagtgactcgggacaggtcctgctggaatccaacatcaaggttctgcccacatggtccaccccggtgcagccaatggccctgattgtgctggggggcgtcgccggcctcctgcttttcattgggctaggcatcttcttctgtgtcaggtgccggcaccgaaggcgccaagcagagcggatgtctcagatcaagagactcctcagtgagaagaagacctgccagtgtcctcaccggtttcagaagacatgtagccccatttgaggcacgaggccaggcagatcccacttgcagcctccccaggtgtctgccccgcgtttcctgcctgcggaccagatgaatgtagcagatccccagcctctggcctcctgttcgcctcctctacaatttgccattgtttctcctgggttaggccccggcttcactggttgagtgttgctctctagtttccagaggcttaatcacaccgtcctccacgccatttccttttccttcaagcctagcccttctctcattatttctctctgaccctctccccactgctcatttggatcccaggggagtgttcagggccagccctggctggcatggagggtgaggctgggtgtctggaagcatggagcatgggactgttcttttacaagacaggaccctgggaccacagagggcaggaacttgcacaaaatcacacagccaagccagtcaaggatggatgcagatccagaggtttctggcagccagtacctcctgccccatgctgcccgcttctcaccctatgtgggtgggaccacagactcacatcctgaccttgcacaaacagcccctctggacacagccccatgtacacggcctcaagggatgtctcacatcctctgtctatttgagacttagaaaaatcctacaaggctggcagtgacagaactaagatgatcatctccagtttatagaccagaaccagagctcagagaggctagatgattgattaccaagtgccggactagcaagtgctggagtcgggactaacccaggtcccttgtcccaagttccactgctgcctcttgaatgcagggacaaatgccacacggctctcaccagtggctagtggtgggtactcaatgtgtacttttgggttcacagaagcacagcacccatgggaagggtccatctcagagaatttacgagcagggatgaaggcctccctgtctaaaatccctccttcatcccccgctggtggcagaatctgttaccagaggacaaagcctttggctcttctaatcagagcgcaagctgggagcacaggcactgcaggagagaatgcccagtgaccagtcactgaccctgtgcagaacctcctggaagcgagctttgctgggagagggggtagctagcctgagagggaaccctctaagggacctcaaaggtgattgtgccaggctctgcgcctgccccacaccctcccttaccctcctccagaccattcaggacacagggaaatcagggttacaaatcttcttgatccacttctctcaggatcccctctcttcctacccttcctcaccacttccctcagtcccaactccttttccctatttccttctcctcctgtctttaaagcctgcctcttccaggaagacccccctattgctgctggggctccccatttgcttactttgcatttgtgcccactctccacccctgctcccctgagctgaaataaaaatacaataaacttactataaagat

SEQ ID NO: 13702 - DNA, 1377 bp, Artificial Sequence
  derived and/or modified sequence
atgaacagaggcgtgcccttcagacacctgctgctggtgctgcagctggccctgctgcccgccgccacccagggcaagaaggtggtgctgggcaagaagggcgacaccgtggagctgacctgcaccgccagccagaagaagagcatccagttccactggaagaacagcaaccagatcaagatcctgggcaaccagggcagcttcctgaccaagggccccagcaagctgaacgacagagccgacagcagaagaagcctgtgggaccagggcaacttccccctgatcatcaagaacctgaagatcgaggacagcgacacctacatctgcgaggtggaggaccagaaggaggaggtgcagctgctggtgttcggcctgaccgccaacagcgacacccacctgctgcagggccagagcctgaccctgaccctggagagcccccccggcagcagccccagcgtgcagtgcagaagccccagaggcaagaacatccagggcggcaagaccctgagcgtgagccagctggagctgcaggacagcggcacctggacctgcaccgtgctgcagaaccagaagaaggtggagttcaagatcgacatcgtggtgctggccttccagaaggccagcagcatcgtgtacaagaaggagggcgagcaggtggagttcagcttccccctggccttcaccgtggagaagctgaccggcagcggcgagctgtggtggcaggccgagagagccagcagcagcaagagctggatcaccttcgacctgaagaacaaggaggtgagcgtgaagagagtgacccaggaccccaagctgcagatgggcaagaagctgcccctgcacctgaccctgccccaggccctgccccagtacgccggcagcggcaacctgaccctggccctggaggccaagaccggcaagctgcaccaggaggtgaacctggtggtgatgagagccacccagctgcagaagaacctgacctgcgaggtgtggggccccaccagccccaagctgatgctgagcctgaagctggagaacaaggaggccaaggtgagcaagagagagaaggccgtgtgggtgctgaaccccgaggccggcatgtggcagtgcctgctgagcgacagcggccaggtgctgctggagagcaacatcaaggtgctgcccacctggagcacccccgtgcagcccatggccctgatcgtgctgggcggcgtggccggcctgctgctgttcatcggcctgggcatcttcttctgcgtgagatgcagacacagaagaagacaggccgagagaatgagccagatcaagagactgctgagcgagaagaagacctgccagtgcccccacagattccagaagacctgcagccccatctag

SEQ ID NO: 13703 - DNA, 1377 bp, Artificial Sequence
  derived and/or modified sequence
atgaaccgaggcgtgccattcagacatctgctcttggttctacagctggcgctgctcccggcagctacccagggcaagaaggtcgtgctgggaaagaagggggacacggtggagctgacatgcacagcgtcgcaaaagaaatctatacagtttcattggaagaattctaatcagatcaagatactaggaaaccagggctccttcctgacaaaaggtccatcaaagctaaatgaccgtgctgattcccgcagatctctctgggatcagggcaatttccctctcattatcaagaatctgaaaatcgaagattccgatacctacatctgcgaggtagaagaccagaaagaggaggtgcagctcttagtgttcgggctgactgccaatagtgacacccaccttctccaggggcaaagtcttactctgacactagagtcgcccccaggcagtagtccaagcgttcagtgcagatcccctcggggcaaaaatatccaggggggcaaaactctctcggtgtcccagcttgagctgcaggactcaggtacctggacatgcacggtcctgcagaaccagaagaaagtggaatttaaaatagacatcgtcgtgctggctttccagaaggccagctcaatcgtctacaagaaagaaggggaacaggttgagttcagttttcccctggcctttacagtcgagaagcttaccggttctggcgaattatggtggcaagctgagagggcctcttccagcaaaagttggatcacttttgacctaaagaataaagaggtcagtgttaagcgggtgacccaggaccccaagttgcagatgggcaaaaaattgccactgcacttgacccttcctcaggctttacctcagtacgccggaagcggaaatctaacactcgcactggaagctaaaacaggaaagttacatcaggaggtgaaccttgttgtgatgcgagctacgcaattacagaagaatctgacttgcgaagtgtggggccccaccagtccaaagctgatgttatcccttaaactggagaataaagaagcaaaggtgagcaagagggagaaggcagtttgggttctcaaccccgaagccggaatgtggcagtgtctgctgtccgattccgggcaggttctgctcgaatctaatatcaaagtcctccccacctggtcaacaccagtgcagcctatggccctgatagtcctggggggggtcgctggtctgctgctcttcattggtctgggcattttcttttgcgtaaggtgccggcacaggcggcgccaggcagagagaatgagtcagatcaaaaggctcctatcggagaagaaaacttgtcaatgtccccacagattccagaagacttgttcccctatctag

SEQ ID NO: 13704 - DNA, 1377 bp, Artificial Sequence
  derived and/or modified sequence
atgaaccggggcgtgcccttccggcacctgctgctggtgctgcagctcgcgttactgccggcagcaactcaaggaaagaaggtggtgctcggaaagaaaggtgacactgtggagctgacctgcacagcctcacagaaaaaatccatccaattccattggaaaaactccaatcaaatcaaaattctcggtaaccaggggtcattcttaactaaaggccctagtaagctcaatgaccgagccgattctcgtcgatcactgtgggatcagggcaactttcccctcatcatcaagaatcttaaaatagaggactccgatacatatatctgcgaggtggaagaccagaaggaagaggtgcagctgctggttttcggcctgaccgccaactcggatacccacctccttcaaggccagagcctgaccctgacccttgaatccccccccgggagcagcccgagcgtccagtgtcggtctcctcgggggaaaaatattcagggcgggaaaacactctccgtttcacagctggagctgcaggactccggcacttggacgtgcaccgtgctgcagaatcagaaaaaggtagaatttaagattgacattgttgtcctggcattccagaaggctagtagcatcgtctataagaaagaaggggaacaagtggagttctcgttccctttggctttcaccgtagagaagctgactggtagcggggaactgtggtggcaggcagagagggcaagcagctcaaagtcatggataaccttcgacttgaagaataaggaggtgagtgtcaagcgggtgacccaagatcctaaactacagatgggaaaaaagctacctcttcatctgacattgccccaggccttgccacagtacgccggaagcgggaacttgacgctggccttggaggccaagaccgggaagctgcaccaggaggtcaaccttgtggtaatgcgggctacccagctacaaaaaaacctgacctgtgaggtgtgggggccaaccagtccaaaattgatgttgagccttaagctcgagaacaaggaggccaaagtgagtaagcgtgagaaagccgtttgggtgctgaaccctgaagctggcatgtggcagtgtttgttatccgactccggccaggtgttgctcgaatcaaacattaaggttctgcccacctggtccacaccggtacagccgatggctcttatcgtgctcgggggcgtggccggcctcctgctgttcatcggcctcggcatttttttctgcgttcgttgccgacatcggcgtaggcaggcagagaggatgagccagataaagcgcctcctgagtgagaagaaaacatgtcagtgcccacatcggttccaaaagacttgctccccaatctag

SEQ ID NO: 13705 - DNA, 1377 bp, Artificial Sequence
  derived and/or modified sequence
atgaatcgcggtgtcccattccggcacctccttctggttctgcagcttgccctcctgcccgcagctacacaggggaaaaaagtcgtgttggggaaaaagggagataccgtggagttaacctgcaccgcctcccagaaaaaaagcatccaattccattggaagaattctaaccagatcaagatccttgggaatcagggcagtttcttgactaagggcccttcgaagcttaatgatagggctgattctagaaggtccctatgggaccaaggcaacttccctcttattattaagaacctcaaaatagaggattcagacacatatatctgtgaagtagaagatcagaaggaggaggtccagttgctggtcttcggccttaccgcaaatagtgacacccacctgctgcagggccaatctctgacgttaaccctggagagtccgcctggctcttccccctccgtacagtgtcggagcccacgcggtaaaaatattcagggtggtaaaacattgtccgtctcccagttagaactgcaggattcaggcacatggacctgcaccgtgttgcagaaccagaagaaagtggagtttaaaatcgatatcgttgtactggccttccagaaagcctcctccattgtgtataaaaaggaaggggagcaagtggaattcagctttcctctggcatttacggttgaaaagctgaccgggagcggagagctgtggtggcaggccgaaagagcatctagttccaagtcgtggattaccttcgacttgaaaaacaaggaagttagcgtaaaacgagtgacacaggatcctaaactgcagatgggcaagaaactgccactacatctcactctgcctcaggccctgccccagtacgcaggctccggtaacctgaccctggctttagaggccaagacaggtaagctccaccaggaggtgaatctcgtggttatgagggccacacaactgcagaagaacctcacctgcgaggtctggggtccaacctcccccaagctcatgctttcccttaaactggagaacaaagaggcaaaagttagtaagcgtgagaaggcagtgtgggttctcaaccccgaggctggtatgtggcaatgtctcctgagcgatagcggtcaggttctcctggagagcaatattaaagtgttgcctacctggagtaccccagtgcagcccatggccctaattgtattgggcggtgtggcagggttgttactctttataggactgggcattttcttctgcgtgagatgtcgccaccggagacggcaggctgagaggatgagccagataaagcggcttcttagcgagaaaaaaacctgccagtgtccgcataggtttcagaaaacgtgtagtccgatctag

SEQ ID NO: 13706 - DNA, 1275 bp, Artificial Sequence
  derived and/or modified sequence
atgaaccggggagtcccttttaggcacttgcttctggtgctgcaactggcgctcctcccagcagccactcagggaaagaaagtggtgctgggcaaaaaaggggatacagtggaactgacctgtacagcttcccagaagaagagcatacaattccactggaaaaactccaaccagataaagattctgggaaatcagggctccttcttaactaaaggtccatccaagctgaatgatcgcgctgactcaagaagaagcctttgggaccaaggaaacttccccctgatcatcaagaatcttaagatagaagactcagatacttacatctgtgaagtggaggaccagaaggaggaggtgcaattgctagtgttcggattgactgccaactctgacacccacctgcttcaggggcagagcctgaccctgaccttggagagcccccctggtagtagcccctcagtgcaatgtaggagtccaaggggtaaaaacatacagggggggaagaccctctccgtgtctcagctggagctccaggatagtggcacctggacatgcactgtcttgcagaaccagaagaaggtggagttcaaaatagacatcgtggtgctagctttccagaaggcctccagcatagtctataagaaagagggggaacaggtggagttctccttcccactcgcctttacagttgaaaagctgacgggcagtggcgagctgtggtggcaggcggagagggcttcctcctccaagtcttggatcacctttgacctgaagaacaaggaagtgtctgtaaaacgggttacccaggaccctaagctccagatgggcaagaagctcccgctccacctcaccctgccccaggccttgcctcagtatgctggctctggaaacctcaccctggcccttgaagcgaaaacaggaaagttgcatcaggaagtgaacctggtggtgatgagagccactcagctccagaaaaatttgacctgtgaggtgtggggacccacctcccctaagctgatgctgagcttgaaactggagaacaaggaggcaaaggtctcgaagcgggagaaggcggtgtgggtgctgaaccctgaggcggggatgtggcagtgtctgctgagtgactcgggacaggtcctgctggaatccaacatcaaggttctgcccacatggtcgaccccggtgcagccaatggccctgattgtgctggggggcgtcgccggcctcctgcttttcattgggctaggcatcttcttctgtgtcaggtgccggcactga

SEQ ID NO: 13707 - DNA, 1466 bp, Artificial Sequence
  derived and/or modified sequence
aagcttttggaccctcgtacagaagctaatacgactcactatagggaaataagagagaaaagaagagtaagaagaaatataagagccaccatgaaccggggagtcccttttaggcacttgcttctggtgctgcaactggcgctcctcccagcagccactcagggaaagaaagtggtgctgggcaaaaaaggggatacagtggaactgacctgtacagcttcccagaagaagagcatacaattccactggaaaaactccaaccagataaagattctgggaaatcagggctccttcttaactaaaggtccatccaagctgaatgatcgcgctgactcaagaagaagcctttgggaccaaggaaacttccccctgatcatcaagaatcttaagatagaagactcagatacttacatctgtgaagtggaggaccagaaggaggaggtgcaattgctagtgttcggattgactgccaactctgacacccacctgcttcaggggcagagcctgaccctgaccttggagagcccccctggtagtagcccctcagtgcaatgtaggagtccaaggggtaaaaacatacagggggggaagaccctctccgtgtctcagctggagctccaggatagtggcacctggacatgcactgtcttgcagaaccagaagaaggtggagttcaaaatagacatcgtggtgctagctttccagaaggcctccagcatagtctataagaaagagggggaacaggtggagttctccttcccactcgcctttacagttgaaaagctgacgggcagtggcgagctgtggtggcaggcggagagggcttcctcctccaagtcttggatcacctttgacctgaagaacaaggaagtgtctgtaaaacgggttacccaggaccctaagctccagatgggcaagaagctcccgctccacctcaccctgccccaggccttgcctcagtatgctggctctggaaacctcaccctggcccttgaagcgaaaacaggaaagttgcatcaggaagtgaacctggtggtgatgagagccactcagctccagaaaaatttgacctgtgaggtgtggggacccacctcccctaagctgatgctgagcttgaaactggagaacaaggaggcaaaggtctcgaagcgggagaaggcggtgtgggtgctgaaccctgaggcggggatgtggcagtgtctgctgagtgactcgggacaggtcctgctggaatccaacatcaaggttctgcccacatggtcgaccccggtgcagccaatggccctgattgtgctggggggcgtcgccggcctcctgcttttcattgggctaggcatcttcttctgtgtcaggtgccggcactgagctgccttctgcggggcttgccttctggccatgcccttcttctctcccttgcacctgtacctcttggtctttgaataaagcctgagtaggaaggcggccgc

SEQ ID NO: 13708 - RNA, 1377 nt, Artificial Sequence
  derived and/or modified sequence
augaaccgaggcgugcccuuucgccaccuuuugcuaguucugcagcuggcacugcugccugcugcgacucaggguaaaaaaguaguuuugggaaagaagggagacacuguugaacucaccugcaccgcuagucagaagaaguccauccaguuccacuggaaaaacucaaaucaaauuaaaauucucggaaaucagggcaguuuucucacaaagggucccucgaaguugaaugauagggccgauagccggagaucacucugggaccaagggaacuuuccccugaucaucaagaaucuuaagauagaagacagcgacacauacaucugcgaggucgaggaccaaaaagaggaaguucaacuccugguauuuggacucaccgcuaacucggauacacauuuacugcaggggcagucucugaccuuaaccuuggaauccccuccaggcaguucgccauccgugcaaugucgguccccgcgaggaaagaacauucagggcggcaagacacugagcgugagccaauuggagcuucaagauagugguacauggaccuguacugucuugcaaaaucagaagaagguggaauuuaaaaucgacauuguagugcuagcauuucagaaagcaucgagcauuguuuacaaaaaagagggggagcaaguugaauuuagcuucccccucgcguuuaccgucgaaaaauugacuggaucaggagaacuaugguggcaggcugaacgagccaguucaagcaagucauggauuacauuugaucuuaagaauaaagaagugucagugaaaagagugacacaggauccgaagcugcagauggggaagaaacugccccuucaccucacucucccccaagcucucccccaguacgcaggcagcggaaaccugacacuagcucuggaagcaaagaccggaaagcugcaucaggaggucaaccugguuguuaugcgggccacucaacugcagaaaaaucuaaccugugaggucuggggacccacaagccccaagcuaauguuaucuuugaagcuggagaauaaggaggcgaagguuucuaagagagagaaggcuguuugggugcuaaacccagaagccggcauguggcaaugucuguugucugauucuggccagguccuguuagaguccaauaucaaggucuuacccacuuggaguaccccagugcaaccaauggcucuuaucguccugggggggguagcaggccuacuucuuuucauuggcuuaggcaucuucuuuugugucagaugccgccaucggaggaggcaggcggagcgaaugagucagauaaaaagacuacugagcgaaaagaagaccugucagugcccacaccgcuuccaaaaaacaugcucuccuauauag

SEQ ID NO: 13709 - RNA, 1377 nt, Artificial Sequence
  derived and/or modified sequence
augaaccguggagugcccuuuagacaccugcuucucguucugcagcuugcccucuugccugccgcaacccaagguaagaaagucguacuuggcaagaaaggcgacacagucgaauuaaccuguacggcuucacagaaaaaaucuauucaauuucacuggaaaaauaguaaucagaucaaaauacuagggaaccagggcucuuucuuaaccaagggccccucuaaacugaaugaccgagccgacaguaggagaucacugugggaucaggggaauuuuccucuaaucauaaagaauuugaagauugaagacucggacaccuauaucugcgaggucgaggaucagaaagaggaggugcagcugcugguguucggucuuaccgcuaacucagauacccacuuacuucaaggucaaagccuaacgcuaacucuggaaucaccgcccggaagcuccccuagcguccagugccguucuccucgaggcaagaacauccagggggggaaaacgcuaagugugucucagcuggaacugcaggacagcgggacguggacuugcacaguucuucaaaaucaaaaaaagguugaguuuaagaucgauauagucgugcucgcauuucaaaaggcaucuucaauuguuuauaaaaaggaaggagaacagguggaguucaguuuuccguuggcauucaccguugaaaaacucaccgggaguggagaacugugguggcaggccgagcgcgcgucaaguaguaaaaguuggaucacauucgaccucaaaaacaaggaagucagcgucaagcgagucacccaggacccuaaacugcaaauggguaagaagcucccucugcaccugacccugccccaggcccucccccaauacgcaggcucagguaaucugacacuugcuuuagaggcaaagacaggcaagcuucaucaggaagucaaccucguugugaugagggcuacccagcugcaaaaaaaccucacuugcgaggugugggggcccacaagcccgaaacugaugcugucacuuaaacucgaaaacaaggaagcgaaggucagcaaacgcgaaaaagcgguaugggugcucaaucccgaggcuggaauguggcagugccugcuuagcgacuccggacaagugcuucuggaaucuaacauuaaagugcuccccacuuggucuacgccuguacaacccauggcccucauuguccuaggcgguguagccggauuauugcuauuuauuggcuuggguauuuucuucugugugagauguagacauagacgccgacaggcagaaagaaugucgcagauuaagagacuguugucugagaaaaaaacgugccagugcccucaucgguuccagaagacgugcuccccaaucuag

SEQ ID NO: 13710 - DNA, 1686 bp, Artificial Sequence
  derived and/or modified sequence
atggtgctgggccccgagcagaagatgagcgacgacagcgtgagcggcgaccacggcgagagcgccagcctgggcaacatcaaccccgcctacagcaaccccagcctgagccagagccccggcgacagcgaggagtacttcgccacctacttcaacgagaagatcagcatccccgaggaggagtacagctgcttcagcttcagaaagctgtgggccttcaccggccccggcttcctgatgagcatcgcctacctggaccccggcaacatcgagagcgacctgcagagcggcgccgtggccggcttcaagctgctgtggatcctgctgctggccaccctggtgggcctgctgctgcagagactggccgccagactgggcgtggtgaccggcctgcacctggccgaggtgtgccacagacagtaccccaaggtgcccagagtgatcctgtggctgatggtggagctggccatcatcggcagcgacatgcaggaggtgatcggcagcgccatcgccatcaacctgctgagcgtgggcagaatccccctgtggggcggcgtgctgatcaccatcgccgacaccttcgtgttcctgttcctggacaagtacggcctgagaaagctggaggccttcttcggcttcctgatcaccatcatggccctgaccttcggctacgagtacgtgaccgtgaagcccagccagagccaggtgctgaagggcatgttcgtgcccagctgcagcggctgcagaaccccccagatcgagcaggccgtgggcatcgtgggcgccgtgatcatgccccacaacatgtacctgcacagcgccctggtgaagagcagacaggtgaacagaaacaacaagcaggaggtgagagaggccaacaagtacttcttcatcgagagctgcatcgccctgttcgtgagcttcatcatcaacgtgttcgtggtgagcgtgttcgccgaggccttcttcggcaagaccaacgagcaggtggtggaggtgtgcaccaacaccagcagcccccacgccggcctgttccccaaggacaacagcaccctggccgtggacatctacaagggcggcgtggtgctgggctgctacttcggccccgccgccctgtacatctgggccgtgggcatcctggccgccggccagagcagcaccatgaccggcacctacagcggccagttcgtgatggagggcttcctgaacctgaagtggagcagattcgccagagtggtgctgaccagaagcatcgccatcatccccaccctgctggtggccgtgttccaggacgtggagcacctgaccggcatgaacgacttcctgaacgtgctgcagagcctgcagctgcccttcgccctgatccccatcctgaccttcaccagcctgagacccgtgatgagcgacttcgccaacggcctgggctggagaatcgccggcggcatcctggtgctgatcatctgcagcatcaacatgtacttcgtggtggtgtacgtgagagacctgggccacgtggccctgtacgtggtggccgccgtggtgagcgtggcctacctgggcttcgtgttctacctgggctggcagtgcctgatcgccctgggcatgagcttcctggactgcggccacaccgtgagcatcagcaagggcctgctgaccgaggaggccaccagaggctacgtgaagtag

SEQ ID NO: 13711 - DNA, 450 bp, Artificial Sequence
  derived and/or modified sequence
atggtgctgggccccgagcagaagatgagcgacgacagcgtgagcggcgaccacggcgagagcgccagcctgggcaacatcaaccccgcctacagcaaccccagcctgagccagagccccggcgacagcgaggagtacttcgccacctacttcaacgagaagatcagcatccccgaggaggagtacagctgcttcagcttcagaaagctgtgggccttcaccggccccggcttcctgatgagcatcgcctacctggaccccggcaacatcgagagcgacctgcagagcggcgccgtggccggcttcaagctgctgtggatcctgctgctggccaccctggtgggcctgctgctgcagagactggccgccagactgggcgtggtgaccggcctgcacctggccgaggtgtgccacagacagtaccccaaggtgcccagagtgatcctgtag

SEQ ID NO: 13712 - DNA, 1686 bp, Artificial Sequence
  derived and/or modified sequence
atggtactaggcccggagcaaaagatgtctgatgacagcgtctcaggtgatcatggcgagtccgccagcctggggaatattaatcccgcctacagcaacccctccctctcacagagtcctggggacagcgaggaatattttgctacatactttaatgaaaagattagtattccggaagaagaatatagctgtttttcctttagaaaactctgggcttttactggccctggtttcctgatgagcatcgcatacctggatcccggcaacattgagagcgacctgcagtccggggccgtggccggcttcaaactcctttggatcctcctcttggcaacgcttgttgggctgctgctgcaacgcctggccgcccgcctcggcgtggtgaccggcttacacctagccgaggtttgccacagacagtaccccaaggtgccacgggtgattctgtggttgatggtggagttggcgatcattgggagcgacatgcaggaggtgatcgggtctgctattgcaattaaccttctgtcagttggccggatccctctgtgggggggggtgctcatcactatcgccgacactttcgtgtttctgttcttggacaagtacgggttgcggaagctagaagcctttttcggatttctcattacaataatggcgctgacgtttggttatgagtatgtgactgtcaagccatcacagtctcaggtactcaaggggatgttcgttccctcgtgttcaggatgccgcactcctcaaatcgagcaggccgtcggtattgtgggagccgtgatcatgccccacaacatgtacctgcactcagccctggtcaagagccgccaggtaaacaggaacaataaacaggaagtgcgcgaggccaataaatatttctttatcgaatcctgcatcgctctattcgtcagctttatcattaacgtgttcgtggtcagcgtgttcgccgaagcgttttttggcaaaactaacgagcaggtcgtggaggtctgtacaaacaccagctctccgcacgctggactgtttcccaaagataattctacactcgctgtggatatctacaaaggcggagtcgtgttaggctgctacttcggccccgcagctctgtacatctgggccgtcggcatactggccgccggacagtcttcaacgatgacaggaacttacagtggccagttcgtgatggaggggtttttgaatctcaaatggtcccggtttgcccgggtcgtactcacccggtccatcgccattatccctacattactcgtggccgtgtttcaggacgtggagcacctcactggaatgaacgattttctcaacgtccttcaaagcctgcaattgccattcgctctgatccccattctgacattcacttcacttaggcccgttatgtcagattttgcaaatggtctcggctggagaattgctggaggcattctcgtattaataatttgcagcataaatatgtatttcgtagtggtctatgttagggacctgggtcacgtggccctgtacgttgtggcagccgtcgtcagcgtggcctacctcggatttgtgttctacttagggtggcagtgcctgatagctttgggaatgagcttccttgactgcggccataccgtctctatctctaagggattgttgacagaggaagcaacaagagggtacgtcaaatag

SEQ ID NO: 13713 - DNA, 1686 bp, Artificial Sequence
  derived and/or modified sequence
atggtgctaggccccgaacagaagatgagtgacgacagcgtgagtggagatcacggcgaatctgcgtctctgggcaacattaatccagcctatagcaacccctcactcagccagtctccgggtgactctgaggaatatttcgcaacctattttaatgaaaaaatctccattccagaagaagagtactcctgtttttcctttagaaaattatgggcatttaccggtcctggcttcttaatgagcatagcatacctggaccctggcaatatagagtccgatttacagtctggggctgtcgctggatttaaactcctctggatcctgcttttagccactcttgtcggtttgctgttacagaggctagcggcacgattgggcgtcgtaactggcctgcatctcgctgaagtgtgccatcgtcagtatccaaaagttcctcgggtaatcctatggttgatggtggaattagctatcatcggcagcgacatgcaggaagttattggctctgccattgccataaatctgctgtcggtagggcgcatccccttgtggggaggagtgctgataaccatcgcggacactttcgtattcctatttcttgacaagtatggactaaggaagctcgaggctttcttcgggttcctgattacaattatggctctgactttcggctatgagtacgtaacggtaaagccatcacaatcccaggtgcttaagggcatgtttgtgccctcctgctctggatgtcgcacacctcagatcgaacaggctgtggggattgtaggagcagtgattatgccccacaatatgtacctccacagtgctctggtgaagtcccgccaggtgaatagaaacaacaaacaagaggtgcgggaagctaacaaatacttctttatcgagagttgcattgccctcttcgtctcgttcattatcaacgtgtttgtggtgagtgtgtttgctgaggcgtttttcgggaaaacaaatgaacaggttgttgaggtctgtacaaacacctcaagtcctcatgccggccttttccccaaggacaacagtacacttgctgtagatatatataaaggcggcgttgttcttggatgttacttcggacctgctgcattgtacatatgggcggttgggatactggccgctgggcaaagctcaaccatgactgggacctactccgggcaatttgtcatggaggggttcttgaacctgaaatggagcagatttgcgagagttgtgctcacaaggagtatagcgataattccgaccctcctggttgctgtctttcaggatgttgagcacctgacaggcatgaacgattttctgaatgtgctgcagtccctccagctgccgtttgctctgatcccaattctgacgttcacatcactaagacctgtcatgagcgattttgccaacggccttggctggaggattgcagggggtatcctggtgctgattatctgcagcatcaacatgtactttgtggtcgtttatgtccgggatcttggccatgtcgcactttatgttgtcgctgccgtggtgagcgttgcttaccttggattcgtattctatctaggctggcaatgtttaatcgccctgggaatgtccttcctggactgtggccacaccgtaagtatcagcaagggcctgctcacagaggaggccaccagaggctacgtgaagtag

SEQ ID NO: 13714 - DNA, 450 bp, Artificial Sequence
  derived and/or modified sequence
atggtgctcgggcccgagcaaaaaatgtctgacgatagcgtgtctggcgaccacggtgaaagcgcttccctggggaacataaaccctgcttattccaacccttccctctctcagagtcctggcgacagcgaggaatactttgctacttactttaacgagaagatcagcattccggaagaagagtactcatgttttagtttccgcaagctttgggcattcaccggtcccggattcttgatgagtattgcttacctggaccctgggaacatcgagagcgatctgcagagtggagctgtggctgggtttaagctgctttggatcttacttttggccacgctggtggggcttttgctgcagaggctcgcagctagactgggcgtcgtgactgggcttcatttggcagaagtatgtcataggcagtatcccaaggtgcccagggtgattctgtag

SEQ ID NO: 13715 - DNA, 1686 bp, Artificial Sequence
  derived and/or modified sequence
atggtgctgggccctgagcagaagatgtctgatgattctgtgtctggggaccacggggagagcgccagcctgggcaacatcaacccagcctacagcaaccccagcctgagccagagccctggggacagcgaggagtactttgccacctacttcaatgagaagatcagcatccctgaggaggagtacagctgcttctccttcaggaagctgtgggccttcaccggccctggcttcctgatgagcatcgcctacctggaccccggcaacatcgagagtgacctgcagagcggggctgtggccggcttcaagctgctgtggatcctgctgctggccaccctggtgggcctgctgctgcagaggctggccgcccggctgggcgtggtgacaggcctgcacctggccgaggtgtgccaccggcagtaccccaaggtgcccagggtcatcctgtggctgatggtggagctggccatcatcggcagtgacatgcaggaggtgattggcagcgccatcgccatcaacctgctgtctgtgggccgcatccccctgtggggcggcgtgctgatcaccatcgctgacacctttgtgttcctgttcctggacaagtatggcctgaggaagctggaggccttcttcggcttcctgatcaccatcatggccctgaccttcggctatgaatatgtgacagtgaagcccagccagagccaggtgctgaagggcatgtttgtgcccagctgcagcggctgcaggaccccccagatcgagcaggccgtgggcatcgtgggcgccgtcatcatgccccacaacatgtacctgcacagcgccctggtgaagagccggcaggtgaacagaaacaacaagcaggaggtgcgggaggccaacaagtacttcttcatcgagagctgcatcgccctgtttgtgtccttcatcatcaacgtgtttgtggtgtctgtgtttgctgaggccttcttcggcaagaccaatgagcaggtggtggaggtgtgcaccaacaccagcagcccccacgccggcctcttccccaaggacaacagcaccctggccgtggacatctacaagggcggcgtggtgctgggctgctactttggacctgctgccctgtacatctgggccgtgggcatcctggccgccggccagagcagcaccatgacaggcacctacagcggccagtttgtgatggagggcttcctgaacctgaagtggagcagatttgcccgggtggtgctgaccaggagcatcgccatcatccccaccctgctggtggccgtgttccaggatgtggagcacctgaccggcatgaatgacttcctgaatgtgctgcagagcctgcagctgccctttgccctgatccccatcctgaccttcaccagcctgcggcctgtgatgtctgactttgccaacggcctgggctggagaattgctgggggcatcctggtgctgatcatctgcagcatcaacatgtactttgtggtggtgtatgtgcgggacctgggccacgtggccctgtatgtggtggccgctgtggtgtctgtggcctacctgggctttgtgttctacctgggctggcagtgcctgattgccctgggcatgtccttcctggactgtggccacacagtgtccatcagcaagggcctgctgacagaggaggccacccggggctacgtgaagtag

SEQ ID NO: 13716 - DNA, 450 bp, Artificial Sequence
  derived and/or modified sequence
atggtgctgggccctgagcagaagatgtctgatgattctgtgtctggggaccacggggagagcgccagcctgggcaacatcaacccagcctacagcaaccccagcctgagccagagccctggggacagcgaggagtactttgccacctacttcaatgagaagatcagcatccctgaggaggagtacagctgcttctccttcaggaagctgtgggccttcaccggccctggcttcctgatgagcatcgcctacctggaccccggcaacatcgagagtgacctgcagagcggggctgtggccggcttcaagctgctgtggatcctgctgctggccaccctggtgggcctgctgctgcagaggctggccgcccggctgggcgtggtgacaggcctgcacctggccgaggtgtgccaccggcagtaccccaaggtgcccagggtcatcctgtag

SEQ ID NO: 13717 - DNA, 1686 bp, Artificial Sequence
  derived and/or modified sequence
atggtgctgggccccgagcagaagatgagcgacgacagcgtgagcggtgaccacggagaaagcgcttcattgggaaatattaacccggcctactctaatccctcgctgtcacaatcccctggcgacagcgaggagtactttgcaacatactttaatgaaaagatttctatccccgaggaagagtactcatgcttctccttccgaaagctgtgggcttttacaggccctggattcctgatgagcattgcctatctggatcctggaaacatcgaaagtgatcttcagagcggcgccgtcgctggctttaaactgctgtggatactgctgcttgctaccctggtgggactgctcttacagcggctggctgccaggcttggggtggtgacgggactccacctcgcagaggtgtgccatcgtcaatatcccaaagtacccagagttattctctggctgatggtggagctcgcgattatcgggagtgacatgcaggaggtaatcggaagcgctatcgctattaacttgctctccgtcggacgcatccctctgtggggcggagtgcttataaccatagcagacacgtttgtgttcctgttcttggacaagtacggtcttcggaagctggaagccttcttcggctttcttattactattatggccttgacctttggatacgagtacgttactgtaaaaccttcccagtctcaagttttgaagggtatgttcgtgccatcatgctcaggctgtcgcacaccccagatcgaacaggcggtggggatcgtgggcgccgttattatgccacacaatatgtatctgcattctgcattggtcaagtcacgccaagtgaacaggaataacaagcaggaggttcgcgaggccaacaaatactttttcatcgagagttgcatagcgctgtttgtaagcttcatcatcaacgtctttgttgtgtctgttttcgcggaggctttcttcggaaagacaaatgaacaggtcgttgaggtgtgcacaaacaccagctctccgcacgccggtttgtttcccaaagacaactcgaccttagccgtggacatctacaagggtggggtagtcctggggtgctacttcggtccggccgcactgtacatctgggccgtcggtatccttgccgcaggacagagctcaacgatgacaggaacgtacagtggccaattcgtaatggagggattcctgaatctgaagtggagccgatttgcccgcgtggtcttaactcggtctatcgcaatcatccctactcttctggtggctgtctttcaagatgtagaacacttaacggggatgaacgatttcctgaatgttctgcagtcattgcaattgcccttcgccttgatcccaattctaactttcacaagcctacgaccagttatgagtgacttcgccaacgggttgggatggaggattgccggagggatcctcgtgctaatcatctgctccatcaatatgtacttcgtggtagtgtacgtcagagaccttgggcacgttgcactctatgtagtggccgcagttgtttctgtcgcctatttaggttttgttttctacctcggctggcagtgtctgatcgctcttggaatgtccttcctcgactgtggccatactgtctccatttcaaagggattgcttaccgaagaagccacaagaggctacgtaaagtag

SEQ ID NO: 13718 - DNA, 1686 bp, Artificial Sequence
  derived and/or modified sequence
atggtgctgggccccgagcagaagatgagcgacgacagcgtgagcggcgatcacggagagtcagcttctctcggcaacatcaaccccgcctattccaacccctccctgtctcagtctcctggcgattcagaagagtacttcgctacatatttcaacgaaaagattagcataccagaagaggaatacagctgcttctcttttcgcaagctatgggctttcaccggccctggatttctgatgtctattgcatacctggatcctggcaacattgagtcagacttgcagtcaggtgcagttgctggatttaagcttttatggatccttttgctggcaactctggttggacttctactgcagaggctcgccgctcggctgggcgtggtgaccggcctccatcttgccgaagtctgccacagacagtacccgaaagttccgagggtgatcctgtggctgatggtcgagctggcaatcatcggttcagacatgcaagaagtgataggatcagctatcgccatcaatcttttgagtgtgggtagaatccctctttggggcggggtgctgattaccattgcagacacttttgtgttcctgttcctcgataagtacggactgaggaaactagaagccttttttggattcctcatcactatcatggcactgacgttcggatatgagtatgtgaccgtaaaacccagccagtcccaggtgctcaaggggatgttcgtcccctcctgtagcggctgtcggactccacagatcgagcaagccgtcggtatcgttggagccgtaatcatgcctcataacatgtacctgcattccgcccttgtcaagtctagacaagtcaatagaaacaacaagcaggaagtcagggaagcaaacaagtactttttcatcgagagttgcatagcactgttcgtttctttcatcatcaatgtgtttgtggtgtctgtcttcgctgaggcatttttcggcaagacaaatgaacaggtagtggaagtgtgcaccaatactagttctccacatgctggactatttcctaaagacaacagcactcttgccgtggatatctacaaagggggagtggtgctcgggtgctactttggaccggcggctctgtatatttgggctgtgggaatcctggccgccggccagagctctaccatgaccggcacatacagcggtcagtttgtgatggagggatttctgaacctgaagtggagtaggttcgctcgggttgtgctgactagatcaattgctattatccccacattgctggttgccgtttttcaagatgtggaacaccttactgggatgaatgatttcctcaacgtactgcaatccttacagctcccatttgcacttatccccatcctgaccttcacctccctgcgaccagtaatgtctgattttgccaatggcctgggctggcgcattgctggcgggattctggtccttattatttgcagcattaatatgtatttcgtagtggtgtacgtgagagatcttggacacgttgcactttacgtggtggccgcagttgtcagcgtggcttacctcgggttcgttttttacctggggtggcaatgtcttatcgctctgggaatgtcttttttagattgcggccatactgtttcaatcagcaaggggctgctcacggaagaggctaccaggggttatgtcaaatag

SEQ ID NO: 13719 - DNA, 450 bp, Artificial Sequence
  derived and/or modified sequence
atggtgctgggccccgagcagaagatgagcgacgacagcgtgagcggggatcacggagaatccgccagcctcggcaacataaaccccgcatattccaacccaagcctatcgcagtctcctggtgactcagaggaatatttcgcaacctatttcaacgagaagatatccattcccgaggaggagtacagctgttttagcttcagaaaactgtgggcttttacggggcccggtttcctgatgtccatagcctaccttgacccaggcaatatagaaagtgacctgcaatcgggtgccgtcgccggattcaagctgctgtggattctcttacttgcaacactagtggggctgctactccagagactcgccgccagactgggagtagtgactggcctgcacctggctgaggtctgccaccggcagtatcccaaggttcctcgggtgattttatag

SEQ ID NO: 13720 - DNA, 1686 bp, Artificial Sequence
  derived and/or modified sequence
atggtcctcggacccgagcagaaaatgagcgacgactcagtgagcggggaccacggcgagtccgcaagcctaggcaatatcaatccagcttacagtaacccttctctatctcagtcacctggcgactccgaggagtattttgcgacatatttcaacgaaaagataagcatccctgaggaagagtatagctgcttcagtttccggaaattatgggcctttaccgggccagggttcctgatgtccattgcatatctggatccaggaaacatcgagtcagacctgcaatccggggctgtggctggttttaagttgctctggatcttactactcgcaactctcgtgggcctcctcctccagcggctggctgcccgtctcggggtggtgaccggcctgcacctggctgaagtctgccatcgtcagtatcccaaagtgcctagggttatcctctggctcatggttgagcttgccattattgggagcgacatgcaggaggtgattgggtctgctatcgcgattaacttgctgagcgtaggtcgcattcccctgtggggtggcgtcctcatcacaattgccgatactttcgtgttcctctttttggataagtacggcctgaggaagctggaggcattctttgggtttttgattaccatcatggccttgacgttcgggtacgaatatgttacggtaaagccgagtcagtcacaggtgctgaagggcatgtttgtgccatcttgttccggctgtcgaacccctcaaatcgagcaggccgtggggattgtgggggcagtcataatgcctcacaatatgtaccttcatagcgcgctcgtcaagtccagacaggtgaatcgcaataacaaacaagaagttagggaagcaaacaaatatttttttatcgagagctgcatcgctctctttgtaagctttattattaacgtgttcgttgtgagcgtgttcgccgaggccttttttggaaagacaaatgagcaggtcgttgaggtgtgtactaacactagctcaccacatgccggtctgttccctaaggataactccacactggccgttgacatctataaaggtggggtggtcctcggctgctattttgggcctgcagctctttatatttgggccgtggggatcctcgccgctggtcagagctccaccatgacaggaacatactcagggcagtttgttatggaaggcttcctgaacttgaaatggtcccgctttgctcgagtcgttctgacgagatctatcgccatcatcccaactttgctggtcgctgtgttccaggatgtggaacaccttactggaatgaacgacttcctaaatgtcttacagtcacttcagctgcccttcgcccttattcctatcctcacattcacaagcctacgtcccgtgatgtctgacttcgccaacggcctgggctggaggatagctggtggaattctcgtcttgatcatctgtagtattaatatgtacttcgtggttgtatatgttcgagatctgggacacgtcgccctctatgttgtcgcagcggtcgtgtcggttgcctatttgggtttcgtgttctacctgggttggcagtgcctcatagccctgggaatgtcattcttggactgtggccacactgtatctatcagtaaaggacttcttaccgaggaagccacaagaggatacgtgaagtag

SEQ ID NO: 13721 - DNA, 1686 bp, Artificial Sequence
  derived and/or modified sequence
atggtgctaggtcccgagcagaagatgtctgacgattccgtgtctggggatcacggtgagtccgcatccctgggcaacatcaacccggcatattcaaatccttccctctcccagagtcctggtgattcagaggagtattttgctacttacttcaatgagaaaatcagcatacccgaggaggagtattcttgcttctcgtttcgcaagttgtgggccttcactgggccaggatttttgatgagtatcgcttaccttgatcccggaaatattgagtctgacctccaatctggagccgttgcgggatttaagctcctgtggatccttctactcgctactctggtcgggcttctgctgcagagactggctgccaggctaggcgtcgtgactggcttgcatctggccgaagtctgccaccggcaatatccaaaagttccaagggtcatcctgtggttgatggtggagctggccatcattggatcagacatgcaggaagtgatcggctctgccatcgccatcaacctgctctctgtgggcagaatccccttatggggaggggtattaatcacaatcgctgatacgttcgtctttttgtttttggacaaatatggccttcggaaactggaggccttctttggcttcctcattacgataatggctctgacttttggctacgagtatgtcacagtgaaacctagccagagccaggtgctgaaaggcatgttcgtgcccagctgttccggatgtcggaccccgcagatcgaacaggctgtggggatagttggggcagttataatgccccacaatatgtacctgcattcagctcttgtgaagtccaggcaagttaacaggaataacaaacaagaggtgcgcgaggctaacaagtatttcttcatcgagtcgtgcattgccctgtttgtcagctttatcatcaatgtctttgtggtgagcgtgtttgctgaggccttctttggtaagactaacgaacaggtggtcgaagtctgtaccaacacaagctcacctcacgccggactgttccccaaggataattcaacgctggccgtcgacatttacaagggtggggttgtgctgggttgttattttgggcctgctgccttgtatatttgggccgtgggaatcctggctgccggacagtcctcgacaatgaccggaacgtatagcgggcagttcgtcatggagggctttctgaacctgaagtggtctcgatttgcgagggtggttctgactagaagtattgccattatccccaccttgcttgtcgccgtatttcaggacgtcgagcacttgacaggcatgaacgatttcctcaatgttctacagagtctgcagttaccatttgccctgatccccatcctaaccttcacatctcttagaccagtcatgtccgacttcgctaatggcttgggatggaggattgcgggagggatcctcgtattgattatctgttcgatcaatatgtatttcgtggttgtgtatgtgagggacctgggccacgtggccctgtacgttgtggcggctgtggtgtctgttgcctacctgggttttgtgttctacttggggtggcaatgtctgatagctcttggcatgagcttcttagactgcggacataccgtgtctataagcaagggcctcctgactgaggaggcgacgagggggtacgtgaagtag

SEQ ID NO: 13722 - DNA, 450 bp, Artificial Sequence
  derived and/or modified sequence
atggtcttgggacccgagcagaagatgagcgatgattcagtctctggcgatcacggcgaatccgcctcattgggcaacattaatcccgcatatagcaacccatctctgtcgcagtcccctggcgactcggaagaatattttgctacatactttaacgagaagatttccattcccgaggaggagtactcctgtttcagctttaggaagctgtgggctttcaccggccctggtttcctgatgagtatcgcctatctcgatccaggcaatatcgagagcgacttacagtcgggagccgtggctggcttcaaactgctctggatactgcttctggccactctggttggcctgctgttgcaaagactggctgccagactgggggtggtgacaggccttcatctcgctgaggtgtgccatagacagtatcccaaggtgcctagggtgatactctag

SEQ ID NO: 13723 - DNA, 1740 bp, Artificial Sequence
  derived and/or modified sequence
ggggagggcgttagccagcgtggcgctggctcccggaatatggagccctgggcgcgggggcggcgtgtcaggtggttgcggagctggtaagaatcatattctaagaactcagccactcaggtatccaccatggtgctgggtcctgaacagaagatgtcagatgtcccctggggactcagaggagtacttcgccacttactttaatgagaagatctccattcctgaggaggagtactcttgttttagctttcgtaaactctgggctttcaccggaccaggttttcttatgagcattgcctacctggatccaggaaatattgaatccgatttgcagtctggagcagtggctggatttaagttgctctggatccttctgttggccacccttgtggggctgctgctccagcggcttgcagctagactgggagtggttactgggctgcatcttgctgaagtatgtcaccgtcagtatcccaaggtcccacgagtcatcctgtggctgatggtggagttggctatcatcggctcagacatgcaagaagtcattggctcagccattgctatcaatcttctgtctgtaggaagaattcctctgtggggtggcgttctcatcaccattgcagatacttttgtatttctcttcttggacaaatatggcttgcggaagctagaagcattttttggctttctcatcactattatggccctcacatttggatatgagtatgttacagtgaaacccagccagagccaggtactcaagggcatgttcgtaccatcctgttcaggctgtcgcactccacagattgaacaggctgtgggcatcgtgggagctgtcatcatgccacacaacatgtacctgcattctgccttagtcaagtctagacaggtaaaccggaacaataagcaggaagttcgagaagccaataagtactttttcattgaatcctgcattgcactctttgtttccttcatcatcaatgtctttgttgtctcagtctttgctgaagcattttttgggaaaaccaacgagcaggtggttgaagtctgtacaaataccagcagtcctcatgctggcctctttcctaaagataactcgacactggctgtggacatctacaaagggggtgttgtgctgggatgttactttgggcctgctgcactctacatttgggcagtggggatcctggctgcaggacagagctccaccatgacaggaacctattctggccagtttgtcatggagggattcctgaacctaaagtggtcacgctttgcccgagtggttctgactcgctctattgccatcatccccactctgcttgttgctgtcttccaagatgtagagcatctaacagggatgaatgactttctgaatgttctacagagcttacagcttccctttgctctcatacccatcctcacatttacgagcttgcggccagtaatgagtgactttgccaatggactaggctggcggattgcaggaggaatcttggtccttatcatctgttccatcaatatgtactttgtagtggtttatgtccgggacctagggcatgtggcattatatgtggtggctgctgtggtcagcgtggcttatctgggctttgtgttctacttgggttggcaatgtttgattgcactgggcatgtccttcctggactgtgggcatacggtaagcatctctaaaggcctgctgacagaagaagccacccgtggctacgttaaataacactg

SEQ ID NO: 13724 - protein, 153 aa, Artificial Sequence
  derived and/or modified sequence
MGKISSLPTQLFKCCFCDFLKVKMHTMSSSHLFYLALCLLTFTSSATAGPETLCGAELVDALQFVCGDRGFYFNKPTGYGSSSRRAPQTGIVDECCFRSCDLRRLEMYCAPLKPAKSARSVRAQRHTDMPKTQKEVHLKNASRGSAGNKNYRM

SEQ ID NO: 13725 - DNA, 7321 bp, Artificial Sequence
  derived and/or modified sequence
ttttgtagataaatgtgaggattttctctaaatccctcttctgtttgctaaatctcactgtcactgctaaattcagagcagatagagcctgcgcaatggaataaagtcctcaaaattgaaatgtgacattgctctcaacatctcccatctctctggatttctttttgcttcattattcctgctaaccaattcattttcagactttgtacttcagaagcaatgggaaaaatcagcagtcttccaacccaattatttaagtgctgcttttgtgatttcttgaaggtgaagatgcacaccatgtcctcctcgcatctcttctacctggcgctgtgcctgctcaccttcaccagctctgccacggctggaccggagacgctctgcggggctgagctggtggatgctcttcagttcgtgtgtggagacaggggcttttatttcaacaagcccacagggtatggctccagcagtcggagggcgcctcagacaggcatcgtggatgagtgctgcttccggagctgtgatctaaggaggctggagatgtattgcgcacccctcaagcctgccaagtcagctcgctctgtccgtgcccagcgccacaccgacatgcccaagacccagaaggaagtacatttgaagaacgcaagtagagggagtgcaggaaacaagaactacaggatgtaggaagaccctcctgaggagtgaagagtgacatgccaccgcaggatcctttgctctgcacgagttacctgttaaactttggaacacctaccaaaaaataagtttgataacatttaaaagatgggcgtttcccccaatgaaatacacaagtaaacattccaacattgtctttaggagtgatttgcaccttgcaaaaatggtcctggagttggtagattgctgttgatcttttatcaataatgttctatagaaaagaaaaaaaaaatatatatatatatatatcttagtccctgcctctcaagagccacaaatgcatgggtgttgtatagatccagttgcactaaattcctctctgaatcttggctgctggagccattcattcagcaaccttgtctaagtggtttatgaattgtttccttatttgcacttctttctacacaactcgggctgtttgttttacagtgtctgataatcttgttagtctatacccaccacctcccttcataacctttatatttgccgaatttggcctcctcaaaagcagcagcaagtcgtcaagaagcacaccaattctaacccacaagattccatctgtggcatttgtaccaaatataagttggatgcattttattttagacacaaagctttatttttccacatcatgcttacaaaaaagaataatgcaaatagttgcaactttgaggccaatcatttttaggcatatgttttaaacatagaaagtttcttcaactcaaaagagttccttcaaatgatgagttaatgtgcaacctaattagtaactttcctctttttattttttccatatagagcactatgtaaatttagcatatcaattatacaggatatatcaaacagtatgtaaaactctgttttttagtataatggtgctattttgtagtttgttatatgaaagagtctggccaaaacggtaatacgtgaaagcaaaacaataggggaagcctggagccaaagatgacacaaggggaagggtactgaaaacaccatccatttgggaaagaaggcaaagtccccccagttatgccttccaagaggaacttcagacacaaaagtccactgatgcaaattggactggcgagtccagagaggaaactgtggaatggaaaaagcagaaggctaggaattttagcagtcctggtttctttttctcatggaagaaatgaacatctgccagctgtgtcatggactcaccactgtgtgaccttgggcaagtcacttcacctctctgtgcctcagtttcctcatctgcaaaatgggggcaatatgtcatctacctacctcaaaggggtggtataaggtttaaaaagataaagattcagattttttttaccctgggttgctgtaagggtgcaacatcagggcgcttgagttgctgagatgcaaggaattctataaataacccattcatagcatagctagagattggtgaattgaatgctcctgacatctcagttcttgtcagtgaagctatccaaataactggccaactagttgttaaaagctaacagctcaatctcttaaaacacttttcaaaatatgtgggaagcatttgattttcaatttgattttgaattctgcatttggttttatgaatacaaagataagtgaaaagagagaaaggaaaagaaaaaggagaaaaacaaagagatttctaccagtgaaaggggaattaattactctttgttagcactcactgactcttctatgcagttactacatatctagtaaaacctcgtttaatactataaataatattctattcattttgaaaaacacaatgattccttcttttctaggcaatataaggaaagtgatccaaaatttgaaatattaaaataatatctaataaaaagtcacaaagttatcttctttaacaaactttactcttattcttagctgtatatacatttttttaaaagtttgttaaaatatgcttgactagagtttccagttgaaaggcaaaaacttccatcacaacaagaaatttcccatgcctgctcagaagggtagcccctagctctctgtgaatgtgttttatccattcaactgaaaattggtatcaagaaagtccactggttagtgtactagtccatcatagcctagaaaatgatccctatctgcagatcaagattttctcattagaacaatgaattatccagcattcagatctttctagtcaccttagaactttttggttaaaagtacccaggcttgattatttcatgcaaattctatattttacattcttggaaagtctatatgaaaaacaaaaataacatcttcagtttttctcccactgggtcacctcaaggatcagaggccaggaaaaaaaaaaaaaagactccctggatctctgaatatatgcaaaaagaaggccccatttagtggagccagcaatcctgttcagtcaacaagtattttaactctcagtccaacattatttgaattgagcacctcaagcatgcttagcaatgttctaatcactatggacagatgtaaaagaaactatacatcatttttgccctctgcctgttttccagacatacaggttctgtggaataagatactggactcctcttcccaagatggcacttctttttatttcttgtccccagtgtgtaccttttaaaattattccctctcaacaaaactttataggcagtcttctgcagacttaacgtgttttctgtcatagttagatgtgataattctaagagtgtctatgacttatttccttcacttaattctatccacagtcaaaaatcccccaaggaggaaagctgaaagatgcactgccatattatctttcttaactttttccaacacataatcctctccaactggattataaataaattgaaaataactcattataccaattcactattttattttttaatgaattaaaactagaaaacaaattgatgcaaaccctggaagtcagttgattactatatactacagcagaatgactcagatttcatagaaaggagcaaccaaaatgtcacaacccaaaactttacaagctttgcttcagaattagattgctttataattcttgaatgaggcaatttcaagatatttgtaaaagaacagtaaacattggtaagaatgagctttcaactcataggcttatttccaatttaattgaccatactggatacttaggtcaaatttctgttctctcttccccaaataatattaaagtattatttgaactttttaagatgaggcagttcccctgaaaaagttaatgcagctctccatcagaatccactcttctagggatatgaaaatctcttaacacccaccctacatacacagacacacacacacacacacacacacacacacacacacacattcaccctaaggatccaatggaatactgaaaagaaatcacttccttgaaaattttattaaaaaacaaacaaacaaacaaaaagcctgtccacccttgagaatccttcctctccttggaacgtcaatgtttgtgtagatgaaaccatctcatgctctgtggctccagggtttctgttactattttatgcacttgggagaaggcttagaataaaagatgtagcacattttgctttcccatttattgtttggccagctatgccaatgtggtgctattgtttctttaagaaagtacttgactaaaaaaaaaagaaaaaaagaaaaaaaagaaagcatagacatatttttttaaagtataaaaacaacaattctatagatagatggcttaataaaatagcattaggtctatctagccaccaccacctttcaactttttatcactcacaagtagtgtactgttcaccaaattgtgaatttgggggtgcaggggcaggagttggaaattttttaaagttagaaggctccattgttttgttggctctcaaacttagcaaaattagcaatatattatccaatcttctgaacttgatcaagagcatggagaataaacgcgggaaaaaagatcttataggcaaatagaagaatttaaaagataagtaagttccttattgatttttgtgcactctgctctaaaacagatattcagcaagtggagaaaataagaacaaagagaaaaaatacatagatttacctgcaaaaaatagcttctgccaaatcccccttgggtattctttggcatttactggtttatagaagacattctcccttcacccagacatctcaaagagcagtagctctcatgaaaagcaatcactgatctcatttgggaaatgttggaaagtatttccttatgagatgggggttatctactgataaagaaagaatttatgagaaattgttgaaagagatggctaacaatctgtgaagattttttgtttcttgtttttgttttttttttttttttactttatacagtctttatgaatttcttaatgttcaaaatgacttggttcttttcttctttttttatatcagaatgaggaataataagttaaacccacatagactctttaaaactataggctagatagaaatgtatgtttgacttgttgaagctataatcagactatttaaaatgttttgctatttttaatcttaaaagattgtgctaatttattagagcagaacctgtttggctctcctcagaagaaagaatctttccattcaaatcacatggctttccaccaatattttcaaaagataaatctgatttatgcaatggcatcatttattttaaaacagaagaattgtgaaagtttatgcccctcccttgcaaagaccataaagtccagatctggtaggggggcaacaacaaaaggaaaatgttgttgattcttggttttggattttgttttgttttcaatgctagtgtttaatcctgtagtacatatttgcttattgctattttaatattttataagaccttcctgttaggtattagaaagtgatacatagatatcttttttgtgtaatttctatttaaaaaagagagaagactgtcagaagctttaagtgcatatggtacaggataaagatatcaatttaaataaccaattcctatctggaacaatgcttttgttttttaaagaaacctctcacagataagacagaggcccaggggatttttgaagctgtctttattctgcccccatcccaacccagcccttattattttagtatctgcctcagaattttatagagggctgaccaagctgaaactctagaattaaaggaacctcactgaaaacatatatttcacgtgttccctctttttttttttcctttttgtgagatggggtctcgcactgtcccccaggctggagtgcagtggcatgatctcggctcactgcaacctccacctcctgggtttaagcgattctcctgcctcagcctcctgagtagctgggattacaggcacccaccactatgcccggctaattttttggatttttaatagagacggggttttaccatgttggccaggttggtctcaaactcctgaccttgtgatttgcccgcctcagcctcccaaattgctgggattacaggcatgagccaccacaccctgcccatgtgttccctcttaatgtatgattacatggatcttaaacatgatccttctctcctcattcttcaactatctttgatggggtctttcaaggggaaaaaaatccaagcttttttaaagtaaaaaaaaaaaaagagaggacacaaaaccaaatgttactgctcaactgaaatatgagttaagatggagacagagtttctcctaataaccggagctgaattacctttcactttcaaaaacatgaccttccacaatccttagaatctgcctttttttatattactgaggcctaaaagtaaacattactcattttattttgcccaaaatgcactgatgtaaagtaggaaaaataaaaacagagctctaaaatccctttcaagccacccattgaccccactcaccaactcatagcaaagtcacttctgttaatcccttaatctgattttgtttggatatttatcttgtacccgctgctaaacacactgcaggagggactctgaaacctcaagctgtctacttacatcttttatctgtgtctgtgtatcatgaaaatgtctattcaaaatatcaaaacctttcaaatatcacgcagcttatattcagtttacataaaggccccaaataccatgtcagatctttttggtaaaagagttaatgaactatgagaattgggattacatcatgtattttgcctcatgtatttttatcacacttataggccaagtgtgataaataaacttacagacactgaattaatttcccctgctactttgaaaccagaaaataatgactggccattcgttacatctgtcttagttgaaaagcatattttttattaaattaattctgattgtatttgaaattattattcaattcacttatggcagaggaatatcaatcctaatgacttctaaaaatgtaactaattgaatcattatcttacatttactgtttaataagcatattttgaaaatgtatggctagagtgtcataataaaatggtatatctttctttagtaattacattaaaattagtcatgtttgattaattagttc

SEQ ID NO: 13726 - DNA, 462 bp, Artificial Sequence
  derived and/or modified sequence
atgggcaagatcagcagcctgcccacccagctgttcaagtgctgcttctgcgacttcctgaaggtgaagatgcacaccatgagcagcagccacctgttctacctggccctgtgcctgctgaccttcaccagcagcgccaccgccggccccgagaccctgtgcggcgccgagctggtggacgccctgcagttcgtgtgcggcgacagaggcttctacttcaacaagcccaccggctacggcagcagcagcagaagagccccccagaccggcatcgtggacgagtgctgcttcagaagctgcgacctgagaagactggagatgtactgcgcccccctgaagcccgccaagagcgccagaagcgtgagagcccagagacacaccgacatgcccaagacccagaaggaggtgcacctgaagaacgccagcagaggcagcgccggcaacaagaactacagaatgtag

SEQ ID NO: 13727 - DNA, 462 bp, Artificial Sequence
  derived and/or modified sequence
atgggcaaaattagctcgttgccaacacagctcttcaagtgctgtttctgcgactttcttaaggttaagatgcacactatgtcatcctctcacctgttctacctagccttgtgcctgcttacattcaccagttccgccaccgccgggccggaaaccctgtgcggagctgagctggtggacgctctccaatttgtgtgcggagatcgtggattttattttaacaagccaacgggctatggttctagtagccggagagccccacaaaccgggattgtcgacgagtgctgcttcagatcctgcgatctgagacggctcgagatgtactgcgctccactgaaaccggcaaaatctgcacgaagtgtcagagctcagcgccataccgatatgccgaaaacccagaaggaagtgcatcttaaaaatgctagccgcggctctgcaggcaacaaaaactatagaatgtag

SEQ ID NO: 13728 - DNA, 462 bp, Artificial Sequence
  derived and/or modified sequence
atgggcaagatcagcagcctgcccacccagctgttcaagtgctgcttctgtgacttcctgaaggtgaagatgcacaccatgagcagcagccacctgttctacctggccctgtgcctgctgaccttcaccagcagcgccacagctggccctgagaccctgtgtggggctgagctggtggatgccctgcagtttgtgtgtggggaccggggcttctacttcaacaagcccaccggctacggcagcagcagccggcgggccccccagacaggaattgtggatgagtgctgcttccgcagctgtgacctgcggcggctggagatgtactgtgcccccctgaagccagccaagagcgcccggtctgtgcgggcccagaggcacacagacatgcccaagacccagaaggaggtgcacctgaagaatgccagccggggcagcgctggcaacaagaactacaggatgtag

SEQ ID NO: 13729 - DNA, 7359 bp, Artificial Sequence
  derived and/or modified sequence
gaaggcaaatgttcccccagctgtttcctgtctacagtgtctgtgttttgtagataaatgtgaggattttctctaaatccctcttctgtttgctaaatctcactgtcactgctaaattcagagcagatagagcctgcgcaatggaataaagtcctcaaaattgaaatgtgacattgctctcaacatctcccatctctctggatttctttttgcttcattattcctgctaaccaattcattttcagactttgtacttcagaagcaatgggaaaaatcagcagtcttccaacccaattatttaagtgctgcttttgtgatttcttgaaggtgaagatgcacaccatgtcctcctcgcatctcttctacctggcgctgtgcctgctcaccttcaccagctctgccacggctggaccggagacgctctgcggggctgagctggtggatgctcttcagttcgtgtgtggagacaggggcttttatttcaacaagcccacagggtatggctccagcagtcggagggcgcctcagacaggcatcgtggatgagtgctgcttccggagctgtgatctaaggaggctggagatgtattgcgcacccctcaagcctgccaagtcagctcgctctgtccgtgcccagcgccacaccgacatgcccaagacccagaaggaagtacatttgaagaacgcaagtagagggagtgcaggaaacaagaactacaggatgtaggaagaccctcctgaggagtgaagagtgacatgccaccgcaggatcctttgctctgcacgagttacctgttaaactttggaacacctaccaaaaaataagtttgataacatttaaaagatgggcgtttcccccaatgaaatacacaagtaaacattccaacattgtctttaggagtgatttgcaccttgcaaaaatggtcctggagttggtagattgctgttgatcttttatcaataatgttctatagaaaagaaaaaaaaaatatatatatatatatatcttagtccctgcctctcaagagccacaaatgcatgggtgttgtatagatccagttgcactaaattcctctctgaatcttggctgctggagccattcattcagcaaccttgtctaagtggtttatgaattgtttccttatttgcacttctttctacacaactcgggctgtttgttttacagtgtctgataatcttgttagtctatacccaccacctcccttcataacctttatatttgccgaatttggcctcctcaaaagcagcagcaagtcgtcaagaagcacaccaattctaacccacaagattccatctgtggcatttgtaccaaatataagttggatgcattttattttagacacaaagctttatttttccacatcatgcttacaaaaaagaataatgcaaatagttgcaactttgaggccaatcatttttaggcatatgttttaaacatagaaagtttcttcaactcaaaagagttccttcaaatgatgagttaatgtgcaacctaattagtaactttcctctttttattttttccatatagagcactatgtaaatttagcatatcaattatacaggatatatcaaacagtatgtaaaactctgttttttagtataatggtgctattttgtagtttgttatatgaaagagtctggccaaaacggtaatacgtgaaagcaaaacaataggggaagcctggagccaaagatgacacaaggggaagggtactgaaaacaccatccatttgggaaagaaggcaaagtccccccagttatgccttccaagaggaacttcagacacaaaagtccactgatgcaaattggactggcgagtccagagaggaaactgtggaatggaaaaagcagaaggctaggaattttagcagtcctggtttctttttctcatggaagaaatgaacatctgccagctgtgtcatggactcaccactgtgtgaccttgggcaagtcacttcacctctctgtgcctcagtttcctcatctgcaaaatgggggcaatatgtcatctacctacctcaaaggggtggtataaggtttaaaaagataaagattcagattttttttaccctgggttgctgtaagggtgcaacatcagggcgcttgagttgctgagatgcaaggaattctataaataacccattcatagcatagctagagattggtgaattgaatgctcctgacatctcagttcttgtcagtgaagctatccaaataactggccaactagttgttaaaagctaacagctcaatctcttaaaacacttttcaaaatatgtgggaagcatttgattttcaatttgattttgaattctgcatttggttttatgaatacaaagataagtgaaaagagagaaaggaaaagaaaaaggagaaaaacaaagagatttctaccagtgaaaggggaattaattactctttgttagcactcactgactcttctatgcagttactacatatctagtaaaacctcgtttaatactataaataatattctattcattttgaaaaacacaatgattccttcttttctaggcaatataaggaaagtgatccaaaatttgaaatattaaaataatatctaataaaaagtcacaaagttatcttctttaacaaactttactcttattcttagctgtatatacatttttttaaaagtttgttaaaatatgcttgactagagtttccagttgaaaggcaaaaacttccatcacaacaagaaatttcccatgcctgctcagaagggtagcccctagctctctgtgaatgtgttttatccattcaactgaaaattggtatcaagaaagtccactggttagtgtactagtccatcatagcctagaaaatgatccctatctgcagatcaagattttctcattagaacaatgaattatccagcattcagatctttctagtcaccttagaactttttggttaaaagtacccaggcttgattatttcatgcaaattctatattttacattcttggaaagtctatatgaaaaacaaaaataacatcttcagtttttctcccactgggtcacctcaaggatcagaggccaggaaaaaaaaaaaaaagactccctggatctctgaatatatgcaaaaagaaggccccatttagtggagccagcaatcctgttcagtcaacaagtattttaactctcagtccaacattatttgaattgagcacctcaagcatgcttagcaatgttctaatcactatggacagatgtaaaagaaactatacatcatttttgccctctgcctgttttccagacatacaggttctgtggaataagatactggactcctcttcccaagatggcacttctttttatttcttgtccccagtgtgtaccttttaaaattattccctctcaacaaaactttataggcagtcttctgcagacttaacgtgttttctgtcatagttagatgtgataattctaagagtgtctatgacttatttccttcacttaattctatccacagtcaaaaatcccccaaggaggaaagctgaaagatgcactgccatattatctttcttaactttttccaacacataatcctctccaactggattataaataaattgaaaataactcattataccaattcactattttattttttaatgaattaaaactagaaaacaaattgatgcaaaccctggaagtcagttgattactatatactacagcagaatgactcagatttcatagaaaggagcaaccaaaatgtcacaacccaaaactttacaagctttgcttcagaattagattgctttataattcttgaatgaggcaatttcaagatatttgtaaaagaacagtaaacattggtaagaatgagctttcaactcataggcttatttccaatttaattgaccatactggatacttaggtcaaatttctgttctctcttccccaaataatattaaagtattatttgaactttttaagatgaggcagttcccctgaaaaagttaatgcagctctccatcagaatccactcttctagggatatgaaaatctcttaacacccaccctacatacacagacacacacacacacacacacacacacacacacacacacattcaccctaaggatccaatggaatactgaaaagaaatcacttccttgaaaattttattaaaaaacaaacaaacaaacaaaaagcctgtccacccttgagaatccttcctctccttggaacgtcaatgtttgtgtagatgaaaccatctcatgctctgtggctccagggtttctgttactattttatgcacttgggagaaggcttagaataaaagatgtagcacattttgctttcccatttattgtttggccagctatgccaatgtggtgctattgtttctttaagaaagtacttgactaaaaaaaaaagaaaaaaagaaaaaaaagaaagcatagacatatttttttaaagtataaaaacaacaattctatagatagatggcttaataaaatagcattaggtctatctagccaccaccacctttcaactttttatcactcacaagtagtgtactgttcaccaaattgtgaatttgggggtgcaggggcaggagttggaaattttttaaagttagaaggctccattgttttgttggctctcaaacttagcaaaattagcaatatattatccaatcttctgaacttgatcaagagcatggagaataaacgcgggaaaaaagatcttataggcaaatagaagaatttaaaagataagtaagttccttattgatttttgtgcactctgctctaaaacagatattcagcaagtggagaaaataagaacaaagagaaaaaatacatagatttacctgcaaaaaatagcttctgccaaatcccccttgggtattctttggcatttactggtttatagaagacattctcccttcacccagacatctcaaagagcagtagctctcatgaaaagcaatcactgatctcatttgggaaatgttggaaagtatttccttatgagatgggggttatctactgataaagaaagaatttatgagaaattgttgaaagagatggctaacaatctgtgaagattttttgtttcttgtttttgttttttttttttttttactttatacagtctttatgaatttcttaatgttcaaaatgacttggttcttttcttctttttttatatcagaatgaggaataataagttaaacccacatagactctttaaaactataggctagatagaaatgtatgtttgacttgttgaagctataatcagactatttaaaatgttttgctatttttaatcttaaaagattgtgctaatttattagagcagaacctgtttggctctcctcagaagaaagaatctttccattcaaatcacatggctttccaccaatattttcaaaagataaatctgatttatgcaatggcatcatttattttaaaacagaagaattgtgaaagtttatgcccctcccttgcaaagaccataaagtccagatctggtaggggggcaacaacaaaaggaaaatgttgttgattcttggttttggattttgttttgttttcaatgctagtgtttaatcctgtagtacatatttgcttattgctattttaatattttataagaccttcctgttaggtattagaaagtgatacatagatatcttttttgtgtaatttctatttaaaaaagagagaagactgtcagaagctttaagtgcatatggtacaggataaagatatcaatttaaataaccaattcctatctggaacaatgcttttgttttttaaagaaacctctcacagataagacagaggcccaggggatttttgaagctgtctttattctgcccccatcccaacccagcccttattattttagtatctgcctcagaattttatagagggctgaccaagctgaaactctagaattaaaggaacctcactgaaaacatatatttcacgtgttccctctttttttttttcctttttgtgagatggggtctcgcactgtcccccaggctggagtgcagtggcatgatctcggctcactgcaacctccacctcctgggtttaagcgattctcctgcctcagcctcctgagtagctgggattacaggcacccaccactatgcccggctaattttttggatttttaatagagacggggttttaccatgttggccaggttggtctcaaactcctgaccttgtgatttgcccgcctcagcctcccaaattgctgggattacaggcatgagccaccacaccctgcccatgtgttccctcttaatgtatgattacatggatcttaaacatgatccttctctcctcattcttcaactatctttgatggggtctttcaaggggaaaaaaatccaagcttttttaaagtaaaaaaaaaaaaagagaggacacaaaaccaaatgttactgctcaactgaaatatgagttaagatggagacagagtttctcctaataaccggagctgaattacctttcactttcaaaaacatgaccttccacaatccttagaatctgcctttttttatattactgaggcctaaaagtaaacattactcattttattttgcccaaaatgcactgatgtaaagtaggaaaaataaaaacagagctctaaaatccctttcaagccacccattgaccccactcaccaactcatagcaaagtcacttctgttaatcccttaatctgattttgtttggatatttatcttgtacccgctgctaaacacactgcaggagggactctgaaacctcaagctgtctacttacatcttttatctgtgtctgtgtatcatgaaaatgtctattcaaaatatcaaaacctttcaaatatcacgcagcttatattcagtttacataaaggccccaaataccatgtcagatctttttggtaaaagagttaatgaactatgagaattgggattacatcatgtattttgcctcatgtatttttatcacacttataggccaagtgtgataaataaacttacagacactgaattaatttcccctgctactttgaaaccagaaaataatgactggccattcgttacatctgtcttagttgaaaagcatattttttattaaattaattctgattgtatttgaaattattattcaattcacttatggcagaggaatatcaatcctaatgacttctaaaaatgtaactaattgaatcattatcttacatttactgtttaataagcatattttgaaaatgtatggctagagtgtcataataaaatggtatatctttctttagtaattacattaaaattagtcatgtttgattaa

SEQ ID NO: 13730 - DNA, 462 bp, Artificial Sequence
  derived and/or modified sequence
atgggcaagatcagcagcctgcccacccagctgttcaagtgctgcttctgcgacttcttgaaagtgaagatgcacaccatgtcctctagtcatctattttatctcgcgctctgtctactgactttcacatcgtctgccactgccggtcccgagacattatgtggtgcagagctcgttgacgccttgcagttcgtgtgtggcgatcgtgggttctatttcaataaacccacgggctatggaagtagctccaggagagctccacagactggtattgtggacgagtgttgcttccgaagctgcgacctacgaaggttggagatgtactgtgcccccctgaagcccgctaagagtgcccggagtgtgcgtgctcagaggcatacagacatgcccaaaacacagaaggaagtgcacctaaagaacgcaagccggggctccgccgggaataaaaactatcgcatgtag

SEQ ID NO: 13731 - DNA, 462 bp, Artificial Sequence
  derived and/or modified sequence
atgggaaaaatatcctctctccctacacagctgttcaagtgctgcttctgtgactttcttaaagtgaagatgcatactatgtcctcttctcatctgttttatctcgcactgtgtctgctaaccttcacgtcttcagccactgccggtccagaaactctgtgcggtgctgagctggtggatgccctccagttcgtgtgtggagaccgcggattttattttaacaagccaactggctacggatcgagctctcggcgagccccacagacagggatagtggacgagtgttgttttcgatcctgcgacctgcggagactggaaatgtattgtgccccactgaagccagccaaaagcgctaggagtgtccgggctcagcgacacacagacatgccgaagacccagaaggaggttcacctgaaaaacgcatctcgaggcagcgccggtaataagaactaccgaatgtag

SEQ ID NO: 13732 - DNA, 462 bp, Artificial Sequence
  derived and/or modified sequence
atggggaagatctcaagcctacctacccagctgttcaagtgttgtttttgcgactttctgaaggttaagatgcacacaatgtccagctcacacctgttctatctcgcgctctgtttacttacattcacatcatccgcaaccgccgggccagaaactctttgtggtgccgagcttgttgacgccctgcagttcgtgtgtggggacagaggattctacttcaataaacccaccgggtacggatcaagctcacgtcgcgctcctcagacaggaatcgtagacgagtgctgttttcgatcgtgcgacttaagacgattggagatgtactgcgctccactcaaacctgccaaaagcgcgcggagcgtgcgtgcacagagacatactgacatgcctaaaacacaaaaggaggtgcacctcaagaatgcaagccgaggctccgctggcaacaagaattacagaatgtag

SEQ ID NO: 13733 - DNA, 462 bp, Artificial Sequence
  derived and/or modified sequence
atgggaaaaatttcttctttgccaacacagctgtttaaatgttgtttttgtgattttctgaaagtcaaaatgcacactatgagctccagccatctcttttatcttgctctctgcctcctgacttttacttcgtccgcaaccgccgggcctgagactctgtgcggagccgaactcgtcgatgccctccagttcgtttgcggagatagaggattttacttcaataaaccaaccgggtatggcagcagttctaggcgcgccccccagacaggcatcgtggacgagtgttgtttcagatcctgtgacctgcggcgactcgaaatgtactgcgccccacttaaaccagccaagtccgcccgaagcgtcagagctcaaagacacacagatatgcctaagacccagaaggaagttcacctgaagaatgcatcccggggtagcgcggggaacaaaaactacaggatgtag

SEQ ID NO: 13734 - RNA, 462 nt, Artificial Sequence
  derived and/or modified sequence
auggggaagaucucaagccuaccuacccagcuguucaaguguuguuuuugcgacuuucugaagguuaagaugcacacaauguccagcucacaccuguucuaucucgcgcucuguuuacuuacauucacaucauccgcaaccgccgggccagaaacucuuuguggugccgagcuuguugacgcccugcaguucguguguggggacagaggauucuacuucaauaaacccaccggguacggaucaagcucacgucgcgcuccucagacaggaaucguagacgagugcuguuuucgaucgugcgacuuaagacgauuggagauguacugcgcuccacucaaaccugccaaaagcgcgcggagcgugcgugcacagagacauacugacaugccuaaaacacaaaaggaggugcaccucaagaaugcaagccgaggcuccgcuggcaacaagaauuacagaauguag

SEQ ID NO: 13735 - RNA, 462 nt, Artificial Sequence
  derived and/or modified sequence
augggaaaaauuucuucuuugccaacacagcuguuuaaauguuguuuuugugauuuucugaaagucaaaaugcacacuaugagcuccagccaucucuuuuaucuugcucucugccuccugacuuuuacuucguccgcaaccgccgggccugagacucugugcggagccgaacucgucgaugcccuccaguucguuugcggagauagaggauuuuacuucaauaaaccaaccggguauggcagcaguucuaggcgcgccccccagacaggcaucguggacgaguguuguuucagauccugugaccugcggcgacucgaaauguacugcgccccacuuaaaccagccaaguccgcccgaagcgucagagcucaaagacacacagauaugccuaagacccagaaggaaguucaccugaagaaugcaucccgggguagcgcggggaacaaaaacuacaggauguag

SEQ ID NO: 13736 - protein, 166 aa, Artificial Sequence
  derived and/or modified sequence
MKYTSYILAFQLCIVLGSLGCYCQDPYVKEAENLKKYFNAGHSDVADNGTLFLGILKNWKEESDRKIMQSQIVSFYFKLFKNFKDDQSIQKSVETIKEDMNVKFFNSNKKKRDDFEKLTNYSVTDLNVQRKAIHELIQVMAELSPAAKTGKRKRSQMLFRGRRASQ

SEQ ID NO: 13737 - DNA, 1218 bp, Artificial Sequence
  derived and/or modified sequence
gtgcagcacattgttctgatcatctgaagatcagctattagaagagaaagatcagttaagtcctttggacctgatcagcttgatacaagaactactgatttcaacttctttggcttaattctctcggaaacgatgaaatatacaagttatatcttggcttttcagctctgcatcgttttgggttctcttggctgttactgccaggacccatatgtaaaagaagcagaaaaccttaagaaatattttaatgcaggtcattcagatgtagcggataatggaactcttttcttaggcattttgaagaattggaaagaggagagtgacagaaaaataatgcagagccaaattgtctccttttacttcaaactttttaaaaactttaaagatgaccagagcatccaaaagagtgtggagaccatcaaggaagacatgaatgtcaagtttttcaatagcaacaaaaagaaacgagatgacttcgaaaagctgactaattattcggtaactgacttgaatgtccaacgcaaagcaatacatgaactcatccaagtgatggctgaactgtcgccagcagctaaaacagggaagcgaaaaaggagtcagatgctgtttcgaggtcgaagagcatcccagtaatggttgtcctgcctgcaatatttgaattttaaatctaaatctatttattaatatttaacattatttatatggggaatatatttttagactcatcaatcaaataagtatttataatagcaacttttgtgtaatgaaaatgaatatctattaatatatgtattatttataattcctatatcctgtgactgtctcacttaatcctttgttttctgactaattaggcaaggctatgtgattacaaggctttatctcaggggccaactaggcagccaacctaagcaagatcccatgggttgtgtgtttatttcacttgatgatacaatgaacacttataagtgaagtgatactatccagttactgccggtttgaaaatatgcctgcaatctgagccagtgctttaatggcatgtcagacagaacttgaatgtgtcaggtgaccctgatgaaaacatagcatctcaggagatttcatgcctggtgcttccaaatattgttgacaactgtgactgtacccaaatggaaagtaactcatttgttaaaattatcaatatctaatatatatgaataaagtgtaagttcacaacta

SEQ ID NO: 13738 - DNA, 501 bp, Artificial Sequence
  derived and/or modified sequence
atgaaatatacttcatacatcctggcattccaactctgcatcgttctgggctcattgggctgctattgccaggatccatacgtcaaagaggccgagaatctgaagaaatacttcaacgcaggccactcagatgtggcggataatggaacactgtttctcgggatcctgaaaaattggaaagaggagtcagataggaagatcatgcagagtcagattgtgagtttttacttcaagcttttcaaaaatttcaaggatgatcagtcaattcagaaaagcgtcgaaaccattaaggaagacatgaatgttaagtttttcaattctaataaaaaaaaacgcgatgacttcgagaagctcaccaattattcagtgaccgacttaaatgtgcagagaaaagccatacacgaactcatccaagtgatggccgaacttagcccagcggctaagaccggaaagcgcaaaagatcccagatgctttttcggggtcgccgcgctagccaatag

SEQ ID NO: 13739 - DNA, 501 bp, Artificial Sequence
  derived and/or modified sequence
atgaagtacaccagctacatcctggccttccagctgtgcatcgtgctgggcagcctgggctgctactgccaggacccctacgtgaaggaggccgagaacctgaagaagtacttcaatgccggccacagtgatgtggccgacaatggcaccctcttcctgggcatcctgaagaactggaaggaggagagtgacaggaagatcatgcagagccagatcgtgtccttctacttcaagctgttcaagaacttcaaggatgaccagagcatccagaagtctgtggagaccatcaaggaggacatgaatgtgaagttcttcaacagcaacaagaagaagagagatgactttgagaagctgaccaactacagcgtgacagacctgaatgtgcagaggaaggccatccacgagctgatccaggtgatggccgagctgagccctgctgccaagacaggcaagaggaagaggagccagatgctgttccggggccggcgggccagccagtag

SEQ ID NO: 13740 - DNA, 501 bp, Artificial Sequence
  derived and/or modified sequence
atgaagtacaccagctacatcctggccttccagctgtgcatcgtgctggggtcactcgggtgctactgccaggacccgtacgttaaagaagccgagaatcttaaaaagtactttaatgcaggccatagtgacgtagccgataacggtacactcttcctgggaatcttgaagaattggaaagaggagagtgacaggaagattatgcaatctcaaatagtgtccttttacttcaaattgttcaagaacttcaaggacgatcaaagcatacagaaatcagtagagaccataaaagaggacatgaatgttaaattctttaactccaataagaagaaacgggacgacttcgagaagctcacgaattacagtgtcacggacctgaatgttcagcgaaaagctatccatgaacttatccaagtgatggctgagctatctcccgctgccaagactggcaaaaggaaaaggagccagatgctgttccggggcagacgagctagtcagtag

SEQ ID NO: 13741 - DNA, 501 bp, Artificial Sequence
  derived and/or modified sequence
atgaagtatacaagctatattctggcctttcagctgtgtattgtgctggggtcattgggctgctactgtcaagatccttacgtgaaggaggctgagaacctgaagaaatatttcaacgctgggcacagcgatgttgccgacaacggcacgctcttcctgggaattttgaaaaactggaaggaagaatccgaccgaaagattatgcaatcacagattgtgagtttctacttcaagttgtttaaaaacttcaaagacgatcagtcaattcagaaatctgttgaaacaatcaaagaggacatgaatgtcaaattctttaattctaataaaaagaaacgggatgatttcgagaaactcacaaactattcagtgaccgacttgaacgtgcagagaaaggctatccatgagctgatccaggtcatggccgaattaagccccgcagctaaaaccggcaagcgtaagagaagccagatgctattcagaggcagaagggcgtctcagtag

SEQ ID NO: 13742 - DNA, 501 bp, Artificial Sequence
  derived and/or modified sequence
atgaagtacaccagctacatcctggccttccagctgtgcatcgtgctgggcagcctgggctgctactgccaggacccctacgtgaaggaggccgagaacctgaagaagtacttcaacgccggccacagcgacgtggccgacaacggcaccctgttcctgggcatcctgaagaactggaaggaggagagcgacagaaagatcatgcagagccagatcgtgagcttctacttcaagctgttcaagaacttcaaggacgaccagagcatccagaagagcgtggagaccatcaaggaggacatgaacgtgaagttcttcaacagcaacaagaagaagagagacgacttcgagaagctgaccaactacagcgtgaccgacctgaacgtgcagagaaaggccatccacgagctgatccaggtgatggccgagctgagccccgccgccaagaccggcaagagaaagagaagccagatgctgttcagaggcagaagagccagccagtag

SEQ ID NO: 13743 - protein, 1434 aa, Artificial Sequence
  derived and/or modified sequence
MEDHMFGVQQIQPNVISVRLFKRKVGGLGFLVKERVSKPPVIISDLIRGGAAEQSGLIQAGDIILAVNGRPLVDLSYDSALEVLRGIASETHVVLILRGPEGFTTHLETTFTGDGTPKTIRVTQPLGPPTKAVDLSHQPPAGKEQPLAVDGASGPGNGPQHAYDDGQEAGSLPHANGLAPRPPGQDPAKKATRVSLQGRGENNELLKEIEPVLSLLTSGSRGVKGGAPAKAEMKDMGIQVDRDLDGKSHKPLPLGVENDRVFNDLWGKGNVPVVLNNPYSEKEQPPTSGKQSPTKNGSPSKCPRFLKVKNWETEVVLTDTLHLKSTLETGCTEYICMGSIMHPSQHARRPEDVRTKGQLFPLAKEFIDQYYSSIKRFGSKAHMERLEEVNKEIDTTSTYQLKDTELIYGAKHAWRNASRCVGRIQWSKLQVFDARDCTTAHGMFNYICNHVKYATNKGNLRSAITIFPQRTDGKHDFRVWNSQLIRYAGYKQPDGSTLGDPANVQFTEICIQQGWKPPRGRFDVLPLLLQANGNDPELFQIPPELVLEVPIRHPKFEWFKDLGLKWYGLPAVSNMLLEIGGLEFSACPFSGWYMGTEIGVRDYCDNSRYNILEEVAKKMNLDMRKTSSLWKDQALVEINIAVLYSFQSDKVTIVDHHSATESFIKHMENEYRCRGGCPADWVWIVPPMSGSITPVFHQEMLNYRLTPSFEYQPDPWNTHVWKGTNGTPTKRRAIGFKKLAEAVKFSAKLMGQAMAKRVKATILYATETGKSQAYAKTLCEIFKHAFDAKVMSMEEYDIVHLEHETLVLVVTSTFGNGDPPENGEKFGCALMEMRHPNSVQEERKSYKVRFNSVSSYSDSQKSSGDGPDLRDNFESAGPLANVRFSVFGLGSRAYPHFCAFGHAVDTLLEELGGERILKMREGDELCGQEEAFRTWAKKVFKAACDVFCVGDDVNIEKANNSLISNDRSWKRNKFRLTFVAEAPELTQGLSNVHKKRVSAARLLSRQNLQSPKSSRSTIFVRLHTNGSQELQYQPGDHLGVFPGNHEDLVNALIERLEDAPPVNQMVKVELLEERNTALGVISNWTDELRLPPCTIFQAFKYYLDITTPPTPLQLQQFASLATSEKEKQRLLVLSKGLQEYEEWKWGKNPTIVEVLEEFPSIQMPATLLLTQLSLLQPRYYSISSSPDMYPDEVHLTVAIVSYRTRDGEGPIHHGVCSSWLNRIQADELVPCFVRGAPSFHLPRNPQVPCILVGPGTGIAPFRSFWQQRQFDIQHKGMNPCPMVLVFGCRQSKIDHIYREETLQAKNKGVFRELYTAYSREPDKPKKYVQDILQEQLAESVYRALKEQGGHIYVCGDVTMAADVLKAIQRIMTQQGKLSAEDAGVFISRMRDDNRYHEDIFGVTLRTYEVTNRLRSESIAFIEESKKDTDEVFSS

SEQ ID NO: 13744 - protein, 407 aa, Artificial Sequence
  derived and/or modified sequence
MEDHMFGVQQIQPNVISVRLFKRKVGGLGFLVKERVSKPPVIISDLIRGGAAEQSGLIQAGDIILAVNGRPLVDLSYDSALEVLRGIASETHVVLILRGPEGFTTHLETTFTGDGTPKTIRVTQPLGPPTKAVDLSHQPPAGKEQPLAVDGASGPGNGPQHAYDDGQEAGSLPHANGLAPRPPGQDPAKKATRVSLQGRGENNELLKEIEPVLSLLTSGSRGVKGGAPAKAEMKDMGIQVDRDLDGKSHKPLPLGVENDRVFNDLWGKGNVPVVLNNPYSEKEQMRKLRITEGFGAQRGSHNHPPPQENSPPQRMAAPPSVHASSRSRTGRLRWFSLTPSTLRAHWKRDALSTSAWAPSCILLSMQGGLKTSAQKDSSSLSPKSLLINTIHQLKDLAPKPTWKGWKR

SEQ ID NO: 13745 - protein, 1330 aa, Artificial Sequence
  derived and/or modified sequence
MEDHMFGVQQIQPNVISVRLFKRKVGGLGFLVKERVSKPPVIISDLIRGGAAEQSGLIQAGDIILAVNGRPLVDLSYDSALEVLRGIASETHVVLILRGPEGFTTHLETTFTGDGTPKTIRVTQPLGPPTKAVDLSHQPPAGKEQPLAVDGASGPGNGPQHAYDDGQEAGSLPHANGLAPRPPGQDPAKKATRVSLQGRGENNELLKEIEPVLSLLTSGSRGVKGGAPAKAEMKDMGIQVDRDLDGKSHKPLPLGVENDRVFNDLWGKGNVPVVLNNPYSEKEQPPTSGKQSPTKNGSPSKCPRFLKVKNWETEVVLTDTLHLKSTLETGCTEYICMGSIMHPSQHARRPEDVRTKGQLFPLAKEFIDQYYSSIKRFGSKAHMERLEEVNKEIDTTSTYQLKDTELIYGAKHAWRNASRCVGRIQWSKLQVFDARDCTTAHGMFNYICNHVKYATNKGNLRSAITIFPQRTDGKHDFRVWNSQLIRYAGYKQPDGSTLGDPANVQFTEEVAKKMNLDMRKTSSLWKDQALVEINIAVLYSFQSDKVTIVDHHSATESFIKHMENEYRCRGGCPADWVWIVPPMSGSITPVFHQEMLNYRLTPSFEYQPDPWNTHVWKGTNGTPTKRRAIGFKKLAEAVKFSAKLMGQAMAKRVKATILYATETGKSQAYAKTLCEIFKHAFDAKVMSMEEYDIVHLEHETLVLVVTSTFGNGDPPENGEKFGCALMEMRHPNSVQEERKSYKVRFNSVSSYSDSQKSSGDGPDLRDNFESAGPLANVRFSVFGLGSRAYPHFCAFGHAVDTLLEELGGERILKMREGDELCGQEEAFRTWAKKVFKAACDVFCVGDDVNIEKANNSLISNDRSWKRNKFRLTFVAEAPELTQGLSNVHKKRVSAARLLSRQNLQSPKSSRSTIFVRLHTNGSQELQYQPGDHLGVFPGNHEDLVNALIERLEDAPPVNQMVKVELLEERNTALGVISNWTDELRLPPCTIFQAFKYYLDITTPPTPLQLQQFASLATSEKEKQRLLVLSKGLQEYEEWKWGKNPTIVEVLEEFPSIQMPATLLLTQLSLLQPRYYSISSSPDMYPDEVHLTVAIVSYRTRDGEGPIHHGVCSSWLNRIQADELVPCFVRGAPSFHLPRNPQVPCILVGPGTGIAPFRSFWQQRQFDIQHKGMNPCPMVLVFGCRQSKIDHIYREETLQAKNKGVFRELYTAYSREPDKPKKYVQDILQEQLAESVYRALKEQGGHIYVCGDVTMAADVLKAIQRIMTQQGKLSAEDAGVFISRMRDDNRYHEDIFGVTLRTYEVTNRLRSESIAFIEESKKDTDDQVFKT

SEQ ID NO: 13746 - protein, 1206 aa, Artificial Sequence
  derived and/or modified sequence
MEDHMFGVQQIQPNVISVRLFKRKVGGLGFLVKERVSKPPVIISDLIRGGAAEQSGLIQAGDIILAVNGRPLVDLSYDSALEVLRGIASETHVVLILRGPEGFTTHLETTFTGDGTPKTIRVTQPLGPPTKAVDLSHQPPAGKEQPLAVDGASGPGNGPQHAYDDGQEAGSLPHANGLAPRPPGQDPAKKATRVSLQGRGENNELLKEIEPVLSLLTSGSRGVKGGAPAKAEMKDMGIQVDRDLDGKSHKPLPLGVENDRVFNDLWGKGNVPVVLNNPYSEKEQPPTSGKQSPTKNGSPSKCPRFLKVKNWETEVVLTDTLHLKSTLETGCTEYICMGSIMHPSQHARRPEDVRTKGQLFPLAKEFIDQYYSSIKRFGSKAHMERLEEVNKEIDTTSTYQLKDTELIYGAKHAWRNASRCVGRIQWSKLQVFDARDCTTAHGMFNYICNHVKYATNKGNLRSAITIFPQRTDGKHDFRVWNSQLIRYAGYKQPDGSTLGDPANVQFTEICIQQGWKPPRGRFDVLPLLLQANGNDPELFQIPPELVLEVPIRHPKFEWFKDLGLKWYGLPAVSNMLLEIGGLEFSACPFSGWYMGTEIGVRDYCDNSRYNILEEVAKKMNLDMRKTSSLWKDQALVEINIAVLYSFQSDKVTIVDHHSATESFIKHMENEYRCRGGCPADWVWIVPPMSGSITPVFHQEMLNYRLTPSFEYQPDPWNTHVWKGTNGTPTKRRAIGFKKLAEAVKFSAKLMGQAMAKRVKATILYATETGKSQAYAKTLCEIFKHAFDAKVMSMEEYDIVHLEHETLVLVVTSTFGNGDPPENGEKFGCALMEMRHPNSVQEERKSYKVRFNSVSSYSDSQKSSGDGPDLRDNFESAGPLANVRFSVFGLGSRAYPHFCAFGHAVDTLLEELGGERILKMREGDELCGQEEAFRTWAKKVFKAACDVFCVGDDVNIEKANNSLISNDRSWKRNKFRLTFVAEAPELTQGLSNVHKKRVSAARLLSRQNLQSPKSSRSTIFVRLHTNGSQELQYQPGDHLGVFPGNHEDLVNALIERLEDAPPVNQMVKVELLEERNTALGVISNWTDELRLPPCTIFQAFKYYLDITTPPTPLQLQQFASLATSEKEKQRLLVLSKGLQEYEEWKWGKNPTIVEVLEEFPSIQMPATLLLTQLSLLQPRYYSISSSPHTHTLSETRPSPLPLSSQCC

SEQ ID NO: 13747 - protein, 1098 aa, Artificial Sequence
  derived and/or modified sequence
MGSIMHPSQHARRPEDVRTKGQLFPLAKEFIDQYYSSIKRFGSKAHMERLEEVNKEIDTTSTYQLKDTELIYGAKHAWRNASRCVGRIQWSKLQVFDARDCTTAHGMFNYICNHVKYATNKGNLRSAITIFPQRTDGKHDFRVWNSQLIRYAGYKQPDGSTLGDPANVQFTEICIQQGWKPPRGRFDVLPLLLQANGNDPELFQIPPELVLEVPIRHPKFEWFKDLGLKWYGLPAVSNMLLEIGGLEFSACPFSGWYMGTEIGVRDYCDNSRYNILEEVAKKMNLDMRKTSSLWKDQALVEINIAVLYSFQSDKVTIVDHHSATESFIKHMENEYRCRGGCPADWVWIVPPMSGSITPVFHQEMLNYRLTPSFEYQPDPWNTHVWKGTNGTPTKRRAIGFKKLAEAVKFSAKLMGQAMAKRVKATILYATETGKSQAYAKTLCEIFKHAFDAKVMSMEEYDIVHLEHETLVLVVTSTFGNGDPPENGEKFGCALMEMRHPNSVQEERKSYKVRFNSVSSYSDSQKSSGDGPDLRDNFESAGPLANVRFSVFGLGSRAYPHFCAFGHAVDTLLEELGGERILKMREGDELCGQEEAFRTWAKKVFKAACDVFCVGDDVNIEKANNSLISNDRSWKRNKFRLTFVAEAPELTQGLSNVHKKRVSAARLLSRQNLQSPKSSRSTIFVRLHTNGSQELQYQPGDHLGVFPGNHEDLVNALIERLEDAPPVNQMVKVELLEERNTALGVISNWTDELRLPPCTIFQAFKYYLDITTPPTPLQLQQFASLATSEKEKQRLLVLSKGLQEYEEWKWGKNPTIVEVLEEFPSIQMPATLLLTQLSLLQPRYYSISSSPDMYPDEVHLTVAIVSYRTRDGEGPIHHGVCSSWLNRIQADELVPCFVRGAPSFHLPRNPQVPCILVGPGTGIAPFRSFWQQRQFDIQHKGMNPCPMVLVFGCRQSKIDHIYREETLQAKNKGVFRELYTAYSREPDKPKKYVQDILQEQLAESVYRALKEQGGHIYVCGDVTMAADVLKAIQRIMTQQGKLSAEDAGVFISRMRDDNRYHEDIFGVTLRTYEVTNRLRSESIAFIEESKKDTDEVFSS

SEQ ID NO: 13748 - DNA, 4305 bp, Artificial Sequence
  derived and/or modified sequence
atggaggaccacatgttcggcgtccaacaaatacaacccaatgtcatatcagtgcggctgtttaaacgaaaagtgggaggccttggatttctagtcaaagaaagggttagtaagccacccgttattatctccgatctgattagaggaggagcagccgaacaatctggcctgatccaggcgggggacataatcctggctgtgaacggccgccctctcgtggatctgagttatgattcagccctggaggtgctgaggggcattgcctccgagacccacgtcgttctgattctacggggtcccgaggggtttactacccacctggagacaaccttcaccggcgatggaacacccaaaaccatccgcgtgacccagcccctgggcccaccaaccaaggcagtggaccttagccatcaaccccctgcgggaaaagagcaacccctggcagtggatggcgcctcgggtcctggaaacggcccgcagcacgcctacgatgacggacaggaagctgggagcctgcctcacgctaacgggcttgcaccccgcccaccaggacaagacccagccaagaaggcaacacgagtgtccctccaaggaagaggggaaaacaatgaactgctcaaggaaattgagccagtcttgtcactgttgacgagcgggtcccggggagtgaaaggtggggctccagccaaggccgagatgaaagatatgggaattcaagtggatcgagaccttgacgggaaaagccacaaacctttgcctctcggcgtggaaaatgatagggtctttaacgacctgtggggaaagggtaacgttccggttgtgctgaacaatccctacagcgaaaaagagcagcctcccacgagcgggaagcagtcgcccaccaaaaacgggtcccccagtaagtgtccgaggtttttgaaggtgaaaaattgggagacagaagtcgtcttgacagacaccctgcatctgaagtctactctggagacaggttgcaccgagtatatctgcatgggctctatcatgcacccatcacagcatgcccggagacctgaagatgtgcggacaaagggacagttattccctctcgccaaagaatttatcgaccagtactatagctcaatcaagaggtttggcagcaaggctcacatggagcgcctggaagaagtgaataaggagatcgacacaacttcaacataccagcttaaggatacagagctgatttacggggctaaacatgcctggcgaaatgccagtcgatgtgttggccggatccagtggagcaaattacaagttttcgacgcacgggattgtacaaccgcccacggaatgtttaactacatatgcaatcatgtgaagtacgcaacgaacaaggggaatctgcgatccgccattactatatttccacagcggaccgacgggaagcacgacttcagggtgtggaacagccagctgatcaggtacgctgggtacaagcagccggacggatctactttgggggaccccgccaatgtgcagttcacagagatctgtattcagcaagggtggaagccccctaggggacggtttgacgtgctgcccctgctgcttcaggctaatggtaatgaccccgaactgtttcaaattcccccggaattggtgctcgaagtgcccattagacaccctaagttcgagtggtttaaagacttaggcctaaaatggtatggattgcctgcggtgtcgaacatgctcctggaaataggagggctagaattctctgcgtgtccttttagtggctggtatatgggcacagaaattggcgtgcgcgattactgtgataacagcaggtacaatatactggaagaagttgcaaaaaagatgaacctggacatgcggaaaacgtcttcattgtggaaggaccaagccctggtcgaaatcaacattgcggtgctgtactcattccaaagcgataaggtgacaattgtagatcatcatagtgccactgagagcttcatcaagcatatggagaatgagtacaggtgcaggggaggatgtccagccgattgggtctggatcgtgcctcccatgagcggaagtatcaccccagtttttcaccaagaaatgctgaactatagactgacccctagctttgaataccagcctgacccctggaatacccacgtgtggaaaggcaccaatggaacgcctactaaacgccgcgccataggctttaagaagttagctgaggctgtgaaattctccgcaaagctgatgggacaggctatggcgaagagggtcaaggcaaccatcctctacgccaccgagactgggaagtcgcaggcctacgccaagacgctctgtgagatcttcaagcacgcgttcgatgctaaagttatgtctatggaagaatacgacatagtgcatttggaacacgagacccttgttttagtcgtaacttctacatttggcaatggcgatccacctgagaacggagaaaagtttggatgtgctttaatggagatgagacaccctaacagcgtccaagaagagcgaaagtcatacaaagttagattcaattcagtgagcagttattcagactcccagaaatcaagcggagatggaccagatctgagggacaacttcgagagcgcaggtccacttgcaaacgtgaggttcagcgtttttgggctcggaagtcgtgcttacccgcatttttgtgcctttggacacgccgtggacacgctcttggaagagctgggaggggagagaattctgaagatgcgggagggagacgaattgtgtggacaggaagaggcttttcggacttgggctaagaaggtgttcaaagctgcgtgcgacgtcttctgcgtgggggatgacgtaaacatcgagaaagcaaacaacagtctcatttcgaacgacagatcctggaaacgtaacaaattccgcttaacgtttgttgccgaagccccagaactcacacaaggtttatccaatgttcataaaaaacgcgtttctgcagctagactactgagtaggcagaaccttcagtccccaaaatcctctagatccactatctttgtgcgcctccatacgaacggcagccaagagctgcagtatcagcctggagatcatctgggcgtcttcccaggaaatcacgaggacctcgtgaacgccctcatagagaggctggaagacgcccccccggtgaatcaaatggtcaaggtggaactcctggaggaaagaaatacagcactaggcgtgatttcaaactggactgacgaactgcgtttacccccttgcactatattccaggccttcaagtactatcttgatatcaccacccctccaactccattgcaactgcagcagttcgctagcttggctacatctgagaaggagaaacaacgtcttttagtgctctcaaaaggactgcaggagtacgaagagtggaaatggggcaagaacccaactatcgtcgaggtactcgaagagtttccttctatacagatgcccgcaactttactgctaacgcaactatccctgctacagccacgctattacagtatcagcagcagcccagatatgtatccagacgaggtccatctgacggttgctattgtcagctatcgtaccagagatggcgaagggccgattcatcacggcgtttgctcatcgtggctgaaccggatacaggcagatgagcttgtgccatgttttgtgcgtggggctccctcattccacttgcctaggaacccacaggtgccttgtattctggtcgggccaggtaccggcatcgccccattcaggagtttttggcagcagagacagtttgacatacagcacaaggggatgaatccatgccccatggtgctggtgttcggttgcagacagtctaagatcgatcatatctaccgcgaggaaacgttgcaggccaaaaacaagggtgtcttccgcgagctctatactgcatactccagagagcctgacaaaccaaagaaatatgtacaggacatcctccaagagcaactcgccgaatcagtgtaccgagcccttaaggagcagggcggacacatatacgtatgcggagatgttactatggccgctgacgttctgaaggcaattcagcgcattatgactcagcaaggaaagctctcggctgaggacgccggcgtgttcatttccagaatgcgggacgataatcggtaccatgaggatatcttcggggtgacactccgcacctacgaagtcactaatcggctgcggagcgaatctattgcattcattgaagagtcaaagaaggataccgacgaggtattctcaagctag

SEQ ID NO: 13749 - DNA, 1224 bp, Artificial Sequence
  derived and/or modified sequence
atggaagaccacatgtttggcgtgcagcagatacagcccaatgtcatttctgtgcgcctcttcaagaggaaagttggtggcctcgggtttctggtgaaggagcgagtcagtaaacccccagtcataatcagcgatttgattagggggggagcagccgaacaaagcggcctgatccaagctggggacattatcctggctgtcaatgggaggccattagtggacctgtcatacgatagcgctttggaggtgctgagagggatcgcgtcggaaacccacgttgtcctcatcctgagaggccccgagggcttcacgactcatttggagaccacctttaccggcgacggaacacccaagacaatacgtgtcacccagcctctgggaccccctacaaaggctgtggacctctcacatcagccacccgcaggaaaggaacaaccactcgcagtggacggggcctccggacccgggaatgggccacagcacgcatatgatgacggccaagaggcaggcagtctgccccatgctaacggactcgccccacgacctcccggccaggatccagccaaaaaggccaccagggtgtccctacaagggcggggggagaataatgaattgctcaaggagatcgagccggttctttccctccttacaagcggcagccggggagttaagggcggcgcaccagcaaaggcagagatgaaggacatgggcatccaggtggacagggacctggatggcaaatctcacaaacccctccccttgggtgtggaaaacgatcgggtttttaacgacctatggggtaaggggaatgtccctgtggttctgaacaacccttacagcgaaaaagaacagatgcgcaagctgaggatcaccgagggttttggcgcccagagaggttctcacaaccatccgccaccacaggagaatagtccgccgcaaaggatggcggctccacccagcgtacatgctagctcaaggagccggacgggcagactgcgttggtttagtttgactccctccaccttgagggcacattggaagcgggacgcactaagtacaagcgcctgggctccctcctgcatcttgctttccatgcagggcggactcaagacaagcgcgcagaaggacagctctagcctctcccctaaatcgttgctcatcaacactatacatcagctgaaagatctggccccgaaaccgacctggaaggggtggaaacgctag

SEQ ID NO: 13750 - DNA, 3621 bp, Artificial Sequence
  derived and/or modified sequence
atggaagaccacatgttcggagtccagcagattcagccaaatgtaattagtgtcagactattcaagcggaaagtcgggggcctgggctttctcgtgaaggagcgggtctcaaaaccacctgtcatcatctctgacctcatcaggggaggagctgccgaacagagtggcctaatccaggccggtgacattatcctagcagtgaatggtcgtcccctcgttgatctatcttacgactcagccctggaggtacttagaggtatcgcgtcagaaactcacgtagtcctgatcctgaggggtcctgaggggtttaccacccacctcgaaactaccttcactggtgacggaacacccaaaacgatccgagttacccagccgctgggtcctccgacgaaggccgtggacttgagtcaccaacctcctgccgggaaggagcagcccctcgctgttgacggagcgagcggtcccggcaacggcccccagcatgcctatgacgatggtcaggaggcgggttctctccctcatgctaacggcctcgcccctcgcccacctggtcaagacccagccaaaaaggctacaagagtgtcgttgcagggccggggggagaataatgagttgttgaaggagatcgaacctgtgctgtcacttctcaccagcggtagccgcggagtcaaaggcggcgccccggcaaaggctgagatgaaggacatgggcatccaagtggaccgagatttagacggaaagtcacataaacctctacctctgggggttgaaaatgaccgagtctttaacgacctttggggcaagggcaatgtgccagtcgtactcaataatccctatagtgagaaggagcagcctccaacttctggaaaacagtcccctacaaaaaacggttcccccagcaagtgccccagattcctcaaagttaagaactgggagacggaggtggtactcacagacacattgcatttaaagtccaccctagagacagggtgtacggagtacatctgcatgggctccatcatgcacccctcccaacatgctcggaggcctgaagacgtgcgaacaaagggccaattgtttcctctggccaaagagttcatcgatcaatattatagtagcataaaacgtttcggctctaaggcccacatggaacgacttgaggaggtgaacaaagagattgataccaccagtacgtaccagctaaaagacacggagcttatttacggggccaaacatgcatggcgcaatgcctcaagatgcgtcggaagaatccagtggtctaagttacaggtttttgatgcaagggactgcacaactgcccacggtatgtttaattacatctgcaaccatgtgaaatatgccaccaataagggcaatctgcgctccgcaattactatctttccccagaggacggacgggaagcacgactttagagtttggaacagccagcttattcgctatgcgggctataaacagcccgacggctcaactttgggtgaccctgccaacgttcagtttaccgaaatatgtatccagcaaggctggaaaccgcctagagggagatttgacgtgttgccccttcttctccaagctaacggcaatgatcctgagctgtttcaaatccctcctgaactggtactggaagtgcctatccgccacccaaaattcgaatggtttaaagatctggggctgaagtggtacggactcccggctgtgagcaatatgcttctggaaattgggggactcgagttcagcgcgtgtcctttttccggatggtacatgggtaccgaaatcggcgtgcgagattactgtgataactcgaggtacaacatcttggaggaagtcgctaaaaagatgaacttggatatgcgaaaaacctccagtttgtggaaggaccaagccctggtggagatcaatatcgccgtcctgtatagctttcagtctgacaaagttaccattgtcgatcaccactctgccaccgagtcatttatcaagcacatggagaacgagtataggtgccgcgggggatgccccgccgactgggtgtggattgtcccccccatgagcggttccattactccagtgtttcatcaggaaatgctaaactatcggctgaccccctcgtttgaataccagcctgatccttggaatactcacgtgtggaaaggcaccaatggtacgcccacaaaacggcgcgccattgggttcaagaagctggctgaagcagtcaagttttcagccaagttgatgggccaggcgatggctaagcgtgtgaaagcgacaatcctgtatgccactgagactggaaagagccaggcctatgcaaagaccctatgcgaaatatttaaacacgctttcgatgcgaaggtcatgtctatggaagaatatgatatcgtgcacctcgagcatgagaccctcgtgctggtggttacaagcacattcggcaatggtgatccccccgaaaacggagaaaagtttggatgcgccctgatggagatgcggcacccgaattccgtgcaggaagaacgcaagtcatataaagtgcgctttaattctgtctcaagctactcagattcccagaaaagttcaggggacggccccgacttacgagacaatttcgaaagcgctgggcccctggcaaacgtgagattcagtgtgtttggacttggctctagggcttatccccatttttgcgcattcggtcatgctgtcgacacacttttggaggaactgggtggggaacgaatcctgaagatgcgggagggggacgaactgtgcggccaggaagaagcatttcgcacatgggccaaaaaagtctttaaagccgcttgtgatgtattctgcgtgggcgatgatgtgaacatcgagaaggccaataattcacttatctcaaacgacaggtcctggaaacgaaacaagtttcgactgacatttgtcgccgaggcccctgagctgacccagggcctcagcaatgtccacaagaagcgggtcagcgccgccagattactgagcaggcagaacctgcagtcgccaaaatcctcccgcagtaccatttttgtgaggctgcacaccaacggcagtcaagagctccaatatcagcctggcgatcatttgggagtttttcccgggaatcacgaagatttagttaatgcactgattgagcgccttgaggacgccccacctgtgaaccaaatggtgaaagttgaactgcttgaggaacgcaacacagcccttggcgtgattagcaactggacagatgaacttagactcccaccttgtaccatctttcaagcttttaagtactacctcgatatcactacccctccaacgcccctgcagttacagcagttcgcatctcttgccacatctgagaaggaaaaacagcggcttttggtattatctaaggggcttcaagaatacgaagaatggaagtgggggaagaaccctaccatcgtggaagtgctggaggaattcccctcgatacaaatgcccgctactttgctccttacccagctgtcactactgcaacctcgatattattcgatcagtagctcacctcatacacacacgttgagcgaaaccaggccatccccgttgcccctttcatcacaatgctgttag

SEQ ID NO: 13751 - DNA, 4305 bp, Artificial Sequence
  derived and/or modified sequence
atggaggaccacatgtttggagtgcagcagatccagcccaacgtcatctctgtgcggctcttcaagaggaaggtgggcggcctgggcttcctggtgaaggagcgggtgtccaagccccctgtgatcatcagtgacctgatccggggcggcgctgctgagcagagcggcctcatccaggccggggacatcatcctggccgtgaatggccggcccctggtggacctgtcctatgattctgccctggaggtgctgcggggcatcgccagcgagacccacgtggtgctgatcctgcggggccctgagggcttcaccacccacctggagaccaccttcaccggagatggcacccccaagaccatccgggtgacccagcccctgggcccccccaccaaggctgtggacctgagccaccagcccccagctgggaaggagcagcccctggccgtggatggagccagcggccctggaaatggcccccagcacgcctatgatgatggccaggaggccggcagcctgccccacgccaacggcctggccccccggcccccaggccaggaccctgccaagaaggccaccagggtgtccctgcagggcagaggagaaaataatgagctgctgaaggagattgagcctgtgctgagcctgctgaccagcggcagccggggcgtgaagggcggggccccagccaaggccgagatgaaggacatgggcatccaggtggaccgggacctggatggcaagagccacaagcccctgcccctgggcgtggagaatgacagagtcttcaatgacctgtggggcaaaggaaatgtgcctgtggtgctgaacaacccctacagcgagaaggagcagccccccaccagcggcaagcagagccccaccaagaatggcagccccagcaaatgtccccgcttcctgaaggtgaagaactgggagacagaggtggtgctgacagacaccctgcacctgaagagcaccctggagaccggctgcacagagtacatctgcatgggcagcatcatgcaccccagccagcacgcccggcggccagaagatgtgaggaccaagggccagctgttccccctggccaaggagttcatcgaccagtactacagcagcatcaagagatttggcagcaaggcccacatggagcggctggaggaggtgaacaaggagattgacaccaccagcacctaccagctgaaggacacagagctgatctacggggccaagcacgcctggagaaatgccagccgctgtgtgggccgcatccagtggagcaagctgcaggtgtttgatgcccgggactgcaccacagcccacggcatgttcaactacatctgcaaccacgtgaagtatgccaccaacaagggcaacctgcggagcgccatcaccatcttcccccagaggacagatggcaagcatgacttccgggtgtggaacagccagctgatccgctatgccggctacaagcagccagatggcagcaccctgggggaccctgccaacgtgcagttcacagagatctgcatccagcagggctggaagccaccccggggccgctttgatgtgctgcccctgctgctgcaggccaatggaaatgaccctgagctgttccagatccccccagagctggtgctggaggtgcccatccgccaccccaagtttgagtggttcaaggacctgggcctgaagtggtacggcctgcctgctgtgagcaacatgctgctggagattggaggcctggagttcagcgcctgccccttcagcggctggtacatgggcacagaaattggagtgcgggactactgtgacaacagccgctacaacatcctggaggaggtggccaagaagatgaacctggacatgaggaagaccagcagcctgtggaaggaccaggccctggtggagatcaacattgctgtgctgtacagcttccagagcgacaaggtgaccatcgtggaccaccacagcgccacagagagcttcatcaagcacatggagaatgagtaccgctgccggggcggctgcccagctgactgggtgtggatcgtgccccccatgagcggcagcatcacccctgtgttccaccaggagatgctgaactaccgcctgacccccagctttgagtaccagcctgacccctggaacacccacgtgtggaagggcaccaacggcacccccaccaagagaagagccatcggcttcaagaagctggccgaggccgtgaagttcagcgccaagctgatgggccaggccatggccaagagggtgaaggccaccatcctgtatgccacagagaccgggaagagccaggcctatgccaagaccctgtgtgagatcttcaagcacgcctttgatgccaaggtgatgtccatggaggagtatgacatcgtgcacctggagcacgagaccctggtgctggtggtgaccagcacctttggaaatggagaccccccagaaaatggagagaagtttggctgtgccctgatggagatgaggcaccccaacagcgtgcaggaggagaggaagagctacaaggtgcgcttcaacagcgtgtcctcctacagcgacagccagaagagcagtggagatggccctgacctgcgggacaactttgaatctgctggccccctggccaacgtgcgcttctctgtgtttggcctgggcagccgggcctacccccacttctgtgccttcggccatgctgtggacaccctgctggaggagctgggcggggagcgcatcctgaagatgagagaaggagatgagctgtgtggccaggaggaggccttccgcacctgggccaagaaggtgttcaaggccgcctgtgatgtgttctgtgtgggagatgatgtgaacatcgagaaggccaacaacagcctcatcagcaatgaccgctcctggaagaggaacaagttccggctgacctttgtggccgaggcccctgagctgacccagggcctgagcaatgtgcacaagaagagggtgtctgctgcccggctgctgagccggcagaacctgcagagccccaagagcagccgcagcaccatctttgtgcggctgcacaccaacggcagccaggagctgcagtaccagcccggggaccacctgggcgtcttccctggcaaccacgaggacctggtgaatgccctgattgagcggctggaggatgcccctcctgtgaaccagatggtgaaggtggagctgctggaggagaggaacacagccctgggcgtcatcagcaactggacagatgagctgcggctgcccccctgcaccatcttccaggccttcaagtactacctggacatcaccaccccacccacccccctgcagctgcagcagtttgccagcctggccaccagcgagaaggagaagcagaggctgctggtgctgagcaagggcctgcaggagtatgaggagtggaagtggggcaagaaccccaccatcgtggaggtgctggaggagttccccagcatccagatgcctgccaccctgctgctgacccagctgagcctgctgcagccccgctactacagcatcagcagcagcccagacatgtacccagatgaggtgcacctgactgtggccatcgtgtcctaccgcaccagagatggagagggccccatccaccacggcgtgtgcagctcctggctgaaccgcatccaggctgatgagctggtgccctgctttgtgcggggggcccccagcttccacctgcccaggaacccccaggtgccctgcatcctggtgggccctggcaccggcatcgcccccttccgctccttctggcagcagaggcagtttgacatccagcacaagggcatgaacccctgccccatggtgctggtgtttggctgccggcagagcaagattgaccacatctaccgggaggagaccctgcaggccaagaacaagggcgtcttccgggagctgtacacagcctacagccgggagccagacaagcccaagaagtatgtgcaggacatcctgcaggagcagctggccgagagcgtgtaccgggccctgaaggagcagggcggccacatctacgtgtgtggagatgtgaccatggctgctgatgtgctgaaggccatccagaggatcatgacccagcagggcaagctgtctgcagaagatgctggggtcttcatcagcaggatgagagatgacaaccgctaccacgaggacatcttcggcgtgaccctgcggacctatgaggtgaccaaccggctgcggtctgagagcatcgccttcatcgaggagagcaagaaggacacagatgaggtgttcagcagctag

SEQ ID NO: 13752 - DNA, 1224 bp, Artificial Sequence
  derived and/or modified sequence
atggaggaccacatgtttggagtgcagcagatccagcccaacgtcatctctgtgcggctcttcaagaggaaggtgggcggcctgggcttcctggtgaaggagcgggtgtccaagccccctgtgatcatcagtgacctgatccggggcggcgctgctgagcagagcggcctcatccaggccggggacatcatcctggccgtgaatggccggcccctggtggacctgtcctatgattctgccctggaggtgctgcggggcatcgccagcgagacccacgtggtgctgatcctgcggggccctgagggcttcaccacccacctggagaccaccttcaccggagatggcacccccaagaccatccgggtgacccagcccctgggcccccccaccaaggctgtggacctgagccaccagcccccagctgggaaggagcagcccctggccgtggatggagccagcggccctggaaatggcccccagcacgcctatgatgatggccaggaggccggcagcctgccccacgccaacggcctggccccccggcccccaggccaggaccctgccaagaaggccaccagggtgtccctgcagggcagaggagaaaataatgagctgctgaaggagattgagcctgtgctgagcctgctgaccagcggcagccggggcgtgaagggcggggccccagccaaggccgagatgaaggacatgggcatccaggtggaccgggacctggatggcaagagccacaagcccctgcccctgggcgtggagaatgacagagtcttcaatgacctgtggggcaaaggaaatgtgcctgtggtgctgaacaacccctacagcgagaaggagcagatgaggaagctgcgcatcacagagggctttggagcccagaggggcagccacaaccaccccccaccccaggagaacagccccccccagaggatggccgccccacccagcgtgcacgccagcagccgcagcaggacaggccgcctgcgctggttcagcctgacccccagcaccctgcgggcccactggaagagagatgccctgagcaccagcgcctgggcccccagctgcatcctgctgtccatgcagggcggcctgaagaccagcgcccagaaggacagcagcagcctgagccccaagagcctgctgatcaacaccatccaccagctgaaggacctggcccccaagcccacctggaagggctggaagaggtag

SEQ ID NO: 13753 - DNA, 3621 bp, Artificial Sequence
  derived and/or modified sequence
atggaggaccacatgtttggagtgcagcagatccagcccaacgtcatctctgtgcggctcttcaagaggaaggtgggcggcctgggcttcctggtgaaggagcgggtgtccaagccccctgtgatcatcagtgacctgatccggggcggcgctgctgagcagagcggcctcatccaggccggggacatcatcctggccgtgaatggccggcccctggtggacctgtcctatgattctgccctggaggtgctgcggggcatcgccagcgagacccacgtggtgctgatcctgcggggccctgagggcttcaccacccacctggagaccaccttcaccggagatggcacccccaagaccatccgggtgacccagcccctgggcccccccaccaaggctgtggacctgagccaccagcccccagctgggaaggagcagcccctggccgtggatggagccagcggccctggaaatggcccccagcacgcctatgatgatggccaggaggccggcagcctgccccacgccaacggcctggccccccggcccccaggccaggaccctgccaagaaggccaccagggtgtccctgcagggcagaggagaaaataatgagctgctgaaggagattgagcctgtgctgagcctgctgaccagcggcagccggggcgtgaagggcggggccccagccaaggccgagatgaaggacatgggcatccaggtggaccgggacctggatggcaagagccacaagcccctgcccctgggcgtggagaatgacagagtcttcaatgacctgtggggcaaaggaaatgtgcctgtggtgctgaacaacccctacagcgagaaggagcagccccccaccagcggcaagcagagccccaccaagaatggcagccccagcaaatgtccccgcttcctgaaggtgaagaactgggagacagaggtggtgctgacagacaccctgcacctgaagagcaccctggagaccggctgcacagagtacatctgcatgggcagcatcatgcaccccagccagcacgcccggcggccagaagatgtgaggaccaagggccagctgttccccctggccaaggagttcatcgaccagtactacagcagcatcaagagatttggcagcaaggcccacatggagcggctggaggaggtgaacaaggagattgacaccaccagcacctaccagctgaaggacacagagctgatctacggggccaagcacgcctggagaaatgccagccgctgtgtgggccgcatccagtggagcaagctgcaggtgtttgatgcccgggactgcaccacagcccacggcatgttcaactacatctgcaaccacgtgaagtatgccaccaacaagggcaacctgcggagcgccatcaccatcttcccccagaggacagatggcaagcatgacttccgggtgtggaacagccagctgatccgctatgccggctacaagcagccagatggcagcaccctgggggaccctgccaacgtgcagttcacagagatctgcatccagcagggctggaagccaccccggggccgctttgatgtgctgcccctgctgctgcaggccaatggaaatgaccctgagctgttccagatccccccagagctggtgctggaggtgcccatccgccaccccaagtttgagtggttcaaggacctgggcctgaagtggtacggcctgcctgctgtgagcaacatgctgctggagattggaggcctggagttcagcgcctgccccttcagcggctggtacatgggcacagaaattggagtgcgggactactgtgacaacagccgctacaacatcctggaggaggtggccaagaagatgaacctggacatgaggaagaccagcagcctgtggaaggaccaggccctggtggagatcaacattgctgtgctgtacagcttccagagcgacaaggtgaccatcgtggaccaccacagcgccacagagagcttcatcaagcacatggagaatgagtaccgctgccggggcggctgcccagctgactgggtgtggatcgtgccccccatgagcggcagcatcacccctgtgttccaccaggagatgctgaactaccgcctgacccccagctttgagtaccagcctgacccctggaacacccacgtgtggaagggcaccaacggcacccccaccaagagaagagccatcggcttcaagaagctggccgaggccgtgaagttcagcgccaagctgatgggccaggccatggccaagagggtgaaggccaccatcctgtatgccacagagaccgggaagagccaggcctatgccaagaccctgtgtgagatcttcaagcacgcctttgatgccaaggtgatgtccatggaggagtatgacatcgtgcacctggagcacgagaccctggtgctggtggtgaccagcacctttggaaatggagaccccccagaaaatggagagaagtttggctgtgccctgatggagatgaggcaccccaacagcgtgcaggaggagaggaagagctacaaggtgcgcttcaacagcgtgtcctcctacagcgacagccagaagagcagtggagatggccctgacctgcgggacaactttgaatctgctggccccctggccaacgtgcgcttctctgtgtttggcctgggcagccgggcctacccccacttctgtgccttcggccatgctgtggacaccctgctggaggagctgggcggggagcgcatcctgaagatgagagaaggagatgagctgtgtggccaggaggaggccttccgcacctgggccaagaaggtgttcaaggccgcctgtgatgtgttctgtgtgggagatgatgtgaacatcgagaaggccaacaacagcctcatcagcaatgaccgctcctggaagaggaacaagttccggctgacctttgtggccgaggcccctgagctgacccagggcctgagcaatgtgcacaagaagagggtgtctgctgcccggctgctgagccggcagaacctgcagagccccaagagcagccgcagcaccatctttgtgcggctgcacaccaacggcagccaggagctgcagtaccagcccggggaccacctgggcgtcttccctggcaaccacgaggacctggtgaatgccctgattgagcggctggaggatgcccctcctgtgaaccagatggtgaaggtggagctgctggaggagaggaacacagccctgggcgtcatcagcaactggacagatgagctgcggctgcccccctgcaccatcttccaggccttcaagtactacctggacatcaccaccccacccacccccctgcagctgcagcagtttgccagcctggccaccagcgagaaggagaagcagaggctgctggtgctgagcaagggcctgcaggagtatgaggagtggaagtggggcaagaaccccaccatcgtggaggtgctggaggagttccccagcatccagatgcctgccaccctgctgctgacccagctgagcctgctgcagccccgctactacagcatcagcagcagcccccacacccacaccctgtctgagacccggcccagccccctgcccctgagcagccagtgctgctag

SEQ ID NO: 13754 - DNA, 4305 bp, Artificial Sequence
  derived and/or modified sequence
atggaggaccacatgttcggcgtgcagcagatccagcccaacgtgatatcagtcaggctgttcaaaagaaaagtcggggggctgggcttcctggtgaaggagcgagtgtctaagcctcctgtcattataagcgacttaatcagaggcggcgccgcagaacagtcaggccttatccaggccggggatatcattctggccgtaaacgggcggcccctcgtagatctttcttacgacagtgccctggaagtcctaaggggaatcgcttctgaaactcacgtggtgctaattctgcgagggccagaaggctttaccacccacctggaaacaacgtttacgggagatggcacgcccaagaccatccgagtgacacagcctcttggtcctcccactaaggctgtggacttgtctcaccaaccacccgctggaaaggagcagcctctcgcagttgatggagcctcgggaccagggaacggtcctcagcatgcctacgacgacggacaagaagctgggtcattaccacacgctaatggcttagctccacgtccacctggtcaggaccctgcaaaaaaggcaaccagagtcagcctccagggaaggggggaaaacaacgaactgcttaaggagatcgaacctgttctgtcattgctaacgtccggaagcagaggtgtcaaaggtggggctcctgccaaggctgaaatgaaggatatgggcatccaagttgatcgggatctggacggcaaaagtcacaaaccattgcccctcggtgtggagaacgatcgtgtctttaacgatctctgggggaagggaaacgtacccgtggtcttgaacaacccatactctgaaaaggagcagccacccacttcaggtaagcagtcgcctacaaaaaatgggtctccatccaagtgccctaggttcctaaaagtcaaaaattgggaaactgaggttgtgcttacagacacgctccatctcaagagcacactggaaacgggctgtaccgagtacatttgtatgggttcgatcatgcatccatctcaacatgcacgcagacccgaagatgtccgaactaaaggccagttgtttccactcgccaaagagtttatcgaccagtattacagttccataaagcgattcggcagcaaggcccacatggagaggttagaggaggtgaacaaggagatcgataccacatccacataccaacttaaggataccgaactcatctacggggccaaacatgcctggcgcaatgcatcacgatgcgttggacggattcagtggagcaaactgcaggtgttcgatgcccgtgattgtacaaccgcacacggaatgttcaactacatctgcaaccacgtgaaatacgccactaataaggggaacctccgaagtgctatcacaatttttccacaacggaccgacggaaaacatgatttcagagtgtggaactctcagctgattcgctacgctggatataagcagcctgatggaagcaccctgggtgatcctgccaacgttcagttcacagaaatctgcattcagcagggctggaaaccccctcgcggcaggttcgacgtgttacccctgctgctgcaggctaatggcaacgacccggaactcttccaaattccaccagaactggtcctcgaggttccaatcaggcaccccaagtttgaatggtttaaagacttgggcctcaagtggtatggcttgccagccgtcagcaacatgctcctcgagatcgggggactggagttcagcgcctgtccgttttcaggatggtatatgggtacggaaatcggggtgagggactattgtgataatagccgttacaatatcctggaggaggtagccaaaaagatgaacttggacatgaggaaaacctcttcactgtggaaggatcaggccctggtggaaattaatattgcagtgctgtactcttttcagagcgacaaggtgactatagtcgaccaccattccgctacagaatccttcataaaacatatggagaatgagtataggtgtcgcggaggttgccctgcagactgggtgtggatcgtacccccaatgtccggttccattacgcccgtctttcatcaggaaatgctgaattaccgactgacgccatcattcgagtaccagcccgatccctggaatactcatgtctggaaggggaccaacggcacccctactaaaaggcgcgctatcggattcaagaagctggccgaggccgtcaaattttccgcaaaactcatgggacaggcaatggccaagagggtgaaagcgacaatcctttatgcaaccgagactggaaagtctcaagcctatgctaagacactatgtgagattttcaagcacgccttcgacgccaaagtgatgtctatggaagagtacgacatcgtccacctggaacatgagacgttggttctcgttgtaacctcaacttttggaaatggtgacccacctgaaaacggcgagaagttcggctgcgccttgatggaaatgcggcacccaaactctgtgcaagaggagcgaaaatcctataaagttagattcaacagtgtctctagctacagcgattctcaaaaaagttcaggggacggccctgacctgcgtgataacttcgaatccgccggcccattagccaacgtcaggttttcagtgttcggcctaggctcccgcgcgtacccacatttttgtgcgtttggtcatgccgtcgataccctgctcgaagagcttggaggagagcggatcctaaagatgcgcgagggcgacgagctttgtgggcaggaggaggccttcagaacttgggccaaaaaggtatttaaggcagcatgtgatgtgttctgcgtcggtgatgacgtaaatatagagaaagcaaacaatagcttgatatccaacgatcgaagctggaaacgcaataaattcaggctgacattcgttgccgaagccccagagctgactcaagggctgtcgaacgttcacaaaaagagagtgagcgccgcgaggctccttagcagacagaacttgcagtcccccaagagcagccgatcaaccatcttcgtgaggctacacaccaacggatcacaagagctgcaataccagccgggagatcatttaggagtttttccagggaaccacgaggatttggtcaatgctctgatagagcggcttgaggacgctcctccagtgaatcagatggttaaggtggagcttctggaagagcgaaatacagcactcggcgtgatctccaactggaccgacgaactccgactccctccttgcaccatctttcaggcctttaagtattatctagatatcacaacgccaccgacccctctgcagttacagcagttcgcctctctggccactagcgaaaaagagaaacagcgccttttagtcctgagtaaggggttacaggagtatgaggaatggaaatgggggaaaaatccaaccatcgtcgaggtcctggaggagttcccttccattcagatgcctgcgacgctcctgcttacccagttgtccctgctacagccacgctattatagtatctctagctctcccgacatgtacccagatgaagtgcatctgacagtggccattgtttcctaccgcactcgagacggtgaggggcctatccaccacggggtttgctcctcgtggctaaatcgaatccaggccgacgagctggtgccatgcttcgtgcgcggtgcaccatcatttcatctaccgaggaacccgcaggtcccttgtatcctagtcggcccaggtaccggcatcgccccgttccggtcattttggcagcagcggcagtttgacatccagcataaagggatgaacccatgcccaatggttctcgtgttcggctgccgccagagtaaaattgatcacatctacagagaggaaaccttgcaggcaaaaaacaagggtgtatttagggaattgtacaccgcatacagtcgtgagccagacaaacccaaaaagtatgtgcaggacattttgcaggagcagcttgctgaatccgtgtatagagccctcaaggaacagggcggtcacatttatgtgtgcggcgatgtcaccatggcagccgacgtactgaaagcaatccagagaatcatgacgcaacagggcaagctgtctgcagaggatgcaggagtatttatctctaggatgagagacgataaccgctaccacgaagatatcttcggcgtaactttgaggacctatgaagtgaccaaccgcctgagaagcgagtcaattgccttcattgaagaatctaagaaggacactgacgaggtgttttcctcgtag

SEQ ID NO: 13755 - DNA, 1224 bp, Artificial Sequence
  derived and/or modified sequence
atggaggaccacatgttcggcgtgcagcagatccagcccaacgtgatttctgtcaggctgttcaagaggaaggttggtggcctgggattcctggtaaaggagcgagtgtccaagcctccagtgatcatttctgacctcatcaggggcggagcagccgagcagagcggcctcatccaggccggagatataatcctcgcggtgaatggcaggccattggtcgacctgtcctacgactctgctcttgaggtactccgagggatcgcgtcagagacccatgtggttctgatcttgcggggccccgaaggctttactacacacctggaaaccacgtttactggggacggaactccaaaaacaattagggtcacccagcctctgggccctcctactaaagcagtcgacctttctcatcagccacccgctggtaaggaacagcctctggctgtcgacggcgcctcaggacccggcaacggtcctcaacatgcatacgatgatgggcaggaggccggatctttgcctcatgccaatggcctcgccccacgcccacctggacaggaccctgccaagaaagctactcgggtgtccttgcaggggcgcggagagaataacgaattactcaaggagatagagccagtgctcagtctactgacctccggcagcagaggcgtaaaaggtggagctccagcaaaagctgagatgaaggatatgggaatccaggttgacagggatcttgacggcaaatcgcacaagcctttgccgctgggtgtcgagaatgatagagtctttaacgatttatggggaaaaggcaacgtgccagtcgttctaaataatccctattctgagaaggagcagatgaggaaattgaggattaccgagggcttcggggcgcagcgcggctcacacaaccacccaccgccccaggagaactctccccctcagaggatggcggcgccaccatctgtccacgcctcatccaggtcacgcaccggacggctcagatggtttagtctgaccccctccactctacgggctcactggaagcgcgacgccctttccacatctgcctgggccccctcttgcattttgttgtcaatgcaggggggtctcaagacttctgcccagaaagatagttccagtctctctcccaagagccttttgatcaatactatccatcagttgaaggacctcgccccaaagccgacatggaaagggtggaaacgatag

SEQ ID NO: 13756 - DNA, 3621 bp, Artificial Sequence
  derived and/or modified sequence
atggaggaccacatgttcggcgtgcagcagatccagcccaacgtgatcagtgtgcggctatttaagcgtaaagtcggtggtcttggattcctcgtcaaggagcgagtgtctaaaccacctgtgatcatttcggatctcattcggggcggggctgcggagcagagcgggcttatccaggcaggcgacatcatccttgctgttaacgggaggccactcgtagacctgtcctatgacagtgctctcgaggttctgcggggcatcgcctccgagacacacgtggtcctgatcctgcgcggcccagaaggcttcaccacccacctggagaccacctttaccggagatgggaccccaaagaccattcgcgtgactcaacctttgggtcccccgaccaaggctgtggacctcagccaccagcctcctgctggcaaggagcagccgctggccgtggacggagcgagtgggccgggcaacggcccacagcacgcatacgatgatggccaggaagcagggtcactgccacatgcaaacgggttggcccctcgtccacctggccaagatccagctaaaaaagccacgagagtctctctacagggacggggggaaaacaatgagttactcaaggagattgaacccgttctgtccctgctcacctctggatcccgcggcgtgaaaggcggtgcacccgctaaagcagagatgaaagacatgggaattcaggtggatcgggacttagatgggaagagtcacaagccgctcccactgggggttgagaacgatcgtgtattcaacgacttgtggggcaaaggcaacgtccccgtagtcttgaataacccgtattccgagaaggagcagcccccaacctcagggaagcagtcccccactaagaacggttcccctagtaagtgtccccggttcctcaaggttaaaaactgggaaaccgaggtggtactgaccgacacattacacttgaagagcacgctagagacgggctgtaccgagtacatttgcatgggtagtatcatgcacccttcccagcacgctcgacgccccgaagatgtacggacgaaggggcagctgtttccactagccaaggagtttatcgaccaatattacagctcgatcaaacgtttcggtagcaaagcccacatggagcgactggaagaggtgaataaggagattgatactacaagcacctatcagctgaaggatacagagctaatctatggtgctaaacacgcgtggcgcaatgcgtcaagatgcgttggtaggattcagtggagtaaattgcaggtgtttgacgccagagattgtaccacagcacacggaatgttcaactacatctgtaaccacgtgaaatacgctacaaacaagggtaacttacgcagtgctatcaccattttcccccagcggaccgacggcaagcacgacttcagggtgtggaactctcagctgattcgatacgccggttacaaacagccagacgggtcgaccctgggcgatcctgccaatgtacaatttaccgagatatgcattcaacaaggatggaaaccgcctcgcggacgcttcgacgttttgcctctgctactgcaagctaacggcaatgatccagaactgtttcagatacctcccgaactggtcctggaagtacccatccgccatcccaagttcgagtggtttaaagacctcgggctaaaatggtacggccttcccgccgtgtccaacatgttgttggagataggcggactcgagttttccgcatgcccattctcaggctggtacatgggtacagagatcggcgtccgcgattattgtgataatagccggtataatattttggaggaagtcgctaagaaaatgaacctcgacatgcgcaaaacaagtagcttgtggaaggatcaagccttggttgaaataaatattgctgtactgtattcttttcaatccgataaagttactattgtggaccaccacagtgccactgagagcttcattaagcacatggagaacgagtaccgctgtcggggcgggtgcccagcggattgggtctggattgtaccacctatgtctggatccatcacacctgtgttccatcaggagatgctgaattatcgtctgaccccaagctttgagtatcaacctgacccgtggaatactcacgtctggaagggaaccaatggcactcctactaaacgaagggcaattggcttcaaaaaactggcagaagccgtcaaatttagtgcgaaattaatgggccaggccatggccaagagagtgaaagccactatactttacgctaccgaaacaggcaagtcacaggcgtacgctaagaccctgtgtgaaatcttcaaacacgcattcgacgcgaaggtgatgtcgatggaagagtacgatatcgtacaccttgaacatgaaactctggtgttggtggtcacttccacatttggaaacggcgatccaccagaaaacggcgagaagtttggatgcgccttgatggagatgaggcacccaaactccgtgcaagaagaacgcaaatcgtataaggttaggtttaactctgtgtcttcctactcggacagccagaaaagctctggagacgggccagacctgagagacaatttcgagagcgccggcccattagccaatgtacgtttttctgtcttcggcttgggtagccgcgcctatccccatttttgcgcctttgggcatgccgtggacaccctcttggaagagctgggcggggaaagaatcttgaaaatgcgcgaaggcgacgaattgtgcggccaggaggaggctttccggacgtgggcgaagaaagtctttaaagcagcatgcgacgtcttttgcgtgggggacgacgtcaatatcgaaaaggctaataattccttaattagcaacgatcgatcatggaagagaaacaagttccggcttacatttgtggctgaggctcctgaactgactcagggactatccaacgtccataagaaaagggtctcggctgctagactcctatcccgacaaaacctgcaatctccgaagagcagcagaagcaccatatttgtgagactgcacacaaatggatcccaggaattacagtaccaacccggagatcatctgggagtatttccgggcaaccatgaggacctcgttaatgccctcatcgaacgcttagaagacgcacccccagtgaatcagatggtcaaggtcgaactgcttgaggagcggaatactgcactgggtgtgattagcaattggaccgacgagcttcgcttgcctccatgcaccattttccaagcgtttaagtactatctggacattactaccccacccacacctcttcagctgcaacaatttgcttcattggccacgagcgagaaagagaaacagcgcctgctggtgctgtccaagggcctgcaggagtacgaagagtggaagtggggtaaaaacccaaccattgttgaagtcttggaagaattcccatcgatacaaatgcccgcaactttgttgctgacccagttgagccttctgcagcctcgatattattcaatttcctcctctccccacacacacaccttgtcagaaacaagaccaagtcccctacccctttcttcacagtgttgctag

SEQ ID NO: 13757 - DNA, 12158 bp, Artificial Sequence
  derived and/or modified sequence
agagcggctcttttaatgagggttgcgacgtctccctccccacacccataaaccagtcgggttggacgtcactgctaattcgtttcagtgatgataggataaaggagggacattaagaaataaattccccctcacgaccctcgctgagctcacggctcagtccctacatatttatgccgcgtttccagccgctgggtgaggagctacttagcgccgcggctcctccgaggggcggccgggcagcgagcagcggccgagcggacgggctcatgatgcctcagatctgatccgcatctaacaggctggcaatgaagatacccagagaatagttcacatctatcatgcgtcacttctagacacagccatcagacgcatctcctcccctttctgcctgaccttagggacacgtcccaccgcctctcttgacgtctgcctggtcaaccatcacttccttagagaataaggagagaggcggatgcaggaaatcatgccaccgacgggccaccagccatgagtgggtgacgctgagctgacgtcaaagacagagagggctgaagccttgtcagcacctgtcaccccggctcctgctctccgtgtagcctgaagcctggatcctcctggtgaaatcatcttggcctgatagcattgtgaggtcttcagacaggacccctcggaagctagttaccatggaggatcacatgttcggtgttcagcaaatccagcccaatgtcatttctgttcgtctcttcaagcgcaaagttgggggcctgggatttctggtgaaggagcgggtcagtaagccgcccgtgatcatctctgacctgattcgtgggggcgccgcagagcagagtggcctcatccaggccggagacatcattcttgcggtcaacggccggcccttggtggacctgagctatgacagcgccctggaggtactcagaggcattgcctctgagacccacgtggtcctcattctgaggggccctgaaggtttcaccacgcacctggagaccacctttacaggtgatgggacccccaagaccatccgggtgacacagcccctgggtccccccaccaaagccgtggatctgtcccaccagccaccggccggcaaagaacagcccctggcagtggatggggcctcgggtcccgggaatgggcctcagcatgcctacgatgatgggcaggaggctggctcactcccccatgccaacggcctggcccccaggcccccaggccaggaccccgcgaagaaagcaaccagagtcagcctccaaggcagaggggagaacaatgaactgctcaaggagatagagcctgtgctgagccttctcaccagtgggagcagaggggtcaagggaggggcacctgccaaggcagagatgaaagatatgggaatccaggtggacagagatttggacggcaagtcacacaaacctctgcccctcggcgtggagaacgaccgagtcttcaatgacctatgggggaagggcaatgtgcctgtcgtcctcaacaacccatattcagagaaggagcagccccccacctcaggaaaacagtcccccacaaagaatggcagcccctccaagtgtccacgcttcctcaaggtcaagaactgggagactgaggtggttctcactgacaccctccaccttaagagcacattggaaacgggatgcactgagtacatctgcatgggctccatcatgcatccttctcagcatgcaaggaggcctgaagacgtccgcacaaaaggacagctcttccctctcgccaaagagtttattgatcaatactattcatcaattaaaagatttggctccaaagcccacatggaaaggctggaagaggtgaacaaagagatcgacaccactagcacttaccagctcaaggacacagagctcatctatggggccaagcacgcctggcggaatgcctcgcgctgtgtgggcaggatccagtggtccaagctgcaggtattcgatgcccgtgactgcaccacggcccacgggatgttcaactacatctgtaaccatgtcaagtatgccaccaacaaagggaacctcaggtctgccatcaccatattcccccagaggacagacggcaagcacgacttccgagtctggaactcccagctcatccgctacgctggctacaagcagcctgacggctccaccctgggggacccagccaatgtgcagttcacagagatatgcatacagcagggctggaaaccgcctagaggccgcttcgatgtcctgccgctcctgcttcaggccaacggcaatgaccctgagctcttccagattcctccagagctggtgttggaagttcccatcaggcaccccaagtttgagtggttcaaggacctggggctgaagtggtacggcctccccgccgtgtccaacatgctcctagagattggcggcctggagttcagcgcctgtcccttcagtggctggtacatgggcacagagattggtgtccgcgactactgtgacaactcccgctacaatatcctggaggaagtggccaagaagatgaacttagacatgaggaagacgtcctccctgtggaaggaccaggcgctggtggagatcaatatcgcggttctctatagcttccagagtgacaaagtgaccattgttgaccatcactccgccaccgagtccttcattaagcacatggagaatgagtaccgctgccgggggggctgccctgccgactgggtgtggatcgtgccccccatgtccggaagcatcacccctgtgttccaccaggagatgctcaactaccggctcaccccctccttcgaataccagcctgatccctggaacacgcatgtctggaaaggcaccaacgggacccccacaaagcggcgagccattggcttcaagaagctagcagaagctgtcaagttctcggccaagctgatggggcaggctatggccaagagggtgaaagcgaccatcctctatgccacagagacaggcaaatcgcaagcttatgccaagaccttgtgtgagatcttcaaacacgcctttgatgccaaggtgatgtccatggaagaatatgacattgtgcacctggaacatgaaactctggtccttgtggtcaccagcacctttggcaatggagatccccctgagaatggggagaaattcggctgtgctttgatggaaatgaggcaccccaactctgtgcaggaagaaaggaagagctacaaggtccgattcaacagcgtctcctcctactctgactcccaaaaatcatcaggcgatgggcccgacctcagagacaactttgagagtgctggacccctggccaatgtgaggttctcagtttttggcctcggctcacgagcataccctcacttttgcgccttcggacacgctgtggacaccctcctggaagaactgggaggggagaggatcctgaagatgagggaaggggatgagctctgtgggcaggaagaggctttcaggacctgggccaagaaggtcttcaaggcagcctgtgatgtcttctgtgtgggagatgatgtcaacattgaaaaggccaacaattccctcatcagcaatgatcgcagctggaagagaaacaagttccgcctcacctttgtggccgaagctccagaactcacacaaggtctatccaatgtccacaaaaagcgagtctcagctgcccggctccttagccgtcaaaacctccagagccctaaatccagtcggtcaactatcttcgtgcgtctccacaccaacgggagccaggagctgcagtaccagcctggggaccacctgggtgtcttccctggcaaccacgaggacctcgtgaatgccctgatcgagcggctggaggacgcgccgcctgtcaaccagatggtgaaagtggaactgctggaggagcggaacacggctttaggtgtcatcagtaactggacagacgagctccgcctcccgccctgcaccatcttccaggccttcaagtactacctggacatcaccacgccaccaacgcctctgcagctgcagcagtttgcctccctagctaccagcgagaaggagaagcagcgtctgctggtcctcagcaagggtttgcaggagtacgaggaatggaaatggggcaagaaccccaccatcgtggaggtgctggaggagttcccatctatccagatgccggccaccctgctcctgacccagctgtccctgctgcagccccgctactattccatcagctcctccccagacatgtaccctgatgaagtgcacctcactgtggccatcgtttcctaccgcactcgagatggagaaggaccaattcaccacggcgtatgctcctcctggctcaaccggatacaggctgacgaactggtcccctgtttcgtgagaggagcacccagcttccacctgccccggaacccccaagtcccctgcatcctcgttggaccaggcaccggcattgcccctttccgaagcttctggcaacagcggcaatttgatatccaacacaaaggaatgaacccctgccccatggtcctggtcttcgggtgccggcaatccaagatagatcatatctacagggaagagaccctgcaggccaagaacaagggggtcttcagagagctgtacacggcttactcccgggagccagacaaaccaaagaagtacgtgcaggacatcctgcaggagcagctggcggagtctgtgtaccgagccctgaaggagcaagggggccacatatacgtctgtggggacgtcaccatggctgctgatgtcctcaaagccatccagcgcatcatgacccagcaggggaagctctcggcagaggacgccggcgtattcatcagccggatgagggatgacaaccgataccatgaggatatttttggagtcaccctgcgaacgtacgaagtgaccaaccgccttagatctgagtccattgccttcattgaagagagcaaaaaagacaccgatgaggttttcagctcctaactggaccctcttgcccagccggctgcaagttttgtaagcgcggacagacactgctgaacctttcctctgggaccccctgtggccctcgctctgcctcctgtccttgtcgctgtgccctggtttccctcctcgggcttctcgcccctcagtggtttcctcggccctcctgggtttactccttgagttttcctgctgcgatgcaatgcttttctaatctgcagtggctcttacaaaactctgttcccactccctctcttgccgacaagggcaactcacgggtgcatgaaaccactggaacatggccgtcgctgtgggggtttttttctctggggttcccctggaaaggctgcaggaactaggcacaagctctctgagccagtccctcagccactgaagtccccctttctccttttttatgatgacattttggttgtgcgtgcctgtgtgtgtgtgtgtgtgtgtgtgtgtgtgtgtgatgggccaggtctctgtccgtcctcttccctgcacaagtgtgtcgatcttagattgccactgctttcattgaagaccctcaatgccaagaaacgtgtccctggcccatattaatccctcgtgtgtccataattagggtccacgcccatgtacctgaaacatttggaagccccataattgttctagttagaaagggttcagggcatggggagaggagtgggaaattgattaaaggggctgtctcccaatgaaagaggcattcccagaatttgctgcatttagattttgataccagtgagcagagccctcatgtgacatgaacccatccaatggattgtgcaaatcccctccccaaacccacccataccagctagaatcacttgactttgccacatccattgactgaccccctcctccagcaatagcatccaaggggcctggaagttatgttgttcaaagaagcctggtggcaataaggatcttcccactttgccactggatgactttggatgggtcacttgtcctcagtttttcctagtcataatgtcatacgaacctaaagaatatgaatggattaaatgttaaagctttggtgcctggaaacaatatcaagtaacaatatgattattatttttttattcccccaaagcgggcttgctgcttcacccttggggatgaaataatggaagctggttaaagtggatgaggttggaaagagttgccataatgaggtcccacgtggcttcttcgataggagccacaacttggggtgggaagaacttgtccctcaggcttgttgccctctgcagttgatctccaaagttttaaacctgttaaattaattttgacaaataagttaccctcaactcagatcaaaaatgggcagccaagtcttcggtaggaattggagccggtgtaattcctccctaagaggcaacctgttgaatttactctctcagagtaaatggtgggaagggatccctttgtatacttttttaaatactacaaattagtgtcaggcagttcccagaaagagacaagaaatcctagtggcctcccagactgcagggtccccaaggatggaaagggaatgttctgctggttctaccctgtttgttgtgtcttgctatacagaaaaaccacatttcttttatatactgtacgtgggcatatcttgttgttcagtttgggtgtctgctaaagaggaagtgcactggccctctttgaaagggctttacagtgggggcaccaagaccccaaagggcccaggccaggagactgttaaagtgaaaaggcaatctatgactcaccttgctctgccatccctggcagcccccaccggtgtcctgttcctgccacatggagcttgacttcatgccagctataatctcccctgccttcctttaatcccaatttcccctgctcactcttccacagatataaagaacaaacacttagcatcccacactcaccccttctaatcctgaagggaagcccattctaaactcctttcctgcaaacccatttccagctcctagtagctttcctcccaaaggctttctttccaatcctttatagctttggagacgcctccccaattccccagggaaggaaactgttgtgtccaatccccattaaagacaaattgatcagtgcttcccactccaagtcaagctttatgcaggaatgcttttccatcagggaataaatacttagaagcgcttacaaggtgccaggcacctcctttctgcatgtgcctgcctttctagtagcagacagatggaaacattgtctcattttgtcaaggagtccaaagaaatgattataaaaccaggattcatccttcttctccagaaagatttttttttaagtaaacacctttcaatccccaacacaagctgcttcacaactccaggctagaaggcaggagagcgatctgatgtgtttctttcatttgccagaattcctgataccaaaagcctctctctctgttgagtaacctctcaaggaccagagtggagtccagattgttaggctcagatcaagggtggggaaatactgccctctcgtggtggcttttcatccaggcctcgtagccaaccgtttaagtgcaaaatagaattaagcaatgggtaagcaaaatagggttgacaagatatttgggggttattcgggttatggcccatttatttccctcttccccctgaattgaccagtagcagctccagccccatttcacaaaagtgagtttggccaggaggaatgagacgtctcctgaaataggaacaccggaacatcatgctcacctgccatcactatgcatccagttcccacagcttgtgtcgtgaaagagcagagagatgatgttaaactccttgggaggagagagggcttcttttggtttccctggagtgagacagccaggtgtctttcttttgcggggggacacttcagacccatcaatatggaattttgggagccgacctgagtgcaaatcctaattctgcccctgttggtgcagatggctgtgggcggctcacttgaccttttagagtctgcatacccacctgtataacaaggtggattgaatgagacaatgcccacgaaatgcccagttacagtacctggttcaaaacttactgcattttaatttttcacttaacttataacatgtcttgcttctccagtgtgtggaaggcaccgggcagtttgcagagataagcaaaacacagttcctctcgtgcagaaggttagaatctatttttttttttgacagagtcttgctctgtcacccaggctggcgtacagtggtacgatctcagctcactgcatcctctgcctcccccagttcaagtgattcttctgcctcggcctcctgagtaactgggactacaggcgcctaccaccacgcccagctaagttttgtatttttagtagagtcagggtttcaccatgttggccaggctggtcttgaattcctgacctcaaatgatccacgcacctcagcctcccaaagtgctggattacaggcatgagccaccacgcccagccaaaggttataatctgatggagagagacacccgtcttggaactgacataaatttctggggtttgagaaatgggcgggatttcactggtagcttctggaaggtaagagttgtccaggaattgggaagagtgagaggaaaggcacggacagggagcatgtaagataaattgaggctggctttggaaggctgaggagggtgagaaaaggtgggctgggaccagaccgtggggagaggtgagtggcattacaagaaatttaggctttattcagaaggcaacagggagtccctaagaatgtttttcaaaaagggacattaaggcgattggagttatacttggaaaagaaagttctggccacagtacagagcatggcccgttgagctgttgggggggttattgctgcaaccaaggcttgagtgagggaagaggcggatgtagtgataaagagactccaggaactgaatcagcgtacctggcaccccatccattgtagagggtgagaataaaggagaaattaaagcatcttgcaggctgggcgcggtagctcatgtctgtaatcccagcactttgggaggccgaggtgggtgtatcagttgaggtcaggagttggagaccagtcagccagttagtagaaaccctgactctactaagaaaatacaaaaattagctgggcatggtggcatgcgcctgtagtctcagctacctgggaggctgaggaaggaggatcgcttgagcccaggaggtggaggctgcagtgagccaagattgtaccactgcactccagcctgggtgacagagcaagactcttatctcaaaaaaaataaaataaaataaaataaaataaaacatcttgcccctagctgagagagaggtctctgaagagcaggctcagggaaaagatgagttttcagagctgatgtgatagtcagcttctctggagtcaacagggtgaatccttcccaagtccagccatgcccagatgcccggagggaaaactgacccccagccagtagacattggctaagaacacagaatcttctgaccaaacacgctttcagcagctgcctgctctggactttgaaagaggtcaggtcttgccctaagctcaaaacaagtgagaggtgtcctgacctagctcatagggcaaatggtcctaataggatgggcaatccagatgcctgagccccttcactccgacagcaccagcgcctaatgcagccttttcattcttgccattaggaaatctgtggacttctagcctgtgttttaaaccagccatgtttccttgtatatttccctacccgctgccccacatacccagcatgccgctgtggccaccatgtcctcaaagccttctgtctgtatcaggaatgtagtctgagactgccaggaagcaacaaggagagagaaacactaactagtcttcctttataacccattcatactctctggctgtccccaaccttcatagtctcctgcatccaaatgtcctctttggctcaaaaagtaggccaggcatggtggttcatgcctgtaatagcactttgggagactgaggtgggaggatcacttggggccaggagtttgagaccagcttgggcaacacagcgcaatctcgtctctactaaaaaaaaaaaaaaaaaaaaattagctgggcatgatggcatgctcctgtggtcccagctacttgggaggctgaggcaggaggatcacttggtcccaggagtttgaggcgacagtgagctaggatcgcaccactgcactccagcctgagtgacagagcaagaccctgtctctaaaaaaaattaaaatgaaagaccaggtgctgggattaaggaaacacaggtctgagggtctgagggaaggggcctgcctcccagggagtcaacatagatgttccccatgaacagggatttgactttggaggccaacctggcctggcctctgccctttatctcacactccctatccttggcccactgccagtccctgccttgtggcaaaggggccccaaaagaaaagctgcccttccccaaatgtaaggacccaggtacactttcacccgtggaaagcagtgtctgtcgagagtctgtttcctattaatacttatcaaagccatgtgcgagggaggtggtcagctgtcaatatgccttagtatgtttatatgagtttgttttgttctaaaatacccaaacagttctggtcaagcggggctatgcccgtctggcccaaaacacagtccgttattaacgagatggccctggcaggcgggaacaaatctgcctccatgcactgcttcctgtagtcttttagaaagtaactccaggacatcgaagtgcccagatttgactcctaagttctaggagactgtagcgcagggtctgtcaaccttagcactattggcatttggggctgggtaattctttcttgtgggggccgtcttgggtactgtaggaagctgagcagcattcctggcctccatccacaagatacctgtagcagtgtcctgccaacggtaacaatcaagtatgtcatcagacattgcccaatgtccccagggggcaacacccctctcttggacttcagggtcaagagaatctctgctggctaccccaggacttctcattatagatttcctggagcacgcagcagaaactttgcctagcccagtggttgtttccattatctgctgccaaagtgggatttgagggtgtccgggggagggggcatggggagggcagtatgctttcaaaaacccctcccaggccaggcgtggtggctcatgcctgtaatcacaggactttgggaggccgaggctggcagatcacttgaggctgggagttagagaccaacctggctaacatggcaaaacctcgtctctactaaaaatacaaaaatcagcccggcgtggtggcgggcatctgtaatcccatctactcgggaggctgaggcaggagaattacttgaacccaggaggcagaggctgcagtgagccgagatggcaccactgcactccagcttgttgacagaatgagaccctgtggaaaaaaaaaaaaaagccctcccatgccagaacagaggatggcagtctgtttcaataagacactgtgtccttggtgttggttctgattaagactcactgagatccagtgctcttgagctgggtctcagtcccctcccatgtcctgtgctctgccgccactgttttcattgttgtgttctcgttgtgattgttaagactcacactcctggctcagcagtggttttccagaaggcccaaagagcggtgccgggcaccccacgtcgcagtgtccgttccgggcttgggaagctggggaggtgggcagacctggtcgcatctcaccacacacacacacacacacacacacacacacgctgtcagaaactcggccgtcccccctacctctgagctctcaatgctgctaatctctgccaagtgtccctgtgctccagcaccttccttgaaggactgacgcccaccccacgctctttgcgaggttgtccaggctgtgtttgtcgcatgctcttcttctgtatagttctcatcttccaattttatgggattcaacaaaagcctattatgcttgtttgcattatggttacaatattaaaaagtggattcaa

SEQ ID NO: 13758 - DNA, 7182 bp, Artificial Sequence
  derived and/or modified sequence
agagcggctcttttaatgagggttgcgacgtctccctccccacacccataaaccagtcgggttggacgtcactgctaattcgtttcagtgatgataggataaaggagggacattaagaaataaattccccctcacgaccctcgctgagctcacggctcagtccctacatatttatgccgcgtttccagccgctgggtgaggagctacttagcgccgcggctcctccgaggggcggccgggcagcgagcagcggccgagcggacgggctcatgatgcctcagatctgatccgcatctaacaggctggcaatgaagatacccagagaatagttcacatctatcatgcgtcacttctagacacagccatcagacgcatctcctcccctttctgcctgaccttagggacacgtcccaccgcctctcttgacgtctgcctggtcaaccatcacttccttagagaataaggagagaggcggatgcaggaaatcatgccaccgacgggccaccagccatgagtgggtgacgctgagctgacgtcaaagacagagagggctgaagccttgtcagcacctgtcaccccggctcctgctctccgtgtagcctgaagcctggatcctcctggtgaaatcatcttggcctgatagcattgtgaggtcttcagacaggacccctcggaagctagttaccatggaggatcacatgttcggtgttcagcaaatccagcccaatgtcatttctgttcgtctcttcaagcgcaaagttgggggcctgggatttctggtgaaggagcgggtcagtaagccgcccgtgatcatctctgacctgattcgtgggggcgccgcagagcagagtggcctcatccaggccggagacatcattcttgcggtcaacggccggcccttggtggacctgagctatgacagcgccctggaggtactcagaggcattgcctctgagacccacgtggtcctcattctgaggggccctgaaggtttcaccacgcacctggagaccacctttacaggtgatgggacccccaagaccatccgggtgacacagcccctgggtccccccaccaaagccgtggatctgtcccaccagccaccggccggcaaagaacagcccctggcagtggatggggcctcgggtcccgggaatgggcctcagcatgcctacgatgatgggcaggaggctggctcactcccccatgccaacggcctggcccccaggcccccaggccaggaccccgcgaagaaagcaaccagagtcagcctccaaggcagaggggagaacaatgaactgctcaaggagatagagcctgtgctgagccttctcaccagtgggagcagaggggtcaagggaggggcacctgccaaggcagagatgaaagatatgggaatccaggtggacagagatttggacggcaagtcacacaaacctctgcccctcggcgtggagaacgaccgagtcttcaatgacctatgggggaagggcaatgtgcctgtcgtcctcaacaacccatattcagagaaggagcagatgaggaaactgagaatcacagagggttttggtgctcaacgagggtcacataaccaccccccacctcaggaaaacagtcccccacaaagaatggcagcccctccaagtgtccacgcttcctcaaggtcaagaactgggagactgaggtggttctcactgacaccctccaccttaagagcacattggaaacgggatgcactgagtacatctgcatgggctccatcatgcatccttctcagcatgcaaggaggcctgaagacgtccgcacaaaaggacagctcttccctctcgccaaagagtttattgatcaatactattcatcaattaaaagatttggctccaaagcccacatggaaaggctggaagaggtgaacaaagagatcgacaccactagcacttaccagctcaaggacacagagctcatctatggggccaagcacgcctggcggaatgcctcgcgctgtgtgggcaggatccagtggtccaagctgcaggtattcgatgcccgtgactgcaccacggcccacgggatgttcaactacatctgtaaccatgtcaagtatgccaccaacaaagggaacctcaggtctgccatcaccatattcccccagaggacagacggcaagcacgacttccgagtctggaactcccagctcatccgctacgctggctacaagcagcctgacggctccaccctgggggacccagccaatgtgcagttcacagagatatgcatacagcagggctggaaaccgcctagaggccgcttcgatgtcctgccgctcctgcttcaggccaacggcaatgaccctgagctcttccagattcctccagagctggtgttggaagttcccatcaggcaccccaagtttgagtggttcaaggacctggggctgaagtggtacggcctccccgccgtgtccaacatgctcctagagattggcggcctggagttcagcgcctgtcccttcagtggctggtacatgggcacagagattggtgtccgcgactactgtgacaactcccgctacaatatcctggaggaagtggccaagaagatgaacttagacatgaggaagacgtcctccctgtggaaggaccaggcgctggtggagatcaatatcgcggttctctatagcttccagagtgacaaagtgaccattgttgaccatcactccgccaccgagtccttcattaagcacatggagaatgagtaccgctgccgggggggctgccctgccgactgggtgtggatcgtgccccccatgtccggaagcatcacccctgtgttccaccaggagatgctcaactaccggctcaccccctccttcgaataccagcctgatccctggaacacgcatgtctggaaaggcaccaacgggacccccacaaagcggcgagccattggcttcaagaagctagcagaagctgtcaagttctcggccaagctgatggggcaggctatggccaagagggtgaaagcgaccatcctctatgccacagagacaggcaaatcgcaagcttatgccaagaccttgtgtgagatcttcaaacacgcctttgatgccaaggtgatgtccatggaagaatatgacattgtgcacctggaacatgaaactctggtccttgtggtcaccagcacctttggcaatggagatccccctgagaatggggagaaattcggctgtgctttgatggaaatgaggcaccccaactctgtgcaggaagaaaggaagagctacaaggtccgattcaacagcgtctcctcctactctgactcccaaaaatcatcaggcgatgggcccgacctcagagacaactttgagagtgctggacccctggccaatgtgaggttctcagtttttggcctcggctcacgagcataccctcacttttgcgccttcggacacgctgtggacaccctcctggaagaactgggaggggagaggatcctgaagatgagggaaggggatgagctctgtgggcaggaagaggctttcaggacctgggccaagaaggtcttcaaggcagcctgtgatgtcttctgtgtgggagatgatgtcaacattgaaaaggccaacaattccctcatcagcaatgatcgcagctggaagagaaacaagttccgcctcacctttgtggccgaagctccagaactcacacaaggtctatccaatgtccacaaaaagcgagtctcagctgcccggctccttagccgtcaaaacctccagagccctaaatccagtcggtcaactatcttcgtgcgtctccacaccaacgggagccaggagctgcagtaccagcctggggaccacctgggtgtcttccctggcaaccacgaggacctcgtgaatgccctgatcgagcggctggaggacgcgccgcctgtcaaccagatggtgaaagtggaactgctggaggagcggaacacggctttaggtgtcatcagtaactggacagacgagctccgcctcccgccctgcaccatcttccaggccttcaagtactacctggacatcaccacgccaccaacgcctctgcagctgcagcagtttgcctccctagctaccagcgagaaggagaagcagcgtctgctggtcctcagcaagggtttgcaggagtacgaggaatggaaatggggcaagaaccccaccatcgtggaggtgctggaggagttcccatctatccagatgccggccaccctgctcctgacccagctgtccctgctgcagccccgctactattccatcagctcctccccagacatgtaccctgatgaagtgcacctcactgtggccatcgtttcctaccgcactcgagatggagaaggaccaattcaccacggcgtatgctcctcctggctcaaccggatacaggctgacgaactggtcccctgtttcgtgagaggagcacccagcttccacctgccccggaacccccaagtcccctgcatcctcgttggaccaggcaccggcattgcccctttccgaagcttctggcaacagcggcaatttgatatccaacacaaaggaatgaacccctgccccatggtcctggtcttcgggtgccggcaatccaagatagatcatatctacagggaagagaccctgcaggccaagaacaagggggtcttcagagagctgtacacggcttactcccgggagccagacaaaccaaagaagtacgtgcaggacatcctgcaggagcagctggcggagtctgtgtaccgagccctgaaggagcaagggggccacatatacgtctgtggggacgtcaccatggctgctgatgtcctcaaagccatccagcgcatcatgacccagcaggggaagctctcggcagaggacgccggcgtattcatcagccggatgagggatgacaaccgataccatgaggatatttttggagtcaccctgcgaacgtacgaagtgaccaaccgccttagatctgagtccattgccttcattgaagagagcaaaaaagacaccgatgaggttttcagctcctaactggaccctcttgcccagccggctgcaagttttgtaagcgcggacagacactgctgaacctttcctctgggaccccctgtggccctcgctctgcctcctgtccttgtcgctgtgccctggtttccctcctcgggcttctcgcccctcagtggtttcctcggccctcctgggtttactccttgagttttcctgctgcgatgcaatgcttttctaatctgcagtggctcttacaaaactctgttcccactccctctcttgccgacaagggcaactcacgggtgcatgaaaccactggaacatggccgtcgctgtgggggtttttttctctggggttcccctggaaaggctgcaggaactaggcacaagctctctgagccagtccctcagccactgaagtccccctttctccttttttatgatgacattttggttgtgcgtgcctgtgtgtgtgtgtgtgtgtgtgtgtgtgtgtgtgatgggccaggtctctgtccgtcctcttccctgcacaagtgtgtcgatcttagattgccactgctttcattgaagaccctcaatgccaagaaacgtgtccctggcccatattaatccctcgtgtgtccataattagggtccacgcccatgtacctgaaacatttggaagccccataattgttctagttagaaagggttcagggcatggggagaggagtgggaaattgattaaaggggctgtctcccaatgaaagaggcattcccagaatttgctgcatttagattttgataccagtgagcagagccctcatgtgacatgaacccatccaatggattgtgcaaatcccctccccaaacccacccataccagctagaatcacttgactttgccacatccattgactgaccccctcctccagcaatagcatccaaggggcctggaagttatgttgttcaaagaagcctggtggcaataaggatcttcccactttgccactggatgactttggatgggtcacttgtcctcagtttttcctagtcataatgtcatacgaacctaaagaatatgaatggattaaatgttaaagctttggtgcctggaaacaatatcaagtaacaatatgattattatttttttattcccccaaagcgggcttgctgcttcacccttggggatgaaataatggaagctggttaaagtggatgaggttggaaagagttgccataatgaggtcccacgtggcttcttcgataggagccacaacttggggtgggaagaacttgtccctcaggcttgttgccctctgcagttgatctccaaagttttaaacctgttaaattaattttgacaaataagttaccctcaactcagatcaaaaatgggcagccaagtcttcggtaggaattggagccggtgtaattcctccctaagaggcaacctgttgaatttactctctcagagtaaatggtgggaagggatccctttgtatacttttttaaatactacaaattagtgtcaggcagttcccagaaagagacaagaaatcctagtggcctcccagactgcagggtccccaaggatggaaagggaatgttctgctggttctaccctgtttgttgtgtcttgctatacagaaaaaccacatttcttttatatactgtacgtgggcatatcttgttgttcagtttgggtgtctgctaaagaggaagtgcactggccctctttgaaagggctttacagtgggggcaccaagaccccaaagggcccaggccaggagactgttaaagtgaaaaggcaatctatgactcaccttgctctgccatccctggcagcccccaccggtgtcctgttcctgccacatggagcttgacttcatgccagctataatctcccctgccttcctttaatcccaatttcccctgctcactcttccacagatataaagaacaaacacttagcatcccacactcaccccttctaatcctgaagggaagcccattctaaactcctttcctgcaaacccatttccagctcctagtagctttcctcccaaaggctttctttccaatcctttatagctttggagacgcctccccaattccccagggaaggaaactgttgtgtccaatccccattaaagacaaattgatcagtgcttccc

SEQ ID NO: 13759 - DNA, 4307 bp, Artificial Sequence
  derived and/or modified sequence
agagcggctcttttaatgagggttgcgacgtctccctccccacacccataaaccagtcgggttggacgtcactgctaattcgtttcagtgatgataggataaaggagggacattaagaaataaattccccctcacgaccctcgctgagctcacggctcagtccctacatatttatgccgcgtttccagccgctgggtgaggagctacttagcgccgcggctcctccgaggggcggccgggcagcgagcagcggccgagcggacgggctcatgatgcctcagatctgatccgcatctaacaggctggcaatgaagatacccagagaatagttcacatctatcatgcgtcacttctagacacagccatcagacgcatctcctcccctttctgcctgaccttagggacacgtcccaccgcctctcttgacgtctgcctggtcaaccatcacttccttagagaataaggagagaggcggatgcaggaaatcatgccaccgacgggccaccagccatgagtgggtgacgctgagctgacgtcaaagacagagagggctgaagccttgtcagcacctgtcaccccggctcctgctctccgtgtagcctgaagcctggatcctcctggtgaaatcatcttggcctgatagcattgtgaggtcttcagacaggacccctcggaagctagttaccatggaggatcacatgttcggtgttcagcaaatccagcccaatgtcatttctgttcgtctcttcaagcgcaaagttgggggcctgggatttctggtgaaggagcgggtcagtaagccgcccgtgatcatctctgacctgattcgtgggggcgccgcagagcagagtggcctcatccaggccggagacatcattcttgcggtcaacggccggcccttggtggacctgagctatgacagcgccctggaggtactcagaggcattgcctctgagacccacgtggtcctcattctgaggggccctgaaggtttcaccacgcacctggagaccacctttacaggtgatgggacccccaagaccatccgggtgacacagcccctgggtccccccaccaaagccgtggatctgtcccaccagccaccggccggcaaagaacagcccctggcagtggatggggcctcgggtcccgggaatgggcctcagcatgcctacgatgatgggcaggaggctggctcactcccccatgccaacggcctggcccccaggcccccaggccaggaccccgcgaagaaagcaaccagagtcagcctccaaggcagaggggagaacaatgaactgctcaaggagatagagcctgtgctgagccttctcaccagtgggagcagaggggtcaagggaggggcacctgccaaggcagagatgaaagatatgggaatccaggtggacagagatttggacggcaagtcacacaaacctctgcccctcggcgtggagaacgaccgagtcttcaatgacctatgggggaagggcaatgtgcctgtcgtcctcaacaacccatattcagagaaggagcagccccccacctcaggaaaacagtcccccacaaagaatggcagcccctccaagtgtccacgcttcctcaaggtcaagaactgggagactgaggtggttctcactgacaccctccaccttaagagcacattggaaacgggatgcactgagtacatctgcatgggctccatcatgcatccttctcagcatgcaaggaggcctgaagacgtccgcacaaaaggacagctcttccctctcgccaaagagtttattgatcaatactattcatcaattaaaagatttggctccaaagcccacatggaaaggctggaagaggtgaacaaagagatcgacaccactagcacttaccagctcaaggacacagagctcatctatggggccaagcacgcctggcggaatgcctcgcgctgtgtgggcaggatccagtggtccaagctgcaggtattcgatgcccgtgactgcaccacggcccacgggatgttcaactacatctgtaaccatgtcaagtatgccaccaacaaagggaacctcaggtctgccatcaccatattcccccagaggacagacggcaagcacgacttccgagtctggaactcccagctcatccgctacgctggctacaagcagcctgacggctccaccctgggggacccagccaatgtgcagttcacagagatatgcatacagcagggctggaaaccgcctagaggccgcttcgatgtcctgccgctcctgcttcaggccaacggcaatgaccctgagctcttccagattcctccagagctggtgttggaagttcccatcaggcaccccaagtttgagtggttcaaggacctggggctgaagtggtacggcctccccgccgtgtccaacatgctcctagagattggcggcctggagttcagcgcctgtcccttcagtggctggtacatgggcacagagattggtgtccgcgactactgtgacaactcccgctacaatatcctggaggaagtggccaagaagatgaacttagacatgaggaagacgtcctccctgtggaaggaccaggcgctggtggagatcaatatcgcggttctctatagcttccagagtgacaaagtgaccattgttgaccatcactccgccaccgagtccttcattaagcacatggagaatgagtaccgctgccgggggggctgccctgccgactgggtgtggatcgtgccccccatgtccggaagcatcacccctgtgttccaccaggagatgctcaactaccggctcaccccctccttcgaataccagcctgatccctggaacacgcatgtctggaaaggcaccaacgggacccccacaaagcggcgagccattggcttcaagaagctagcagaagctgtcaagttctcggccaagctgatggggcaggctatggccaagagggtgaaagcgaccatcctctatgccacagagacaggcaaatcgcaagcttatgccaagaccttgtgtgagatcttcaaacacgcctttgatgccaaggtgatgtccatggaagaatatgacattgtgcacctggaacatgaaactctggtccttgtggtcaccagcacctttggcaatggagatccccctgagaatggggagaaattcggctgtgctttgatggaaatgaggcaccccaactctgtgcaggaagaaaggaagagctacaaggtccgattcaacagcgtctcctcctactctgactcccaaaaatcatcaggcgatgggcccgacctcagagacaactttgagagtgctggacccctggccaatgtgaggttctcagtttttggcctcggctcacgagcataccctcacttttgcgccttcggacacgctgtggacaccctcctggaagaactgggaggggagaggatcctgaagatgagggaaggggatgagctctgtgggcaggaagaggctttcaggacctgggccaagaaggtcttcaaggcagcctgtgatgtcttctgtgtgggagatgatgtcaacattgaaaaggccaacaattccctcatcagcaatgatcgcagctggaagagaaacaagttccgcctcacctttgtggccgaagctccagaactcacacaaggtctatccaatgtccacaaaaagcgagtctcagctgcccggctccttagccgtcaaaacctccagagccctaaatccagtcggtcaactatcttcgtgcgtctccacaccaacgggagccaggagctgcagtaccagcctggggaccacctgggtgtcttccctggcaaccacgaggacctcgtgaatgccctgatcgagcggctggaggacgcgccgcctgtcaaccagatggtgaaagtggaactgctggaggagcggaacacggctttaggtgtcatcagtaactggacagacgagctccgcctcccgccctgcaccatcttccaggccttcaagtactacctggacatcaccacgccaccaacgcctctgcagctgcagcagtttgcctccctagctaccagcgagaaggagaagcagcgtctgctggtcctcagcaagggtttgcaggagtacgaggaatggaaatggggcaagaaccccaccatcgtggaggtgctggaggagttcccatctatccagatgccggccaccctgctcctgacccagctgtccctgctgcagccccgctactattccatcagctcctccccacacacacacacgctgtcagaaactcggccgtcccccctacctctgagctctcaatgctgctaa

SEQ ID NO: 13760 - DNA, 4304 bp, Artificial Sequence
  derived and/or modified sequence
atggaagaccacatgttcggagtccagcaaattcaacccaacgtgatatcggttcgtctgttcaagcggaaagttgggggacttggattccttgtgaaggagcgagtgtctaagccgcctgtgattattagcgacctgattagggggggagccgctgagcagagcggcctgatccaggctggggacatcatcctcgcagtgaatggccgacctctggtggacctgtcatatgattcagctcttgaggtattacgtggtatcgctagcgagacgcacgtagtgcttatccttaggggaccagagggattcacaactcacctggagaccaccttcaccggcgacggtactccaaagaccatacgcgtgacacagccacttgggcctcctactaaggccgttgacctatcacatcagccacccgcagggaaggagcagccactggctgtggatggagcatctggccctggaaatggtcctcaacacgcctatgatgatgggcaggaggcgggatccctgccacatgcgaacggcctggccccacgccctcccggacaggatccagcgaaaaaagctacccgagtttccttacagggcagaggtgaaaataacgaactcctaaaggagatcgagcccgtgctctctctgctgacttcggggagccgtggggttaaggggggagcccctgcaaaggccgaaatgaaggacatgggtatacaggtggaccgggatctggatggtaagtctcacaagccattgccactcggagtcgaaaatgacagggtgttcaacgacctctggggaaagggcaacgtcccagttgttttaaacaacccatactccgaaaaagaacagccacctacctctggcaaacagagccccactaagaatggaagtccaagcaaatgccccagattcctgaaagtgaaaaattgggaaacggaggtggtgttaactgacacactgcacctgaagtctactttggagactggctgcacagagtatatatgtatgggatccatcatgcacccgagccagcatgccaggagacccgaggatgttcgaactaaaggccagctgttcccattagctaaggagttcattgatcaatactactccagcatcaagaggttcggtagcaaggcccatatggaacgtctcgaggaagtgaataaagaaatcgacaccactagcacctaccaactgaaagataccgagctcatttacggagcgaaacacgcttggagaaatgccagcaggtgcgtcggccgaatacagtggtcaaaactccaggtcttcgacgcaagagattgtacaactgcacatggcatgttcaactacatctgcaatcatgtgaagtacgctacaaataagggcaatcttcggtcagcgattaccatatttcctcagcgcactgatggaaagcatgattttagggtgtggaattctcagctgattcgttatgcaggctataagcagccagatggaagcacactaggagatcctgccaacgtacaatttaccgagatttgcatccagcagggctggaagccgccaagaggtcgattcgacgttttgcccttacttcttcaggccaacgggaatgacccagaacttttccagatccccccagaactggtcctggaggtacctatcagacaccctaagttcgagtggttcaaagatttggggctgaagtggtatggtctgcccgctgtttccaacatgcttcttgagattggaggcttagaattctccgcctgtccttttagtgggtggtacatggggaccgaaattggggttcgcgattactgcgataattcacgatacaatattctggaggaggttgcaaaaaaaatgaacttggatatgcgtaagacatcttcattatggaaggatcaggcactggtggagatcaacatagccgtgctgtatagctttcagtctgacaaagttaccatcgtagatcatcactccgcgactgaaagctttattaagcacatggagaatgagtaccggtgtcggggaggttgtcctgcagattgggtttggatcgtacctcccatgtctgggtcaatcacacccgtgtttcatcaggagatgctgaactatcgactgactccatcattcgaatatcaacccgacccctggaacacacacgtgtggaaggggactaatggaactcccactaaacggagagcaataggatttaagaagctcgccgaggccgtcaagtttagtgcgaagctgatgggccaggcgatggcaaaacgggtgaaggcgaccatcctgtatgctacagagacagggaagtcccaggcgtatgccaagacactgtgtgagatatttaagcatgcatttgatgctaaggtcatgagcatggaagagtacgacatagttcatctcgaacatgaaacccttgtgttggttgtgacaagcacatttggcaatggcgatccccctgaaaatggggagaaattcggctgcgccttgatggaaatgcggcatccaaattccgtgcaggaggagcggaagtcatataaggtccgctttaactccgtgagctcctatagcgatagccagaagagtagcggagatggaccagacttacgggacaatttcgagagcgctggtcccctcgccaacgtcaggttttcagtcttcgggcttggttctcgggcttacccccacttctgtgctttcggacacgccgtggacactctgctggaggaactgggaggcgagaggattcttaagatgagagagggggacgagctgtgcggccaggaggaggcgtttcggacatgggcgaagaaggtttttaaagcagcctgtgatgtgttttgcgtgggggacgacgtgaacatcgagaaagcaaacaattctctgatcagtaacgacagaagctggaagcgcaacaaattccgactcacctttgtagcagaagcccctgagttgactcaggggttgtcgaacgtacataagaagagagtgtcggctgcgaggttattgtctcgccagaacttacaaagccctaagagctcaagaagtaccatatttgttcggttgcacaccaacggctcccaggagctgcagtaccagcccggagaccacttaggagtttttcctggcaaccacgaagacctcgtgaacgcattaattgagcgcctggaggacgcccctcctgttaaccaaatggtcaaggtggaattgcttgaggagagaaatacagcgctgggcgtgattagtaactggacagatgaactgagactgccgccatgtacgatcttccaggctttcaagtactatctggacattactaccccgcctactccacttcaattacaacagttcgccagccttgctacctcagagaaagaaaaacaacgattgctggttctgtctaagggattacaggaatacgaggagtggaagtggggtaagaatcccaccatcgtggaggtcctggaggagttccctagtattcaaatgccagcaaccctccttcttactcagttaagcctgcttcagccccgttactactcaattagtagttcaccggatatgtatcctgacgaagtccatctgacagtggctatcgtatcttatagaactcgggacggcgagggaccaattcaccacggggtctgttcctcttggctcaaccgcatccaggcggatgagcttgttccatgttttgtgaggggagccccatcttttcatctccctcgcaacccccaggtgccctgcatcctggtgggaccagggacaggcatcgcaccgtttcgcagcttttggcagcagaggcagttcgacattcagcacaagggaatgaacccatgtcctatggtgttggtgtttgggtgtagacaatcaaagatcgaccacatataccgagaggagacacttcaggccaagaacaagggcgtgttccgagaactgtacacagcttatagtagggagcccgataagcctaagaaatacgtgcaggacatcctgcaggaacagttagctgaatctgtttatagggccttaaaggagcagggaggccacatctatgtgtgtggtgacgtgaccatggccgctgacgtcctgaaggccatccagcgcattatgacacagcaggggaagctgagtgcggaggatgccggagtcttcatctctcggatgagagacgacaacagataccacgaggacatcttcggtgtcacccttaggacctatgaggtcaccaaccgactgcggtccgaatctattgcttttattgaggagagcaagaaggataccgacgaggtcttcagcagtta

SEQ ID NO: 13761 - DNA, 1224 bp, Artificial Sequence
  derived and/or modified sequence
atggaagaccacatgtttggggtccagcagatccagcctaacgttatcagtgttcgcctttttaaacggaaggtcggcggacttgggttcttggtgaaggagagagtgtccaaaccgccagtgattatcagtgatttgattaggggcggagccgcagagcagtccggtttgatccaggccggagacattatcctcgcggttaacggtcgccctttggtggacctttcttatgacagtgcgttagaggtgttgcgcggtatcgcatctgagacacatgttgtactgatcctgcggggacccgaggggttcaccacccaccttgagactacattcaccggtgatgggacacccaaaacaataagagtgactcaaccacttggccctcccaccaaggcagttgatttgtcacaccagccccctgctgggaaagaacagcccctagctgttgatggcgcatctggccctggaaatggcccacaacacgcgtatgacgatggccaagaagcaggaagcctgccccacgctaacggcctggctcctcgtccccctgggcaagaccctgccaaaaaggcaaccagagtgtctctgcaaggcaggggcgagaataatgagttgcttaaggaaatagaacccgtactatcactgctgacaagtggatcgaggggagtgaaagggggagcccctgcgaaggccgagatgaaggatatgggcatccaggtggacagggaccttgatgggaagtcacataaacccctccctctcggtgtggagaatgatagggtgttcaacgacctctggggaaaaggcaatgtgccagtagttcttaataacccctactctgagaaagaacagatgaggaaactgcgcattaccgaggggtttggagcccagcggggtagccacaaccatcctccaccccaggagaactcccctccccagaggatggccgcacccccttccgtccatgctagttctcggtctagaactggccgtctacgatggtttagcctaaccccatcaaccttgagagctcactggaaaagagatgcactttctacctccgcatgggcaccatcatgtatcctgttgagcatgcaggggggattgaagacgtccgcccagaaagactccagctccctttcgccaaagagcctcttaattaataccatccatcagttaaaggatctagccccaaaacctacctggaagggatggaaacggtag

SEQ ID NO: 13762 - DNA, 3621 bp, Artificial Sequence
  derived and/or modified sequence
atggaagatcacatgttcggggttcagcagattcaacccaatgttatttccgtgagacttttcaagcggaaggtggggggtcttgggttccttgtgaaggagagagtttctaagccccctgtgattatcagcgacctgattcgagggggagccgctgagcaatccgggctcatccaggcaggagacataatcttggcggtcaacggccgacccctcgttgatctgtcctatgactctgccctggaagtactgcgcggaatcgcctccgagacccatgtggtccttatactcaggggaccagaagggttcactactcacctcgaaacgacctttacaggggacggtacccctaagactatacgagtgacacagccattgggcccacctaccaaggctgtggacctgtcacatcagccaccggcaggcaaggagcagcccttagcggtggatggagcatctggacccggtaacgggcctcaacatgcttacgacgacggacaagaggccggttctttgccccacgccaacggccttgcccctcggccacctgggcaagatccggcaaagaaggcaacaagggtgtctctgcagggaaggggggagaacaatgaactgctgaaagagattgaacctgtgctaagtctgctgaccagtggttccaggggcgtcaaaggtggcgctccagctaaggcagagatgaaagatatgggcatacaggtggatcgggacttagacggaaaatcccacaagcccctgcctctgggcgtagaaaacgaccgagtgtttaatgacctttggggcaagggcaacgtgccggtagttcttaacaacccatactcggagaaggagcagccacccacatctggtaagcagtctccaactaaaaacggctcaccgtctaagtgcccaaggtttctgaaggtgaagaattgggaaaccgaggtcgtgctgaccgatacattgcacctcaagtctacactggagactggctgcacagagtatatttgcatgggctcaatcatgcacccatcacaacacgcccgacgacccgaggatgtgagaaccaagggacagctcttcccactggccaaggagttcattgatcaatactattcctctataaaacggttcgggtcgaaagcacatatggaaaggcttgaggaggtcaacaaagagatagacaccacaagcacctaccagctgaaagacacagagctgatctatggtgcaaaacatgcatggcgcaacgccagccgctgcgttgggaggatccagtggtcaaaactgcaggtgttcgacgctcgtgactgtaccacagcccacgggatgtttaattacatatgcaaccacgtcaagtacgccactaataagggtaacctgaggtctgccatcaccatcttcccacagcgcactgacggtaaacatgatttcagggtgtggaatagccagctgattagatatgccggatacaagcagcccgatggatccacccttggggaccccgcaaacgttcagttcaccgaaatatgtatccaacaggggtggaaaccacctcgcggacgttttgatgttttgcccttgcttctccaggctaacggtaatgaccccgagctttttcagatcccacccgagctcgtactggaggtccccattcgccaccccaaattcgaatggtttaaggacttgggtctgaaatggtacggacttcccgcagtatccaacatgctgctggaaatcggcggactcgagttctcagcgtgtcccttttccggatggtacatgggcactgaaatcggggtgagagattattgcgataatagccgctacaacatactggaggaggtcgccaaaaaaatgaatctagacatgaggaagacttcgagtctttggaaagatcaagcattggtggagatcaatatagcagtgctttatagtttccagagtgataaagtgacgatcgtagaccatcattcagccacagagtccttcatcaagcatatggagaacgagtaccggtgtcggggaggctgcccagcggattgggtgtggattgttccaccaatgtctggttcaatcacacctgttttccaccaggagatgctcaattaccgcctcactccatcgttcgaataccagccagatccttggaacacacatgtctggaagggtaccaacggaactcctacaaagaggagagccattggattcaagaagctggctgaggctgttaagttttcagccaagctcatgggccaagcaatggcaaagagggtgaaagcaacgatactttatgctactgagaccggaaaatcccaagcttacgcaaagactctgtgcgaaatcttcaagcatgccttcgacgcaaaggtcatgtctatggaggagtacgatattgttcacctggagcatgaaaccctcgtgcttgtcgttacttccacatttgggaacggcgatcctcctgagaatggtgaaaaatttggctgcgcccttatggagatgaggcacccaaattcagtccaggaagaaagaaagtcttataaggtacgcttcaattctgtgtcatcttactcagatagtcaaaaaagctccggggatggacccgatctcagggacaattttgagtccgctggtccgctggccaacgttcgcttcagtgtctttgggctgggatctcgggcatatcctcacttctgcgccttcggtcatgcggtcgataccctactggaggagctgggtggggaacgcatcctcaaaatgcgcgagggggacgagctctgcgggcaggaggaggcctttcgcacatgggctaagaaggtgtttaaggccgcttgcgacgtgttctgtgttggtgatgatgtcaatattgagaaggccaataactcgctcatctctaacgatcgatcttggaagcggaataagttccggctcaccttcgtggcagaagctccagagctgactcaaggtctctccaatgttcacaagaaacgggtgtccgccgcaagattgttatcgaggcaaaacctacaaagtcctaaatcctctaggtctactatatttgtgagactgcacacaaatggttcccaggagcttcagtaccaacccggtgatcatctcggcgtgttccctggcaaccacgaggatctggtgaacgccttaatcgagcgcctggaggatgcccctcctgtcaatcagatggtcaaagttgagctgcttgaagagagaaatacagccctcggtgtgataagtaattggaccgacgagcttaggctgcctccctgcacaattttccaggctttcaaatactatctcgacatcactacaccacccacccctcttcagctgcagcagttcgcgagcctggccaccagcgaaaaagagaagcagaggttgctggtgctctccaaaggccttcaagaatatgaggaatggaaatggggcaaaaatccgacaatcgtcgaagtgcttgaggaatttccctccatccagatgcctgcaactctgctgctgacccagttgtcgctactccagcctagatactattccatttctagcagcccccacacccacaccttatccgagacacgcccatcacccttgccactgtcatcgcagtgctgttag

SEQ ID NO: 13763 - DNA, 4305 bp, Artificial Sequence
  derived and/or modified sequence
atggaggaccacatgttcggcgtgcagcagatccagcccaacgtgatcagcgtgagactgttcaagagaaaggtgggcggcctgggcttcctggtgaaggagagagtgagcaagccccccgtgatcatcagcgacctgatcagaggcggcgccgccgagcagagcggcctgatccaggccggcgacatcatcctggccgtgaacggcagacccctggtggacctgagctacgacagcgccctggaggtgctgagaggcatcgccagcgagacccacgtggtgctgatcctgagaggccccgagggcttcaccacccacctggagaccaccttcaccggcgacggcacccccaagaccatcagagtgacccagcccctgggcccccccaccaaggccgtggacctgagccaccagccccccgccggcaaggagcagcccctggccgtggacggcgccagcggccccggcaacggcccccagcacgcctacgacgacggccaggaggccggcagcctgccccacgccaacggcctggcccccagaccccccggccaggaccccgccaagaaggccaccagagtgagcctgcagggcagaggcgagaacaacgagctgctgaaggagatcgagcccgtgctgagcctgctgaccagcggcagcagaggcgtgaagggcggcgcccccgccaaggccgagatgaaggacatgggcatccaggtggacagagacctggacggcaagagccacaagcccctgcccctgggcgtggagaacgacagagtgttcaacgacctgtggggcaagggcaacgtgcccgtggtgctgaacaacccctacagcgagaaggagcagccccccaccagcggcaagcagagccccaccaagaacggcagccccagcaagtgccccagattcctgaaggtgaagaactgggagaccgaggtggtgctgaccgacaccctgcacctgaagagcaccctggagaccggctgcaccgagtacatctgcatgggcagcatcatgcaccccagccagcacgccagaagacccgaggacgtgagaaccaagggccagctgttccccctggccaaggagttcatcgaccagtactacagcagcatcaagagattcggcagcaaggcccacatggagagactggaggaggtgaacaaggagatcgacaccaccagcacctaccagctgaaggacaccgagctgatctacggcgccaagcacgcctggagaaacgccagcagatgcgtgggcagaatccagtggagcaagctgcaggtgttcgacgccagagactgcaccaccgcccacggcatgttcaactacatctgcaaccacgtgaagtacgccaccaacaagggcaacctgagaagcgccatcaccatcttcccccagagaaccgacggcaagcacgacttcagagtgtggaacagccagctgatcagatacgccggctacaagcagcccgacggcagcaccctgggcgaccccgccaacgtgcagttcaccgagatctgcatccagcagggctggaagccccccagaggcagattcgacgtgctgcccctgctgctgcaggccaacggcaacgaccccgagctgttccagatcccccccgagctggtgctggaggtgcccatcagacaccccaagttcgagtggttcaaggacctgggcctgaagtggtacggcctgcccgccgtgagcaacatgctgctggagatcggcggcctggagttcagcgcctgccccttcagcggctggtacatgggcaccgagatcggcgtgagagactactgcgacaacagcagatacaacatcctggaggaggtggccaagaagatgaacctggacatgagaaagaccagcagcctgtggaaggaccaggccctggtggagatcaacatcgccgtgctgtacagcttccagagcgacaaggtgaccatcgtggaccaccacagcgccaccgagagcttcatcaagcacatggagaacgagtacagatgcagaggcggctgccccgccgactgggtgtggatcgtgccccccatgagcggcagcatcacccccgtgttccaccaggagatgctgaactacagactgacccccagcttcgagtaccagcccgacccctggaacacccacgtgtggaagggcaccaacggcacccccaccaagagaagagccatcggcttcaagaagctggccgaggccgtgaagttcagcgccaagctgatgggccaggccatggccaagagagtgaaggccaccatcctgtacgccaccgagaccggcaagagccaggcctacgccaagaccctgtgcgagatcttcaagcacgccttcgacgccaaggtgatgagcatggaggagtacgacatcgtgcacctggagcacgagaccctggtgctggtggtgaccagcaccttcggcaacggcgacccccccgagaacggcgagaagttcggctgcgccctgatggagatgagacaccccaacagcgtgcaggaggagagaaagagctacaaggtgagattcaacagcgtgagcagctacagcgacagccagaagagcagcggcgacggccccgacctgagagacaacttcgagagcgccggccccctggccaacgtgagattcagcgtgttcggcctgggcagcagagcctacccccacttctgcgccttcggccacgccgtggacaccctgctggaggagctgggcggcgagagaatcctgaagatgagagagggcgacgagctgtgcggccaggaggaggccttcagaacctgggccaagaaggtgttcaaggccgcctgcgacgtgttctgcgtgggcgacgacgtgaacatcgagaaggccaacaacagcctgatcagcaacgacagaagctggaagagaaacaagttcagactgaccttcgtggccgaggcccccgagctgacccagggcctgagcaacgtgcacaagaagagagtgagcgccgccagactgctgagcagacagaacctgcagagccccaagagcagcagaagcaccatcttcgtgagactgcacaccaacggcagccaggagctgcagtaccagcccggcgaccacctgggcgtgttccccggcaaccacgaggacctggtgaacgccctgatcgagagactggaggacgccccccccgtgaaccagatggtgaaggtggagctgctggaggagagaaacaccgccctgggcgtgatcagcaactggaccgacgagctgagactgcccccctgcaccatcttccaggccttcaagtactacctggacatcaccaccccccccacccccctgcagctgcagcagttcgccagcctggccaccagcgagaaggagaagcagagactgctggtgctgagcaagggcctgcaggagtacgaggagtggaagtggggcaagaaccccaccatcgtggaggtgctggaggagttccccagcatccagatgcccgccaccctgctgctgacccagctgagcctgctgcagcccagatactacagcatcagcagcagccccgacatgtaccccgacgaggtgcacctgaccgtggccatcgtgagctacagaaccagagacggcgagggccccatccaccacggcgtgtgcagcagctggctgaacagaatccaggccgacgagctggtgccctgcttcgtgagaggcgcccccagcttccacctgcccagaaacccccaggtgccctgcatcctggtgggccccggcaccggcatcgcccccttcagaagcttctggcagcagagacagttcgacatccagcacaagggcatgaacccctgccccatggtgctggtgttcggctgcagacagagcaagatcgaccacatctacagagaggagaccctgcaggccaagaacaagggcgtgttcagagagctgtacaccgcctacagcagagagcccgacaagcccaagaagtacgtgcaggacatcctgcaggagcagctggccgagagcgtgtacagagccctgaaggagcagggcggccacatctacgtgtgcggcgacgtgaccatggccgccgacgtgctgaaggccatccagagaatcatgacccagcagggcaagctgagcgccgaggacgccggcgtgttcatcagcagaatgagagacgacaacagataccacgaggacatcttcggcgtgaccctgagaacctacgaggtgaccaacagactgagaagcgagagcatcgccttcatcgaggagagcaagaaggacaccgacgaggtgttcagcagctag

SEQ ID NO: 13764 - DNA, 1224 bp, Artificial Sequence
  derived and/or modified sequence
atggaggaccacatgttcggcgtgcagcagatccagcccaacgtgatcagcgtgagactgttcaagagaaaggtgggcggcctgggcttcctggtgaaggagagagtgagcaagccccccgtgatcatcagcgacctgatcagaggcggcgccgccgagcagagcggcctgatccaggccggcgacatcatcctggccgtgaacggcagacccctggtggacctgagctacgacagcgccctggaggtgctgagaggcatcgccagcgagacccacgtggtgctgatcctgagaggccccgagggcttcaccacccacctggagaccaccttcaccggcgacggcacccccaagaccatcagagtgacccagcccctgggcccccccaccaaggccgtggacctgagccaccagccccccgccggcaaggagcagcccctggccgtggacggcgccagcggccccggcaacggcccccagcacgcctacgacgacggccaggaggccggcagcctgccccacgccaacggcctggcccccagaccccccggccaggaccccgccaagaaggccaccagagtgagcctgcagggcagaggcgagaacaacgagctgctgaaggagatcgagcccgtgctgagcctgctgaccagcggcagcagaggcgtgaagggcggcgcccccgccaaggccgagatgaaggacatgggcatccaggtggacagagacctggacggcaagagccacaagcccctgcccctgggcgtggagaacgacagagtgttcaacgacctgtggggcaagggcaacgtgcccgtggtgctgaacaacccctacagcgagaaggagcagatgagaaagctgagaatcaccgagggcttcggcgcccagagaggcagccacaaccacccccccccccaggagaacagccccccccagagaatggccgccccccccagcgtgcacgccagcagcagaagcagaaccggcagactgagatggttcagcctgacccccagcaccctgagagcccactggaagagagacgccctgagcaccagcgcctgggcccccagctgcatcctgctgagcatgcagggcggcctgaagaccagcgcccagaaggacagcagcagcctgagccccaagagcctgctgatcaacaccatccaccagctgaaggacctggcccccaagcccacctggaagggctggaagagatag

SEQ ID NO: 13765 - DNA, 3621 bp, Artificial Sequence
  derived and/or modified sequence
atggaggaccacatgttcggcgtgcagcagatccagcccaacgtgatcagcgtgagactgttcaagagaaaggtgggcggcctgggcttcctggtgaaggagagagtgagcaagccccccgtgatcatcagcgacctgatcagaggcggcgccgccgagcagagcggcctgatccaggccggcgacatcatcctggccgtgaacggcagacccctggtggacctgagctacgacagcgccctggaggtgctgagaggcatcgccagcgagacccacgtggtgctgatcctgagaggccccgagggcttcaccacccacctggagaccaccttcaccggcgacggcacccccaagaccatcagagtgacccagcccctgggcccccccaccaaggccgtggacctgagccaccagccccccgccggcaaggagcagcccctggccgtggacggcgccagcggccccggcaacggcccccagcacgcctacgacgacggccaggaggccggcagcctgccccacgccaacggcctggcccccagaccccccggccaggaccccgccaagaaggccaccagagtgagcctgcagggcagaggcgagaacaacgagctgctgaaggagatcgagcccgtgctgagcctgctgaccagcggcagcagaggcgtgaagggcggcgcccccgccaaggccgagatgaaggacatgggcatccaggtggacagagacctggacggcaagagccacaagcccctgcccctgggcgtggagaacgacagagtgttcaacgacctgtggggcaagggcaacgtgcccgtggtgctgaacaacccctacagcgagaaggagcagccccccaccagcggcaagcagagccccaccaagaacggcagccccagcaagtgccccagattcctgaaggtgaagaactgggagaccgaggtggtgctgaccgacaccctgcacctgaagagcaccctggagaccggctgcaccgagtacatctgcatgggcagcatcatgcaccccagccagcacgccagaagacccgaggacgtgagaaccaagggccagctgttccccctggccaaggagttcatcgaccagtactacagcagcatcaagagattcggcagcaaggcccacatggagagactggaggaggtgaacaaggagatcgacaccaccagcacctaccagctgaaggacaccgagctgatctacggcgccaagcacgcctggagaaacgccagcagatgcgtgggcagaatccagtggagcaagctgcaggtgttcgacgccagagactgcaccaccgcccacggcatgttcaactacatctgcaaccacgtgaagtacgccaccaacaagggcaacctgagaagcgccatcaccatcttcccccagagaaccgacggcaagcacgacttcagagtgtggaacagccagctgatcagatacgccggctacaagcagcccgacggcagcaccctgggcgaccccgccaacgtgcagttcaccgagatctgcatccagcagggctggaagccccccagaggcagattcgacgtgctgcccctgctgctgcaggccaacggcaacgaccccgagctgttccagatcccccccgagctggtgctggaggtgcccatcagacaccccaagttcgagtggttcaaggacctgggcctgaagtggtacggcctgcccgccgtgagcaacatgctgctggagatcggcggcctggagttcagcgcctgccccttcagcggctggtacatgggcaccgagatcggcgtgagagactactgcgacaacagcagatacaacatcctggaggaggtggccaagaagatgaacctggacatgagaaagaccagcagcctgtggaaggaccaggccctggtggagatcaacatcgccgtgctgtacagcttccagagcgacaaggtgaccatcgtggaccaccacagcgccaccgagagcttcatcaagcacatggagaacgagtacagatgcagaggcggctgccccgccgactgggtgtggatcgtgccccccatgagcggcagcatcacccccgtgttccaccaggagatgctgaactacagactgacccccagcttcgagtaccagcccgacccctggaacacccacgtgtggaagggcaccaacggcacccccaccaagagaagagccatcggcttcaagaagctggccgaggccgtgaagttcagcgccaagctgatgggccaggccatggccaagagagtgaaggccaccatcctgtacgccaccgagaccggcaagagccaggcctacgccaagaccctgtgcgagatcttcaagcacgccttcgacgccaaggtgatgagcatggaggagtacgacatcgtgcacctggagcacgagaccctggtgctggtggtgaccagcaccttcggcaacggcgacccccccgagaacggcgagaagttcggctgcgccctgatggagatgagacaccccaacagcgtgcaggaggagagaaagagctacaaggtgagattcaacagcgtgagcagctacagcgacagccagaagagcagcggcgacggccccgacctgagagacaacttcgagagcgccggccccctggccaacgtgagattcagcgtgttcggcctgggcagcagagcctacccccacttctgcgccttcggccacgccgtggacaccctgctggaggagctgggcggcgagagaatcctgaagatgagagagggcgacgagctgtgcggccaggaggaggccttcagaacctgggccaagaaggtgttcaaggccgcctgcgacgtgttctgcgtgggcgacgacgtgaacatcgagaaggccaacaacagcctgatcagcaacgacagaagctggaagagaaacaagttcagactgaccttcgtggccgaggcccccgagctgacccagggcctgagcaacgtgcacaagaagagagtgagcgccgccagactgctgagcagacagaacctgcagagccccaagagcagcagaagcaccatcttcgtgagactgcacaccaacggcagccaggagctgcagtaccagcccggcgaccacctgggcgtgttccccggcaaccacgaggacctggtgaacgccctgatcgagagactggaggacgccccccccgtgaaccagatggtgaaggtggagctgctggaggagagaaacaccgccctgggcgtgatcagcaactggaccgacgagctgagactgcccccctgcaccatcttccaggccttcaagtactacctggacatcaccaccccccccacccccctgcagctgcagcagttcgccagcctggccaccagcgagaaggagaagcagagactgctggtgctgagcaagggcctgcaggagtacgaggagtggaagtggggcaagaaccccaccatcgtggaggtgctggaggagttccccagcatccagatgcccgccaccctgctgctgacccagctgagcctgctgcagcccagatactacagcatcagcagcagcccccacacccacaccctgagcgagaccagacccagccccctgcccctgagcagccagtgctgctag

SEQ ID NO: 13766 - DNA, 12189 bp, Artificial Sequence
  derived and/or modified sequence
ataaaagatgtatgctttggagcccagagcggctcttttaatgagggttgcgacgtctccctccccacacccataaaccagtcgggttggacgtcactgctaattcgtttcagtgatgataggataaaggagggacattaagaaataaattccccctcacgaccctcgctgagctcacggctcagtccctacatatttatgccgcgtttccagccgctgggtgaggagctacttagcgccgcggctcctccgaggggcggccgggcagcgagcagcggccgagcggacgggctcatgatgcctcagatctgatccgcatctaacaggctggcaatgaagatacccagagaatagttcacatctatcatgcgtcacttctagacacagccatcagacgcatctcctcccctttctgcctgaccttagggacacgtcccaccgcctctcttgacgtctgcctggtcaaccatcacttccttagagaataaggagagaggcggatgcaggaaatcatgccaccgacgggccaccagccatgagtgggtgacgctgagctgacgtcaaagacagagagggctgaagccttgtcagcacctgtcaccccggctcctgctctccgtgtagcctgaagcctggatcctcctggtgaaatcatcttggcctgatagcattgtgaggtcttcagacaggacccctcggaagctagttaccatggaggatcacatgttcggtgttcagcaaatccagcccaatgtcatttctgttcgtctcttcaagcgcaaagttgggggcctgggatttctggtgaaggagcgggtcagtaagccgcccgtgatcatctctgacctgattcgtgggggcgccgcagagcagagtggcctcatccaggccggagacatcattcttgcggtcaacggccggcccttggtggacctgagctatgacagcgccctggaggtactcagaggcattgcctctgagacccacgtggtcctcattctgaggggccctgaaggtttcaccacgcacctggagaccacctttacaggtgatgggacccccaagaccatccgggtgacacagcccctgggtccccccaccaaagccgtggatctgtcccaccagccaccggccggcaaagaacagcccctggcagtggatggggcctcgggtcccgggaatgggcctcagcatgcctacgatgatgggcaggaggctggctcactcccccatgccaacggcctggcccccaggcccccaggccaggaccccgcgaagaaagcaaccagagtcagcctccaaggcagaggggagaacaatgaactgctcaaggagatagagcctgtgctgagccttctcaccagtgggagcagaggggtcaagggaggggcacctgccaaggcagagatgaaagatatgggaatccaggtggacagagatttggacggcaagtcacacaaacctctgcccctcggcgtggagaacgaccgagtcttcaatgacctatgggggaagggcaatgtgcctgtcgtcctcaacaacccatattcagagaaggagcagccccccacctcaggaaaacagtcccccacaaagaatggcagcccctccaagtgtccacgcttcctcaaggtcaagaactgggagactgaggtggttctcactgacaccctccaccttaagagcacattggaaacgggatgcactgagtacatctgcatgggctccatcatgcatccttctcagcatgcaaggaggcctgaagacgtccgcacaaaaggacagctcttccctctcgccaaagagtttattgatcaatactattcatcaattaaaagatttggctccaaagcccacatggaaaggctggaagaggtgaacaaagagatcgacaccactagcacttaccagctcaaggacacagagctcatctatggggccaagcacgcctggcggaatgcctcgcgctgtgtgggcaggatccagtggtccaagctgcaggtattcgatgcccgtgactgcaccacggcccacgggatgttcaactacatctgtaaccatgtcaagtatgccaccaacaaagggaacctcaggtctgccatcaccatattcccccagaggacagacggcaagcacgacttccgagtctggaactcccagctcatccgctacgctggctacaagcagcctgacggctccaccctgggggacccagccaatgtgcagttcacagagatatgcatacagcagggctggaaaccgcctagaggccgcttcgatgtcctgccgctcctgcttcaggccaacggcaatgaccctgagctcttccagattcctccagagctggtgttggaagttcccatcaggcaccccaagtttgagtggttcaaggacctggggctgaagtggtacggcctccccgccgtgtccaacatgctcctagagattggcggcctggagttcagcgcctgtcccttcagtggctggtacatgggcacagagattggtgtccgcgactactgtgacaactcccgctacaatatcctggaggaagtggccaagaagatgaacttagacatgaggaagacgtcctccctgtggaaggaccaggcgctggtggagatcaatatcgcggttctctatagcttccagagtgacaaagtgaccattgttgaccatcactccgccaccgagtccttcattaagcacatggagaatgagtaccgctgccgggggggctgccctgccgactgggtgtggatcgtgccccccatgtccggaagcatcacccctgtgttccaccaggagatgctcaactaccggctcaccccctccttcgaataccagcctgatccctggaacacgcatgtctggaaaggcaccaacgggacccccacaaagcggcgagccattggcttcaagaagctagcagaagctgtcaagttctcggccaagctgatggggcaggctatggccaagagggtgaaagcgaccatcctctatgccacagagacaggcaaatcgcaagcttatgccaagaccttgtgtgagatcttcaaacacgcctttgatgccaaggtgatgtccatggaagaatatgacattgtgcacctggaacatgaaactctggtccttgtggtcaccagcacctttggcaatggagatccccctgagaatggggagaaattcggctgtgctttgatggaaatgaggcaccccaactctgtgcaggaagaaaggaagagctacaaggtccgattcaacagcgtctcctcctactctgactcccaaaaatcatcaggcgatgggcccgacctcagagacaactttgagagtgctggacccctggccaatgtgaggttctcagtttttggcctcggctcacgagcataccctcacttttgcgccttcggacacgctgtggacaccctcctggaagaactgggaggggagaggatcctgaagatgagggaaggggatgagctctgtgggcaggaagaggctttcaggacctgggccaagaaggtcttcaaggcagcctgtgatgtcttctgtgtgggagatgatgtcaacattgaaaaggccaacaattccctcatcagcaatgatcgcagctggaagagaaacaagttccgcctcacctttgtggccgaagctccagaactcacacaaggtctatccaatgtccacaaaaagcgagtctcagctgcccggctccttagccgtcaaaacctccagagccctaaatccagtcggtcaactatcttcgtgcgtctccacaccaacgggagccaggagctgcagtaccagcctggggaccacctgggtgtcttccctggcaaccacgaggacctcgtgaatgccctgatcgagcggctggaggacgcgccgcctgtcaaccagatggtgaaagtggaactgctggaggagcggaacacggctttaggtgtcatcagtaactggacagacgagctccgcctcccgccctgcaccatcttccaggccttcaagtactacctggacatcaccacgccaccaacgcctctgcagctgcagcagtttgcctccctagctaccagcgagaaggagaagcagcgtctgctggtcctcagcaagggtttgcaggagtacgaggaatggaaatggggcaagaaccccaccatcgtggaggtgctggaggagttcccatctatccagatgccggccaccctgctcctgacccagctgtccctgctgcagccccgctactattccatcagctcctccccagacatgtaccctgatgaagtgcacctcactgtggccatcgtttcctaccgcactcgagatggagaaggaccaattcaccacggcgtatgctcctcctggctcaaccggatacaggctgacgaactggtcccctgtttcgtgagaggagcacccagcttccacctgccccggaacccccaagtcccctgcatcctcgttggaccaggcaccggcattgcccctttccgaagcttctggcaacagcggcaatttgatatccaacacaaaggaatgaacccctgccccatggtcctggtcttcgggtgccggcaatccaagatagatcatatctacagggaagagaccctgcaggccaagaacaagggggtcttcagagagctgtacacggcttactcccgggagccagacaaaccaaagaagtacgtgcaggacatcctgcaggagcagctggcggagtctgtgtaccgagccctgaaggagcaagggggccacatatacgtctgtggggacgtcaccatggctgctgatgtcctcaaagccatccagcgcatcatgacccagcaggggaagctctcggcagaggacgccggcgtattcatcagccggatgagggatgacaaccgataccatgaggatatttttggagtcaccctgcgaacgtacgaagtgaccaaccgccttagatctgagtccattgccttcattgaagagagcaaaaaagacaccgatgaggttttcagctcctaactggaccctcttgcccagccggctgcaagttttgtaagcgcggacagacactgctgaacctttcctctgggaccccctgtggccctcgctctgcctcctgtccttgtcgctgtgccctggtttccctcctcgggcttctcgcccctcagtggtttcctcggccctcctgggtttactccttgagttttcctgctgcgatgcaatgcttttctaatctgcagtggctcttacaaaactctgttcccactccctctcttgccgacaagggcaactcacgggtgcatgaaaccactggaacatggccgtcgctgtgggggtttttttctctggggttcccctggaaaggctgcaggaactaggcacaagctctctgagccagtccctcagccactgaagtccccctttctccttttttatgatgacattttggttgtgcgtgcctgtgtgtgtgtgtgtgtgtgtgtgtgtgtgtgtgatgggccaggtctctgtccgtcctcttccctgcacaagtgtgtcgatcttagattgccactgctttcattgaagaccctcaatgccaagaaacgtgtccctggcccatattaatccctcgtgtgtccataattagggtccacgcccatgtacctgaaacatttggaagccccataattgttctagttagaaagggttcagggcatggggagaggagtgggaaattgattaaaggggctgtctcccaatgaaagaggcattcccagaatttgctgcatttagattttgataccagtgagcagagccctcatgtgacatgaacccatccaatggattgtgcaaatcccctccccaaacccacccataccagctagaatcacttgactttgccacatccattgactgaccccctcctccagcaatagcatccaaggggcctggaagttatgttgttcaaagaagcctggtggcaataaggatcttcccactttgccactggatgactttggatgggtcacttgtcctcagtttttcctagtcataatgtcatacgaacctaaagaatatgaatggattaaatgttaaagctttggtgcctggaaacaatatcaagtaacaatatgattattatttttttattcccccaaagcgggcttgctgcttcacccttggggatgaaataatggaagctggttaaagtggatgaggttggaaagagttgccataatgaggtcccacgtggcttcttcgataggagccacaacttggggtgggaagaacttgtccctcaggcttgttgccctctgcagttgatctccaaagttttaaacctgttaaattaattttgacaaataagttaccctcaactcagatcaaaaatgggcagccaagtcttcggtaggaattggagccggtgtaattcctccctaagaggcaacctgttgaatttactctctcagagtaaatggtgggaagggatccctttgtatacttttttaaatactacaaattagtgtcaggcagttcccagaaagagacaagaaatcctagtggcctcccagactgcagggtccccaaggatggaaagggaatgttctgctggttctaccctgtttgttgtgtcttgctatacagaaaaaccacatttcttttatatactgtacgtgggcatatcttgttgttcagtttgggtgtctgctaaagaggaagtgcactggccctctttgaaagggctttacagtgggggcaccaagaccccaaagggcccaggccaggagactgttaaagtgaaaaggcaatctatgactcaccttgctctgccatccctggcagcccccaccggtgtcctgttcctgccacatggagcttgacttcatgccagctataatctcccctgccttcctttaatcccaatttcccctgctcactcttccacagatataaagaacaaacacttagcatcccacactcaccccttctaatcctgaagggaagcccattctaaactcctttcctgcaaacccatttccagctcctagtagctttcctcccaaaggctttctttccaatcctttatagctttggagacgcctccccaattccccagggaaggaaactgttgtgtccaatccccattaaagacaaattgatcagtgcttcccactccaagtcaagctttatgcaggaatgcttttccatcagggaataaatacttagaagcgcttacaaggtgccaggcacctcctttctgcatgtgcctgcctttctagtagcagacagatggaaacattgtctcattttgtcaaggagtccaaagaaatgattataaaaccaggattcatccttcttctccagaaagatttttttttaagtaaacacctttcaatccccaacacaagctgcttcacaactccaggctagaaggcaggagagcgatctgatgtgtttctttcatttgccagaattcctgataccaaaagcctctctctctgttgagtaacctctcaaggaccagagtggagtccagattgttaggctcagatcaagggtggggaaatactgccctctcgtggtggcttttcatccaggcctcgtagccaaccgtttaagtgcaaaatagaattaagcaatgggtaagcaaaatagggttgacaagatatttgggggttattcgggttatggcccatttatttccctcttccccctgaattgaccagtagcagctccagccccatttcacaaaagtgagtttggccaggaggaatgagacgtctcctgaaataggaacaccggaacatcatgctcacctgccatcactatgcatccagttcccacagcttgtgtcgtgaaagagcagagagatgatgttaaactccttgggaggagagagggcttcttttggtttccctggagtgagacagccaggtgtctttcttttgcggggggacacttcagacccatcaatatggaattttgggagccgacctgagtgcaaatcctaattctgcccctgttggtgcagatggctgtgggcggctcacttgaccttttagagtctgcatacccacctgtataacaaggtggattgaatgagacaatgcccacgaaatgcccagttacagtacctggttcaaaacttactgcattttaatttttcacttaacttataacatgtcttgcttctccagtgtgtggaaggcaccgggcagtttgcagagataagcaaaacacagttcctctcgtgcagaaggttagaatctatttttttttttgacagagtcttgctctgtcacccaggctggcgtacagtggtacgatctcagctcactgcatcctctgcctcccccagttcaagtgattcttctgcctcggcctcctgagtaactgggactacaggcgcctaccaccacgcccagctaagttttgtatttttagtagagtcagggtttcaccatgttggccaggctggtcttgaattcctgacctcaaatgatccacgcacctcagcctcccaaagtgctggattacaggcatgagccaccacgcccagccaaaggttataatctgatggagagagacacccgtcttggaactgacataaatttctggggtttgagaaatgggcgggatttcactggtagcttctggaaggtaagagttgtccaggaattgggaagagtgagaggaaaggcacggacagggagcatgtaagataaattgaggctggctttggaaggctgaggagggtgagaaaaggtgggctgggaccagaccgtggggagaggtgagtggcattacaagaaatttaggctttattcagaaggcaacagggagtccctaagaatgtttttcaaaaagggacattaaggcgattggagttatacttggaaaagaaagttctggccacagtacagagcatggcccgttgagctgttgggggggttattgctgcaaccaaggcttgagtgagggaagaggcggatgtagtgataaagagactccaggaactgaatcagcgtacctggcaccccatccattgtagagggtgagaataaaggagaaattaaagcatcttgcaggctgggcgcggtagctcatgtctgtaatcccagcactttgggaggccgaggtgggtgtatcagttgaggtcaggagttggagaccagtcagccagttagtagaaaccctgactctactaagaaaatacaaaaattagctgggcatggtggcatgcgcctgtagtctcagctacctgggaggctgaggaaggaggatcgcttgagcccaggaggtggaggctgcagtgagccaagattgtaccactgcactccagcctgggtgacagagcaagactcttatctcaaaaaaaataaaataaaataaaataaaataaaacatcttgcccctagctgagagagaggtctctgaagagcaggctcagggaaaagatgagttttcagagctgatgtgatagtcagcttctctggagtcaacagggtgaatccttcccaagtccagccatgcccagatgcccggagggaaaactgacccccagccagtagacattggctaagaacacagaatcttctgaccaaacacgctttcagcagctgcctgctctggactttgaaagaggtcaggtcttgccctaagctcaaaacaagtgagaggtgtcctgacctagctcatagggcaaatggtcctaataggatgggcaatccagatgcctgagccccttcactccgacagcaccagcgcctaatgcagccttttcattcttgccattaggaaatctgtggacttctagcctgtgttttaaaccagccatgtttccttgtatatttccctacccgctgccccacatacccagcatgccgctgtggccaccatgtcctcaaagccttctgtctgtatcaggaatgtagtctgagactgccaggaagcaacaaggagagagaaacactaactagtcttcctttataacccattcatactctctggctgtccccaaccttcatagtctcctgcatccaaatgtcctctttggctcaaaaagtaggccaggcatggtggttcatgcctgtaatagcactttgggagactgaggtgggaggatcacttggggccaggagtttgagaccagcttgggcaacacagcgcaatctcgtctctactaaaaaaaaaaaaaaaaaaaaattagctgggcatgatggcatgctcctgtggtcccagctacttgggaggctgaggcaggaggatcacttggtcccaggagtttgaggcgacagtgagctaggatcgcaccactgcactccagcctgagtgacagagcaagaccctgtctctaaaaaaaattaaaatgaaagaccaggtgctgggattaaggaaacacaggtctgagggtctgagggaaggggcctgcctcccagggagtcaacatagatgttccccatgaacagggatttgactttggaggccaacctggcctggcctctgccctttatctcacactccctatccttggcccactgccagtccctgccttgtggcaaaggggccccaaaagaaaagctgcccttccccaaatgtaaggacccaggtacactttcacccgtggaaagcagtgtctgtcgagagtctgtttcctattaatacttatcaaagccatgtgcgagggaggtggtcagctgtcaatatgccttagtatgtttatatgagtttgttttgttctaaaatacccaaacagttctggtcaagcggggctatgcccgtctggcccaaaacacagtccgttattaacgagatggccctggcaggcgggaacaaatctgcctccatgcactgcttcctgtagtcttttagaaagtaactccaggacatcgaagtgcccagatttgactcctaagttctaggagactgtagcgcagggtctgtcaaccttagcactattggcatttggggctgggtaattctttcttgtgggggccgtcttgggtactgtaggaagctgagcagcattcctggcctccatccacaagatacctgtagcagtgtcctgccaacggtaacaatcaagtatgtcatcagacattgcccaatgtccccagggggcaacacccctctcttggacttcagggtcaagagaatctctgctggctaccccaggacttctcattatagatttcctggagcacgcagcagaaactttgcctagcccagtggttgtttccattatctgctgccaaagtgggatttgagggtgtccgggggagggggcatggggagggcagtatgctttcaaaaacccctcccaggccaggcgtggtggctcatgcctgtaatcacaggactttgggaggccgaggctggcagatcacttgaggctgggagttagagaccaacctggctaacatggcaaaacctcgtctctactaaaaatacaaaaatcagcccggcgtggtggcgggcatctgtaatcccatctactcgggaggctgaggcaggagaattacttgaacccaggaggcagaggctgcagtgagccgagatggcaccactgcactccagcttgttgacagaatgagaccctgtggaaaaaaaaaaaaaagccctcccatgccagaacagaggatggcagtctgtttcaataagacactgtgtccttggtgttggttctgattaagactcactgagatccagtgctcttgagctgggtctcagtcccctcccatgtcctgtgctctgccgccactgttttcattgttgtgttctcgttgtgattgttaagactcacactcctggctcagcagtggttttccagaaggcccaaagagcggtgccgggcaccccacgtcgcagtgtccgttccgggcttgggaagctggggaggtgggcagacctggtcgcatctcaccacacacacacacacacacacacacacacacgctgtcagaaactcggccgtcccccctacctctgagctctcaatgctgctaatctctgccaagtgtccctgtgctccagcaccttccttgaaggactgacgcccaccccacgctctttgcgaggttgtccaggctgtgtttgtcgcatgctcttcttctgtatagttctcatcttccaattttatgggattcaacaaaagcctattatgcttgtttgcattatggttacaatattaaaaagtggattcaaaaaaaa

SEQ ID NO: 13767 - DNA, 10776 bp, Artificial Sequence
  derived and/or modified sequence
cggggaggatgagacattctagagccttggtggtaactgctttccttagccgctgatggctggccaggaagataaggacatcagggattctgtgatgaggaaactgagaatcacagagggttttggtgctcaacgagggtcacataaccaccccccacctcaggaaaacagtcccccacaaagaatggcagcccctccaagtgtccacgcttcctcaaggtcaagaactgggagactgaggtggttctcactgacaccctccaccttaagagcacattggaaacgggatgcactgagtacatctgcatgggctccatcatgcatccttctcagcatgcaaggaggcctgaagacgtccgcacaaaaggacagctcttccctctcgccaaagagtttattgatcaatactattcatcaattaaaagatttggctccaaagcccacatggaaaggctggaagaggtgaacaaagagatcgacaccactagcacttaccagctcaaggacacagagctcatctatggggccaagcacgcctggcggaatgcctcgcgctgtgtgggcaggatccagtggtccaagctgcaggtattcgatgcccgtgactgcaccacggcccacgggatgttcaactacatctgtaaccatgtcaagtatgccaccaacaaagggaacctcaggtctgccatcaccatattcccccagaggacagacggcaagcacgacttccgagtctggaactcccagctcatccgctacgctggctacaagcagcctgacggctccaccctgggggacccagccaatgtgcagttcacagagatatgcatacagcagggctggaaaccgcctagaggccgcttcgatgtcctgccgctcctgcttcaggccaacggcaatgaccctgagctcttccagattcctccagagctggtgttggaagttcccatcaggcaccccaagtttgagtggttcaaggacctggggctgaagtggtacggcctccccgccgtgtccaacatgctcctagagattggcggcctggagttcagcgcctgtcccttcagtggctggtacatgggcacagagattggtgtccgcgactactgtgacaactcccgctacaatatcctggaggaagtggccaagaagatgaacttagacatgaggaagacgtcctccctgtggaaggaccaggcgctggtggagatcaatatcgcggttctctatagcttccagagtgacaaagtgaccattgttgaccatcactccgccaccgagtccttcattaagcacatggagaatgagtaccgctgccgggggggctgccctgccgactgggtgtggatcgtgccccccatgtccggaagcatcacccctgtgttccaccaggagatgctcaactaccggctcaccccctccttcgaataccagcctgatccctggaacacgcatgtctggaaaggcaccaacgggacccccacaaagcggcgagccattggcttcaagaagctagcagaagctgtcaagttctcggccaagctgatggggcaggctatggccaagagggtgaaagcgaccatcctctatgccacagagacaggcaaatcgcaagcttatgccaagaccttgtgtgagatcttcaaacacgcctttgatgccaaggtgatgtccatggaagaatatgacattgtgcacctggaacatgaaactctggtccttgtggtcaccagcacctttggcaatggagatccccctgagaatggggagaaattcggctgtgctttgatggaaatgaggcaccccaactctgtgcaggaagaaaggaagagctacaaggtccgattcaacagcgtctcctcctactctgactcccaaaaatcatcaggcgatgggcccgacctcagagacaactttgagagtgctggacccctggccaatgtgaggttctcagtttttggcctcggctcacgagcataccctcacttttgcgccttcggacacgctgtggacaccctcctggaagaactgggaggggagaggatcctgaagatgagggaaggggatgagctctgtgggcaggaagaggctttcaggacctgggccaagaaggtcttcaaggcagcctgtgatgtcttctgtgtgggagatgatgtcaacattgaaaaggccaacaattccctcatcagcaatgatcgcagctggaagagaaacaagttccgcctcacctttgtggccgaagctccagaactcacacaaggtctatccaatgtccacaaaaagcgagtctcagctgcccggctccttagccgtcaaaacctccagagccctaaatccagtcggtcaactatcttcgtgcgtctccacaccaacgggagccaggagctgcagtaccagcctggggaccacctgggtgtcttccctggcaaccacgaggacctcgtgaatgccctgatcgagcggctggaggacgcgccgcctgtcaaccagatggtgaaagtggaactgctggaggagcggaacacggctttaggtgtcatcagtaactggacagacgagctccgcctcccgccctgcaccatcttccaggccttcaagtactacctggacatcaccacgccaccaacgcctctgcagctgcagcagtttgcctccctagctaccagcgagaaggagaagcagcgtctgctggtcctcagcaagggtttgcaggagtacgaggaatggaaatggggcaagaaccccaccatcgtggaggtgctggaggagttcccatctatccagatgccggccaccctgctcctgacccagctgtccctgctgcagccccgctactattccatcagctcctccccagacatgtaccctgatgaagtgcacctcactgtggccatcgtttcctaccgcactcgagatggagaaggaccaattcaccacggcgtatgctcctcctggctcaaccggatacaggctgacgaactggtcccctgtttcgtgagaggagcacccagcttccacctgccccggaacccccaagtcccctgcatcctcgttggaccaggcaccggcattgcccctttccgaagcttctggcaacagcggcaatttgatatccaacacaaaggaatgaacccctgccccatggtcctggtcttcgggtgccggcaatccaagatagatcatatctacagggaagagaccctgcaggccaagaacaagggggtcttcagagagctgtacacggcttactcccgggagccagacaaaccaaagaagtacgtgcaggacatcctgcaggagcagctggcggagtctgtgtaccgagccctgaaggagcaagggggccacatatacgtctgtggggacgtcaccatggctgctgatgtcctcaaagccatccagcgcatcatgacccagcaggggaagctctcggcagaggacgccggcgtattcatcagccggatgagggatgacaaccgataccatgaggatatttttggagtcaccctgcgaacgtacgaagtgaccaaccgccttagatctgagtccattgccttcattgaagagagcaaaaaagacaccgatgaggttttcagctcctaactggaccctcttgcccagccggctgcaagttttgtaagcgcggacagacactgctgaacctttcctctgggaccccctgtggccctcgctctgcctcctgtccttgtcgctgtgccctggtttccctcctcgggcttctcgcccctcagtggtttcctcggccctcctgggtttactccttgagttttcctgctgcgatgcaatgcttttctaatctgcagtggctcttacaaaactctgttcccactccctctcttgccgacaagggcaactcacgggtgcatgaaaccactggaacatggccgtcgctgtgggggtttttttctctggggttcccctggaaaggctgcaggaactaggcacaagctctctgagccagtccctcagccactgaagtccccctttctccttttttatgatgacattttggttgtgcgtgcctgtgtgtgtgtgtgtgtgtgtgtgtgtgtgtgtgatgggccaggtctctgtccgtcctcttccctgcacaagtgtgtcgatcttagattgccactgctttcattgaagaccctcaatgccaagaaacgtgtccctggcccatattaatccctcgtgtgtccataattagggtccacgcccatgtacctgaaacatttggaagccccataattgttctagttagaaagggttcagggcatggggagaggagtgggaaattgattaaaggggctgtctcccaatgaaagaggcattcccagaatttgctgcatttagattttgataccagtgagcagagccctcatgtgacatgaacccatccaatggattgtgcaaatcccctccccaaacccacccataccagctagaatcacttgactttgccacatccattgactgaccccctcctccagcaatagcatccaaggggcctggaagttatgttgttcaaagaagcctggtggcaataaggatcttcccactttgccactggatgactttggatgggtcacttgtcctcagtttttcctagtcataatgtcatacgaacctaaagaatatgaatggattaaatgttaaagctttggtgcctggaaacaatatcaagtaacaatatgattattatttttttattcccccaaagcgggcttgctgcttcacccttggggatgaaataatggaagctggttaaagtggatgaggttggaaagagttgccataatgaggtcccacgtggcttcttcgataggagccacaacttggggtgggaagaacttgtccctcaggcttgttgccctctgcagttgatctccaaagttttaaacctgttaaattaattttgacaaataagttaccctcaactcagatcaaaaatgggcagccaagtcttcggtaggaattggagccggtgtaattcctccctaagaggcaacctgttgaatttactctctcagagtaaatggtgggaagggatccctttgtatacttttttaaatactacaaattagtgtcaggcagttcccagaaagagacaagaaatcctagtggcctcccagactgcagggtccccaaggatggaaagggaatgttctgctggttctaccctgtttgttgtgtcttgctatacagaaaaaccacatttcttttatatactgtacgtgggcatatcttgttgttcagtttgggtgtctgctaaagaggaagtgcactggccctctttgaaagggctttacagtgggggcaccaagaccccaaagggcccaggccaggagactgttaaagtgaaaaggcaatctatgactcaccttgctctgccatccctggcagcccccaccggtgtcctgttcctgccacatggagcttgacttcatgccagctataatctcccctgccttcctttaatcccaatttcccctgctcactcttccacagatataaagaacaaacacttagcatcccacactcaccccttctaatcctgaagggaagcccattctaaactcctttcctgcaaacccatttccagctcctagtagctttcctcccaaaggctttctttccaatcctttatagctttggagacgcctccccaattccccagggaaggaaactgttgtgtccaatccccattaaagacaaattgatcagtgcttcccactccaagtcaagctttatgcaggaatgcttttccatcagggaataaatacttagaagcgcttacaaggtgccaggcacctcctttctgcatgtgcctgcctttctagtagcagacagatggaaacattgtctcattttgtcaaggagtccaaagaaatgattataaaaccaggattcatccttcttctccagaaagatttttttttaagtaaacacctttcaatccccaacacaagctgcttcacaactccaggctagaaggcaggagagcgatctgatgtgtttctttcatttgccagaattcctgataccaaaagcctctctctctgttgagtaacctctcaaggaccagagtggagtccagattgttaggctcagatcaagggtggggaaatactgccctctcgtggtggcttttcatccaggcctcgtagccaaccgtttaagtgcaaaatagaattaagcaatgggtaagcaaaatagggttgacaagatatttgggggttattcgggttatggcccatttatttccctcttccccctgaattgaccagtagcagctccagccccatttcacaaaagtgagtttggccaggaggaatgagacgtctcctgaaataggaacaccggaacatcatgctcacctgccatcactatgcatccagttcccacagcttgtgtcgtgaaagagcagagagatgatgttaaactccttgggaggagagagggcttcttttggtttccctggagtgagacagccaggtgtctttcttttgcggggggacacttcagacccatcaatatggaattttgggagccgacctgagtgcaaatcctaattctgcccctgttggtgcagatggctgtgggcggctcacttgaccttttagagtctgcatacccacctgtataacaaggtggattgaatgagacaatgcccacgaaatgcccagttacagtacctggttcaaaacttactgcattttaatttttcacttaacttataacatgtcttgcttctccagtgtgtggaaggcaccgggcagtttgcagagataagcaaaacacagttcctctcgtgcagaaggttagaatctatttttttttttgacagagtcttgctctgtcacccaggctggcgtacagtggtacgatctcagctcactgcatcctctgcctcccccagttcaagtgattcttctgcctcggcctcctgagtaactgggactacaggcgcctaccaccacgcccagctaagttttgtatttttagtagagtcagggtttcaccatgttggccaggctggtcttgaattcctgacctcaaatgatccacgcacctcagcctcccaaagtgctggattacaggcatgagccaccacgcccagccaaaggttataatctgatggagagagacacccgtcttggaactgacataaatttctggggtttgagaaatgggcgggatttcactggtagcttctggaaggtaagagttgtccaggaattgggaagagtgagaggaaaggcacggacagggagcatgtaagataaattgaggctggctttggaaggctgaggagggtgagaaaaggtgggctgggaccagaccgtggggagaggtgagtggcattacaagaaatttaggctttattcagaaggcaacagggagtccctaagaatgtttttcaaaaagggacattaaggcgattggagttatacttggaaaagaaagttctggccacagtacagagcatggcccgttgagctgttgggggggttattgctgcaaccaaggcttgagtgagggaagaggcggatgtagtgataaagagactccaggaactgaatcagcgtacctggcaccccatccattgtagagggtgagaataaaggagaaattaaagcatcttgcaggctgggcgcggtagctcatgtctgtaatcccagcactttgggaggccgaggtgggtgtatcagttgaggtcaggagttggagaccagtcagccagttagtagaaaccctgactctactaagaaaatacaaaaattagctgggcatggtggcatgcgcctgtagtctcagctacctgggaggctgaggaaggaggatcgcttgagcccaggaggtggaggctgcagtgagccaagattgtaccactgcactccagcctgggtgacagagcaagactcttatctcaaaaaaaataaaataaaataaaataaaataaaacatcttgcccctagctgagagagaggtctctgaagagcaggctcagggaaaagatgagttttcagagctgatgtgatagtcagcttctctggagtcaacagggtgaatccttcccaagtccagccatgcccagatgcccggagggaaaactgacccccagccagtagacattggctaagaacacagaatcttctgaccaaacacgctttcagcagctgcctgctctggactttgaaagaggtcaggtcttgccctaagctcaaaacaagtgagaggtgtcctgacctagctcatagggcaaatggtcctaataggatgggcaatccagatgcctgagccccttcactccgacagcaccagcgcctaatgcagccttttcattcttgccattaggaaatctgtggacttctagcctgtgttttaaaccagccatgtttccttgtatatttccctacccgctgccccacatacccagcatgccgctgtggccaccatgtcctcaaagccttctgtctgtatcaggaatgtagtctgagactgccaggaagcaacaaggagagagaaacactaactagtcttcctttataacccattcatactctctggctgtccccaaccttcatagtctcctgcatccaaatgtcctctttggctcaaaaagtaggccaggcatggtggttcatgcctgtaatagcactttgggagactgaggtgggaggatcacttggggccaggagtttgagaccagcttgggcaacacagcgcaatctcgtctctactaaaaaaaaaaaaaaaaaaaaattagctgggcatgatggcatgctcctgtggtcccagctacttgggaggctgaggcaggaggatcacttggtcccaggagtttgaggcgacagtgagctaggatcgcaccactgcactccagcctgagtgacagagcaagaccctgtctctaaaaaaaattaaaatgaaagaccaggtgctgggattaaggaaacacaggtctgagggtctgagggaaggggcctgcctcccagggagtcaacatagatgttccccatgaacagggatttgactttggaggccaacctggcctggcctctgccctttatctcacactccctatccttggcccactgccagtccctgccttgtggcaaaggggccccaaaagaaaagctgcccttccccaaatgtaaggacccaggtacactttcacccgtggaaagcagtgtctgtcgagagtctgtttcctattaatacttatcaaagccatgtgcgagggaggtggtcagctgtcaatatgccttagtatgtttatatgagtttgttttgttctaaaatacccaaacagttctggtcaagcggggctatgcccgtctggcccaaaacacagtccgttattaacgagatggccctggcaggcgggaacaaatctgcctccatgcactgcttcctgtagtcttttagaaagtaactccaggacatcgaagtgcccagatttgactcctaagttctaggagactgtagcgcagggtctgtcaaccttagcactattggcatttggggctgggtaattctttcttgtgggggccgtcttgggtactgtaggaagctgagcagcattcctggcctccatccacaagatacctgtagcagtgtcctgccaacggtaacaatcaagtatgtcatcagacattgcccaatgtccccagggggcaacacccctctcttggacttcagggtcaagagaatctctgctggctaccccaggacttctcattatagatttcctggagcacgcagcagaaactttgcctagcccagtggttgtttccattatctgctgccaaagtgggatttgagggtgtccgggggagggggcatggggagggcagtatgctttcaaaaacccctcccaggccaggcgtggtggctcatgcctgtaatcacaggactttgggaggccgaggctggcagatcacttgaggctgggagttagagaccaacctggctaacatggcaaaacctcgtctctactaaaaatacaaaaatcagcccggcgtggtggcgggcatctgtaatcccatctactcgggaggctgaggcaggagaattacttgaacccaggaggcagaggctgcagtgagccgagatggcaccactgcactccagcttgttgacagaatgagaccctgtggaaaaaaaaaaaaaagccctcccatgccagaacagaggatggcagtctgtttcaataagacactgtgtccttggtgttggttctgattaagactcactgagatccagtgctcttgagctgggtctcagtcccctcccatgtcctgtgctctgccgccactgttttcattgttgtgttctcgttgtgattgttaagactcacactcctggctcagcagtggttttccagaaggcccaaagagcggtgccgggcaccccacgtcgcagtgtccgttccgggcttgggaagctggggaggtgggcagacctggtcgcatctcaccacacacacacacacacacacacacacacacgctgtcagaaactcggccgtcccccctacctctgagctctcaatgctgctaatctctgccaagtgtccctgtgctccagcaccttccttgaaggactgacgcccaccccacgctctttgcgaggttgtccaggctgtgtttgtcgcatgctcttcttctgtatagttctcatcttccaattttatgggattcaacaaaagcctattatgcttgtttgcattatggttacaatattaaaaagtggattcaaaaaaaa

SEQ ID NO: 13768 - DNA, 10781 bp, Artificial Sequence
  derived and/or modified sequence
gataggtgggggttgagaaatggctgggcagggcagcaaagcaactgccaaggactgggcaaaaggcaatagaatgcaattgaagcaggacgaatgcagatgaggaaactgagaatcacagagggttttggtgctcaacgagggtcacataaccaccccccacctcaggaaaacagtcccccacaaagaatggcagcccctccaagtgtccacgcttcctcaaggtcaagaactgggagactgaggtggttctcactgacaccctccaccttaagagcacattggaaacgggatgcactgagtacatctgcatgggctccatcatgcatccttctcagcatgcaaggaggcctgaagacgtccgcacaaaaggacagctcttccctctcgccaaagagtttattgatcaatactattcatcaattaaaagatttggctccaaagcccacatggaaaggctggaagaggtgaacaaagagatcgacaccactagcacttaccagctcaaggacacagagctcatctatggggccaagcacgcctggcggaatgcctcgcgctgtgtgggcaggatccagtggtccaagctgcaggtattcgatgcccgtgactgcaccacggcccacgggatgttcaactacatctgtaaccatgtcaagtatgccaccaacaaagggaacctcaggtctgccatcaccatattcccccagaggacagacggcaagcacgacttccgagtctggaactcccagctcatccgctacgctggctacaagcagcctgacggctccaccctgggggacccagccaatgtgcagttcacagagatatgcatacagcagggctggaaaccgcctagaggccgcttcgatgtcctgccgctcctgcttcaggccaacggcaatgaccctgagctcttccagattcctccagagctggtgttggaagttcccatcaggcaccccaagtttgagtggttcaaggacctggggctgaagtggtacggcctccccgccgtgtccaacatgctcctagagattggcggcctggagttcagcgcctgtcccttcagtggctggtacatgggcacagagattggtgtccgcgactactgtgacaactcccgctacaatatcctggaggaagtggccaagaagatgaacttagacatgaggaagacgtcctccctgtggaaggaccaggcgctggtggagatcaatatcgcggttctctatagcttccagagtgacaaagtgaccattgttgaccatcactccgccaccgagtccttcattaagcacatggagaatgagtaccgctgccgggggggctgccctgccgactgggtgtggatcgtgccccccatgtccggaagcatcacccctgtgttccaccaggagatgctcaactaccggctcaccccctccttcgaataccagcctgatccctggaacacgcatgtctggaaaggcaccaacgggacccccacaaagcggcgagccattggcttcaagaagctagcagaagctgtcaagttctcggccaagctgatggggcaggctatggccaagagggtgaaagcgaccatcctctatgccacagagacaggcaaatcgcaagcttatgccaagaccttgtgtgagatcttcaaacacgcctttgatgccaaggtgatgtccatggaagaatatgacattgtgcacctggaacatgaaactctggtccttgtggtcaccagcacctttggcaatggagatccccctgagaatggggagaaattcggctgtgctttgatggaaatgaggcaccccaactctgtgcaggaagaaaggaagagctacaaggtccgattcaacagcgtctcctcctactctgactcccaaaaatcatcaggcgatgggcccgacctcagagacaactttgagagtgctggacccctggccaatgtgaggttctcagtttttggcctcggctcacgagcataccctcacttttgcgccttcggacacgctgtggacaccctcctggaagaactgggaggggagaggatcctgaagatgagggaaggggatgagctctgtgggcaggaagaggctttcaggacctgggccaagaaggtcttcaaggcagcctgtgatgtcttctgtgtgggagatgatgtcaacattgaaaaggccaacaattccctcatcagcaatgatcgcagctggaagagaaacaagttccgcctcacctttgtggccgaagctccagaactcacacaaggtctatccaatgtccacaaaaagcgagtctcagctgcccggctccttagccgtcaaaacctccagagccctaaatccagtcggtcaactatcttcgtgcgtctccacaccaacgggagccaggagctgcagtaccagcctggggaccacctgggtgtcttccctggcaaccacgaggacctcgtgaatgccctgatcgagcggctggaggacgcgccgcctgtcaaccagatggtgaaagtggaactgctggaggagcggaacacggctttaggtgtcatcagtaactggacagacgagctccgcctcccgccctgcaccatcttccaggccttcaagtactacctggacatcaccacgccaccaacgcctctgcagctgcagcagtttgcctccctagctaccagcgagaaggagaagcagcgtctgctggtcctcagcaagggtttgcaggagtacgaggaatggaaatggggcaagaaccccaccatcgtggaggtgctggaggagttcccatctatccagatgccggccaccctgctcctgacccagctgtccctgctgcagccccgctactattccatcagctcctccccagacatgtaccctgatgaagtgcacctcactgtggccatcgtttcctaccgcactcgagatggagaaggaccaattcaccacggcgtatgctcctcctggctcaaccggatacaggctgacgaactggtcccctgtttcgtgagaggagcacccagcttccacctgccccggaacccccaagtcccctgcatcctcgttggaccaggcaccggcattgcccctttccgaagcttctggcaacagcggcaatttgatatccaacacaaaggaatgaacccctgccccatggtcctggtcttcgggtgccggcaatccaagatagatcatatctacagggaagagaccctgcaggccaagaacaagggggtcttcagagagctgtacacggcttactcccgggagccagacaaaccaaagaagtacgtgcaggacatcctgcaggagcagctggcggagtctgtgtaccgagccctgaaggagcaagggggccacatatacgtctgtggggacgtcaccatggctgctgatgtcctcaaagccatccagcgcatcatgacccagcaggggaagctctcggcagaggacgccggcgtattcatcagccggatgagggatgacaaccgataccatgaggatatttttggagtcaccctgcgaacgtacgaagtgaccaaccgccttagatctgagtccattgccttcattgaagagagcaaaaaagacaccgatgaggttttcagctcctaactggaccctcttgcccagccggctgcaagttttgtaagcgcggacagacactgctgaacctttcctctgggaccccctgtggccctcgctctgcctcctgtccttgtcgctgtgccctggtttccctcctcgggcttctcgcccctcagtggtttcctcggccctcctgggtttactccttgagttttcctgctgcgatgcaatgcttttctaatctgcagtggctcttacaaaactctgttcccactccctctcttgccgacaagggcaactcacgggtgcatgaaaccactggaacatggccgtcgctgtgggggtttttttctctggggttcccctggaaaggctgcaggaactaggcacaagctctctgagccagtccctcagccactgaagtccccctttctccttttttatgatgacattttggttgtgcgtgcctgtgtgtgtgtgtgtgtgtgtgtgtgtgtgtgtgatgggccaggtctctgtccgtcctcttccctgcacaagtgtgtcgatcttagattgccactgctttcattgaagaccctcaatgccaagaaacgtgtccctggcccatattaatccctcgtgtgtccataattagggtccacgcccatgtacctgaaacatttggaagccccataattgttctagttagaaagggttcagggcatggggagaggagtgggaaattgattaaaggggctgtctcccaatgaaagaggcattcccagaatttgctgcatttagattttgataccagtgagcagagccctcatgtgacatgaacccatccaatggattgtgcaaatcccctccccaaacccacccataccagctagaatcacttgactttgccacatccattgactgaccccctcctccagcaatagcatccaaggggcctggaagttatgttgttcaaagaagcctggtggcaataaggatcttcccactttgccactggatgactttggatgggtcacttgtcctcagtttttcctagtcataatgtcatacgaacctaaagaatatgaatggattaaatgttaaagctttggtgcctggaaacaatatcaagtaacaatatgattattatttttttattcccccaaagcgggcttgctgcttcacccttggggatgaaataatggaagctggttaaagtggatgaggttggaaagagttgccataatgaggtcccacgtggcttcttcgataggagccacaacttggggtgggaagaacttgtccctcaggcttgttgccctctgcagttgatctccaaagttttaaacctgttaaattaattttgacaaataagttaccctcaactcagatcaaaaatgggcagccaagtcttcggtaggaattggagccggtgtaattcctccctaagaggcaacctgttgaatttactctctcagagtaaatggtgggaagggatccctttgtatacttttttaaatactacaaattagtgtcaggcagttcccagaaagagacaagaaatcctagtggcctcccagactgcagggtccccaaggatggaaagggaatgttctgctggttctaccctgtttgttgtgtcttgctatacagaaaaaccacatttcttttatatactgtacgtgggcatatcttgttgttcagtttgggtgtctgctaaagaggaagtgcactggccctctttgaaagggctttacagtgggggcaccaagaccccaaagggcccaggccaggagactgttaaagtgaaaaggcaatctatgactcaccttgctctgccatccctggcagcccccaccggtgtcctgttcctgccacatggagcttgacttcatgccagctataatctcccctgccttcctttaatcccaatttcccctgctcactcttccacagatataaagaacaaacacttagcatcccacactcaccccttctaatcctgaagggaagcccattctaaactcctttcctgcaaacccatttccagctcctagtagctttcctcccaaaggctttctttccaatcctttatagctttggagacgcctccccaattccccagggaaggaaactgttgtgtccaatccccattaaagacaaattgatcagtgcttcccactccaagtcaagctttatgcaggaatgcttttccatcagggaataaatacttagaagcgcttacaaggtgccaggcacctcctttctgcatgtgcctgcctttctagtagcagacagatggaaacattgtctcattttgtcaaggagtccaaagaaatgattataaaaccaggattcatccttcttctccagaaagatttttttttaagtaaacacctttcaatccccaacacaagctgcttcacaactccaggctagaaggcaggagagcgatctgatgtgtttctttcatttgccagaattcctgataccaaaagcctctctctctgttgagtaacctctcaaggaccagagtggagtccagattgttaggctcagatcaagggtggggaaatactgccctctcgtggtggcttttcatccaggcctcgtagccaaccgtttaagtgcaaaatagaattaagcaatgggtaagcaaaatagggttgacaagatatttgggggttattcgggttatggcccatttatttccctcttccccctgaattgaccagtagcagctccagccccatttcacaaaagtgagtttggccaggaggaatgagacgtctcctgaaataggaacaccggaacatcatgctcacctgccatcactatgcatccagttcccacagcttgtgtcgtgaaagagcagagagatgatgttaaactccttgggaggagagagggcttcttttggtttccctggagtgagacagccaggtgtctttcttttgcggggggacacttcagacccatcaatatggaattttgggagccgacctgagtgcaaatcctaattctgcccctgttggtgcagatggctgtgggcggctcacttgaccttttagagtctgcatacccacctgtataacaaggtggattgaatgagacaatgcccacgaaatgcccagttacagtacctggttcaaaacttactgcattttaatttttcacttaacttataacatgtcttgcttctccagtgtgtggaaggcaccgggcagtttgcagagataagcaaaacacagttcctctcgtgcagaaggttagaatctatttttttttttgacagagtcttgctctgtcacccaggctggcgtacagtggtacgatctcagctcactgcatcctctgcctcccccagttcaagtgattcttctgcctcggcctcctgagtaactgggactacaggcgcctaccaccacgcccagctaagttttgtatttttagtagagtcagggtttcaccatgttggccaggctggtcttgaattcctgacctcaaatgatccacgcacctcagcctcccaaagtgctggattacaggcatgagccaccacgcccagccaaaggttataatctgatggagagagacacccgtcttggaactgacataaatttctggggtttgagaaatgggcgggatttcactggtagcttctggaaggtaagagttgtccaggaattgggaagagtgagaggaaaggcacggacagggagcatgtaagataaattgaggctggctttggaaggctgaggagggtgagaaaaggtgggctgggaccagaccgtggggagaggtgagtggcattacaagaaatttaggctttattcagaaggcaacagggagtccctaagaatgtttttcaaaaagggacattaaggcgattggagttatacttggaaaagaaagttctggccacagtacagagcatggcccgttgagctgttgggggggttattgctgcaaccaaggcttgagtgagggaagaggcggatgtagtgataaagagactccaggaactgaatcagcgtacctggcaccccatccattgtagagggtgagaataaaggagaaattaaagcatcttgcaggctgggcgcggtagctcatgtctgtaatcccagcactttgggaggccgaggtgggtgtatcagttgaggtcaggagttggagaccagtcagccagttagtagaaaccctgactctactaagaaaatacaaaaattagctgggcatggtggcatgcgcctgtagtctcagctacctgggaggctgaggaaggaggatcgcttgagcccaggaggtggaggctgcagtgagccaagattgtaccactgcactccagcctgggtgacagagcaagactcttatctcaaaaaaaataaaataaaataaaataaaataaaacatcttgcccctagctgagagagaggtctctgaagagcaggctcagggaaaagatgagttttcagagctgatgtgatagtcagcttctctggagtcaacagggtgaatccttcccaagtccagccatgcccagatgcccggagggaaaactgacccccagccagtagacattggctaagaacacagaatcttctgaccaaacacgctttcagcagctgcctgctctggactttgaaagaggtcaggtcttgccctaagctcaaaacaagtgagaggtgtcctgacctagctcatagggcaaatggtcctaataggatgggcaatccagatgcctgagccccttcactccgacagcaccagcgcctaatgcagccttttcattcttgccattaggaaatctgtggacttctagcctgtgttttaaaccagccatgtttccttgtatatttccctacccgctgccccacatacccagcatgccgctgtggccaccatgtcctcaaagccttctgtctgtatcaggaatgtagtctgagactgccaggaagcaacaaggagagagaaacactaactagtcttcctttataacccattcatactctctggctgtccccaaccttcatagtctcctgcatccaaatgtcctctttggctcaaaaagtaggccaggcatggtggttcatgcctgtaatagcactttgggagactgaggtgggaggatcacttggggccaggagtttgagaccagcttgggcaacacagcgcaatctcgtctctactaaaaaaaaaaaaaaaaaaaaattagctgggcatgatggcatgctcctgtggtcccagctacttgggaggctgaggcaggaggatcacttggtcccaggagtttgaggcgacagtgagctaggatcgcaccactgcactccagcctgagtgacagagcaagaccctgtctctaaaaaaaattaaaatgaaagaccaggtgctgggattaaggaaacacaggtctgagggtctgagggaaggggcctgcctcccagggagtcaacatagatgttccccatgaacagggatttgactttggaggccaacctggcctggcctctgccctttatctcacactccctatccttggcccactgccagtccctgccttgtggcaaaggggccccaaaagaaaagctgcccttccccaaatgtaaggacccaggtacactttcacccgtggaaagcagtgtctgtcgagagtctgtttcctattaatacttatcaaagccatgtgcgagggaggtggtcagctgtcaatatgccttagtatgtttatatgagtttgttttgttctaaaatacccaaacagttctggtcaagcggggctatgcccgtctggcccaaaacacagtccgttattaacgagatggccctggcaggcgggaacaaatctgcctccatgcactgcttcctgtagtcttttagaaagtaactccaggacatcgaagtgcccagatttgactcctaagttctaggagactgtagcgcagggtctgtcaaccttagcactattggcatttggggctgggtaattctttcttgtgggggccgtcttgggtactgtaggaagctgagcagcattcctggcctccatccacaagatacctgtagcagtgtcctgccaacggtaacaatcaagtatgtcatcagacattgcccaatgtccccagggggcaacacccctctcttggacttcagggtcaagagaatctctgctggctaccccaggacttctcattatagatttcctggagcacgcagcagaaactttgcctagcccagtggttgtttccattatctgctgccaaagtgggatttgagggtgtccgggggagggggcatggggagggcagtatgctttcaaaaacccctcccaggccaggcgtggtggctcatgcctgtaatcacaggactttgggaggccgaggctggcagatcacttgaggctgggagttagagaccaacctggctaacatggcaaaacctcgtctctactaaaaatacaaaaatcagcccggcgtggtggcgggcatctgtaatcccatctactcgggaggctgaggcaggagaattacttgaacccaggaggcagaggctgcagtgagccgagatggcaccactgcactccagcttgttgacagaatgagaccctgtggaaaaaaaaaaaaaagccctcccatgccagaacagaggatggcagtctgtttcaataagacactgtgtccttggtgttggttctgattaagactcactgagatccagtgctcttgagctgggtctcagtcccctcccatgtcctgtgctctgccgccactgttttcattgttgtgttctcgttgtgattgttaagactcacactcctggctcagcagtggttttccagaaggcccaaagagcggtgccgggcaccccacgtcgcagtgtccgttccgggcttgggaagctggggaggtgggcagacctggtcgcatctcaccacacacacacacacacacacacacacacacgctgtcagaaactcggccgtcccccctacctctgagctctcaatgctgctaatctctgccaagtgtccctgtgctccagcaccttccttgaaggactgacgcccaccccacgctctttgcgaggttgtccaggctgtgtttgtcgcatgctcttcttctgtatagttctcatcttccaattttatgggattcaacaaaagcctattatgcttgtttgcattatggttacaatattaaaaagtggattcaaaaaaaa

SEQ ID NO: 13769 - protein, 471 aa, Artificial Sequence
  derived and/or modified sequence
MDILCEENTSLSSTTNSLMQLNDDTRLYSNDFNSGEANTSDAFNWTVDSENRTNLSCEGCLSPSCLSLLHLQEKNWSALLTAVVIILTIAGNILVIMAVSLEKKLQNATNYFLMSLAIADMLLGFLVMPVSMLTILYGYRWPLPSKLCAVWIYLDVLFSTASIMHLCAISLDRYVAIQNPIHHSRFNSRTKAFLKIIAVWTISVGISMPIPVFGLQDDSKVFKEGSCLLADDNFVLIGSFVSFFIPLTIMVITYFLTIKSLQKEATLCVSDLGTRAKLASFSFLPQSSLSSEKLFQRSIHREPGSYTGRRTMQSISNEQKACKVLGIVFFLFVVMWCPFFITNIMAVICKESCNEDVIGALLNVFVWIGYLSSAVNPLVYTLFNKTYRSAFSRYIQCQYKENKKPLQLILVNTIPALAYKSSQLQMGQKKNSKQDAKTTDNDCSMVALGKQHSEEASKDNSDGVNEKVSCV

SEQ ID NO: 13770 - DNA, 1416 bp, Artificial Sequence
  derived and/or modified sequence
atggacatcctctgtgaggagaacacaagtttatcctctacaaccaactcactaatgcaattgaatgatgacacaagactgtactctaacgacttcaatagcggggaggctaatacatccgatgcctttaattggacagttgattccgaaaataggactaacctctcctgtgagggctgtctgtccccaagctgccttagcctcctgcacctgcaagagaaaaattggtctgcactgttgaccgctgtggtaatcattcttacaatagccggtaacatcttagtcataatggccgtctcattggagaagaagctccaaaatgctacaaattactttctgatgtccctggctatcgccgacatgttgctgggtttcctagtcatgccagtgtcaatgctcaccatactatacgggtatcggtggccccttccctccaagctgtgcgcagtctggatctatcttgatgtgctctttagtaccgcatcaatcatgcatttgtgtgctatctcactggatagatatgttgctattcagaacccaatccaccatagccggtttaattcacgaacaaaggctttcctgaagattattgctgtctggactatctcagtaggtatcagtatgccgattcccgttttcgggctacaggacgacagcaaggtgttcaaggaaggtagttgcctcctggcagatgataatttcgtactgatcggatcattcgtatcattcttcatccccctaaccataatggtaatcacctactttttaactatcaagagtctccagaaggaggctaccctgtgcgttagcgatttgggcacccgtgccaagctcgcttctttctcatttctgcctcagagttccctgtcatccgaaaaactctttcagaggagcatacatcgggagccaggtagctacacgggaagaagaacaatgcagtctattagcaacgaacaaaaggcttgcaaggtgttaggtatcgtgttcttcctgttcgttgtcatgtggtgtcctttcttcattacaaatatcatggcagtgatttgtaaagagagctgcaacgaggacgtcattggtgccttgcttaacgtgttcgtttggatcggttatctgagctcagccgtgaaccccctcgtgtacaccctcttcaacaagacgtatcggagtgcgttctctaggtatatacagtgccagtataaggagaacaaaaagcccctgcagttgatcttggtgaacactatcccggccctggcgtacaagagcagtcagctgcagatgggccagaaaaagaactctaagcaggacgcaaaaacgacagataacgattgttcaatggttgcactcggaaaacagcatagcgaagaggcctccaaggacaacagcgacggagtgaacgagaaggtgtcatgcgtgtag

SEQ ID NO: 13771 - DNA, 1416 bp, Artificial Sequence
  derived and/or modified sequence
atggacatcctgtgtgaagagaacacttctctcagctcaacaactaatagtctgatgcaacttaatgatgataccaggctgtacagtaacgatttcaactctggtgaggcgaatacctcagatgcgtttaattggactgttgattccgagaaccggacgaatctgtcttgcgagggttgcctgtcacccagctgtctctctctgctgcatctgcaggaaaagaactggtccgccctcttaaccgccgtggtcataattctgaccattgccggtaacatactggtgatcatggccgtcagtctagagaagaagttgcagaatgctacaaattattttttaatgagcctcgccatcgccgacatgttactcgggttcctggtcatgccagtgagcatgttaactatactctatggatataggtggcccctgccctccaagctgtgtgctgtctggatctatcttgatgttctcttctccactgcaagcatcatgcatctctgcgctatatccctggacagatacgtggcgatacagaatcccatacatcacagccgttttaactccagaaccaaggcatttctcaaaatcatcgccgtctggactatctcagttgggataagcatgcccataccagtgttcggtctgcaggatgacagtaaggtgtttaaggaggggtcatgtctgctggccgatgacaattttgtgcttattggctcctttgttagttttttcattcccctgacaattatggtgatcacatacttcctgacaataaaaagcctgcaaaaggaagccaccctgtgcgtgagtgacctggggacccgcgctaagctcgcttctttttctttcctgcctcaaagctccctttccagtgaaaagttattccagagatccatccacagagaacctggctcctacaccggaagacgaaccatgcaaagcatcagcaacgagcagaaagcctgcaaagtgctaggcatcgtatttttcctcttcgtggtaatgtggtgtcccttttttatcacgaatattatggccgtcatctgtaaggagagttgtaacgaagatgttattggggctctccttaacgttttcgtctggattggatacctctcatctgcagtgaatccactcgtgtacacattattcaataagacatacaggagcgcgttcagtcggtatatccagtgccagtacaaagaaaacaaaaaacccttgcagcttatattagtgaatacaatcccagcgctggcctacaagtccagccagctgcaaatggggcaaaagaagaacagcaagcaggatgcaaagacgaccgacaatgactgctcaatggtggccctcggtaaacagcacagcgaggaagcttccaaagacaacagcgacggcgtgaacgagaaggtgtcgtgcgtctag

SEQ ID NO: 13772 - DNA, 1416 bp, Artificial Sequence
  derived and/or modified sequence
atggacatcctgtgtgaggagaacaccagcctgagcagcaccaccaacagcctgatgcagctgaatgatgacacccggctgtacagcaatgacttcaacagcggggaggccaacaccagtgatgccttcaactggacagtggacagcgagaacagaaccaacctgagctgtgagggctgcctgagccccagctgcctgagcctgctgcacctgcaggagaagaactggagcgccctgctgacagctgtggtgatcatcctgaccatcgccggcaacatcctggtgatcatggctgtgtccctggagaagaagctgcagaatgccaccaactacttcctgatgagcctggccatcgctgacatgctgctgggcttcctggtgatgcctgtgtccatgctgaccatcctgtatggctaccgctggcccctgcccagcaagctgtgtgctgtgtggatctacctggatgtgctcttcagcacagccagcatcatgcacctgtgtgccatcagcctggaccgctacgtggccatccagaaccccatccaccacagccgcttcaacagcaggaccaaggccttcctgaagatcatcgctgtgtggaccatctctgtgggcatctccatgcccatccctgtgtttggcctgcaggatgacagcaaggtgttcaaggagggcagctgcctgctggctgatgacaactttgtgctgattggcagctttgtgtccttcttcatccccctgaccatcatggtgatcacctacttcctgaccatcaagagcctgcagaaggaggccaccctgtgtgtgtctgacctgggcacccgggccaagctggccagcttctccttcctgccccagagcagcctgagcagcgagaagctgttccagaggagcatccaccgggagcccggcagctacacaggaagaaggaccatgcagagcatcagcaatgagcagaaggcctgcaaggtgctgggcatcgtgttcttcctgtttgtggtgatgtggtgccccttcttcatcaccaacatcatggccgtcatctgcaaggagagctgcaatgaagatgtgattggagccctgctgaatgtgtttgtgtggattggctacctgagcagcgctgtgaaccccctggtgtacaccctcttcaacaagacctacagaagtgccttcagccgctacatccagtgccagtacaaggagaacaagaagcccctgcagctgatcctggtgaacaccatcccagccctggcctacaagagcagccagctgcagatgggccagaagaagaacagcaagcaggatgccaagaccacagacaatgactgcagcatggtggccctgggcaagcagcacagcgaggaggccagcaaggacaacagtgatggagtgaatgagaaggtgtcctgtgtgtag

SEQ ID NO: 13773 - DNA, 1416 bp, Artificial Sequence
  derived and/or modified sequence
atggacatcctgtgcgaggagaacaccagcctgagcagcaccaccaacagtcttatgcagttgaacgacgataccaggttgtacagcaacgatttcaactccggagaggcaaacacttctgacgccttcaactggacggtcgactccgaaaacaggaccaacttgtcttgcgaaggttgtttatcaccttcttgtttgtcacttcttcatttgcaagagaagaactggtctgccctgctgaccgcagtggttataatcctgacgattgccggtaacatcctcgtgatcatggccgtgtctctggagaagaaactgcagaatgcgacgaactacttccttatgagcctagccattgcagatatgcttctgggattcctggtcatgcctgtgtccatgctgactatcttgtacgggtacagatggcctctgccatccaagctctgcgcagtctggatctatttggatgtcctcttcagtaccgcatctatcatgcacttgtgcgcaattagcctggatcgctatgtcgctattcagaatccaatacaccattctaggttcaacagccgaaccaaagcgtttctcaaaatcattgcagtgtggaccatcagcgtgggcatcagtatgccaatccccgtcttcggattgcaggacgactcaaaagtgttcaaagaggggtcttgtctcctggcggatgataatttcgtgttgatcgggtccttcgtcagtttttttataccgctcaccattatggtgataacttattttctgaccatcaagtcattgcagaaagaagccacactctgcgtgagtgaccttggcacccgggcaaaacttgcctcattcagtttcttgcctcaatcctctctgtccagcgagaaattgtttcagcgatccattcacagagaacctggatcctacaccggtcgcagaacgatgcaaagtatatcaaatgaacagaaagcctgtaaggttctgggtatcgtattctttctgttcgttgtaatgtggtgtccattcttcataactaacataatggctgtgatttgtaaggagagctgcaacgaggacgtaatcggtgccctgctcaatgtattcgtgtggataggctatctcagttccgcagtgaatcctctggtttacacactttttaacaagacatatcgctctgccttttcccgatacatccaatgtcagtacaaagagaacaaaaagcccctacagctgatcctggtaaacactattcctgctctggcgtacaagagctcccagttacagatgggacagaagaaaaactccaaacaggacgctaaaaccacggacaatgattgttcgatggtcgcccttggaaaacagcactccgaagaggctagtaaagacaactccgatggcgttaacgaaaaggtgtcctgcgtctag

SEQ ID NO: 13774 - DNA, 1416 bp, Artificial Sequence
  derived and/or modified sequence
atggacatcctgtgcgaggagaacaccagcctgagcagcaccaccaatagcctgatgcagcttaacgatgacacccgtctctacagtaatgacttcaactcaggagaggcaaatacatccgatgcctttaattggactgtcgattcagaaaataggacaaatttgtcatgtgaaggctgcctgtctccttcctgtttgtcactcctccacttgcaggaaaagaactggtccgccctcttaactgccgtcgtgatcattttgaccatcgctgggaacatcctggtcattatggcggtttcactcgagaaaaagctgcagaacgcaaccaattattttttgatgagtctcgctatcgccgatatgctattgggtttcctcgttatgccagtaagtatgttaactatactctacggctaccgatggccgctaccatctaagctgtgcgccgtctggatctacctggatgtgctgttctctaccgcaagtatcatgcatctttgtgctatttcccttgaccgctatgtcgccattcagaatcctatccatcattcacgctttaattcaagaacgaaagcattcctgaaaattatcgctgtctggacaatttcggtgggaatttctatgccgattcccgttttcggactccaagatgattccaaggtgttcaaagaagggtcttgtcttctggccgatgataactttgttttgattggttctttcgtatctttttttattccgctgaccatcatggttattacatacttcctgactatcaagtcattacagaaggaggccaccctttgcgtgagcgatctgggcactcgggcgaagcttgcaagcttttcattcctgccgcagtcttcactgtcttctgagaaactgttccagcggagcattcacagagaaccaggctcctataccggacgtcggaccatgcagagcattagcaacgaacaaaaagcttgcaaagtgcttggcatcgtttttttcctttttgtggtgatgtggtgccctttctttattaccaacattatggctgtgatttgtaaggagagctgtaacgaggatgtgatcggggcactgcttaatgtcttcgtgtggatcgggtacctatcttctgcggtgaatccgctagtgtacacgctcttcaacaagacctatagatcagcattctctcgttatattcagtgtcagtacaaagaaaataagaagccactccagctcatcctggtcaacacgatccccgcactggcttacaagtcttctcaattacagatgggtcagaagaagaacagcaaacaggacgcaaaaactacagataatgactgctcaatggtggcactgggcaagcaacactctgaggaagcctccaaggacaattccgatggtgtgaacgaaaaggttagttgtgtgtag

SEQ ID NO: 13775 - DNA, 1416 bp, Artificial Sequence
  derived and/or modified sequence
atggacattctgtgtgaggaaaatacttctctgagttcaacaacgaattccctgatgcagctgaacgatgatacccgattgtatagcaacgactttaattccggcgaggccaatacctctgatgcctttaactggaccgtcgactctgaaaacagaaccaatctatcatgcgaaggctgtctttctccaagctgtctgagccttctgcacctgcaagagaagaactggtccgcgctgcttaccgctgtggtgatcattttgactatcgctggcaacatactggtaatcatggcagtgagtttggaaaagaagctgcaaaacgccacgaactacttcctgatgagtctagcgatcgccgacatgctgttaggctttctagttatgccggttagcatgctaacaattctttacggctacaggtggccgcttccgtccaaattatgcgcggtttggatttacttagatgttctattctcaacagccagcattatgcacctctgtgccattagccttgataggtacgtcgctattcaaaatccaatacaccacagtcgattcaacagccggactaaagcatttctaaagatcatagcggtgtggaccatttctgttggcatctctatgccaatccctgtgtttggattacaagatgacagtaaggtgtttaaagaaggcagctgcctcctcgctgatgacaactttgtgcttatcggatctttcgtctctttctttatcccattgactatcatggtgattacatatttcctgacaatcaagtccctgcaaaaagaggctacactgtgtgtgagcgaccttggcacccgtgctaagctggcatcctttagcttccttcctcagtctagtctgagctcagaaaagcttttccagagaagtatccatagagagcctgggagctatactggacgcaggacaatgcagagtatctccaatgagcaaaaggcctgcaaagtgctggggattgtgttctttctgtttgtggtaatgtggtgcccgttcttcattacgaacattatggccgtcatttgcaaggagtcttgcaacgaggatgtgatcggagctctgctgaacgtcttcgtatggattggatacttgtcctccgccgttaacccgctggtttataccttatttaacaagacgtaccgttcggcgttctcccgctatatccaatgtcagtataaagagaataaaaagcccctacagctgatactcgttaatacaatccccgctctggcctataagagtagtcagctacaaatgggccaaaaaaagaattccaaacaggatgctaaaacgacggacaacgactgtagcatggtagccctgggaaagcagcatagtgaagaggcctcaaaggataatagcgatggcgtgaacgagaaggtgtcttgcgtgtag

SEQ ID NO: 13776 - DNA, 1416 bp, Artificial Sequence
  derived and/or modified sequence
atggatattctgtgcgaggagaatacctcactgtcctccacaacaaacagtctgatgcaactgaacgacgacaccagactatattcaaatgattttaactctggcgaggccaacacctcggacgctttcaactggactgtggattctgaaaaccggacaaacctgtcctgcgaaggttgcttgtccccttcatgcctaagtcttctacaccttcaggagaagaattggtccgcgctgctcaccgctgtggttattattttaaccatcgctgggaatattctggttatcatggccgtcagcctagaaaagaagctccaaaatgccactaattatttcctcatgtcgttagccatagccgatatgctgctaggcttccttgttatgcctgtgtccatgctgactattttgtacggatacaggtggcctttacctagcaaactgtgtgccgtctggatctatttggatgttctttttagcactgcgagcataatgcacctatgcgcgatctcgctcgatcggtacgtcgccatacagaatcctatccaccattctcgttttaatagcaggactaaggcttttctcaaaattatagccgtttggaccatttctgtcggcatttccatgccaatcccggtgtttggtttacaggatgacagtaaggtattcaaggaggggtcatgcctgctcgccgatgacaattttgtgcttattggatcattcgtgtctttctttatccctcttaccatcatggtgattacgtactttctcacaattaagagcctgcagaaagaagccaccctgtgtgtgtcagatctgggaacacgagccaagcttgccagcttttccttcttgccacagtcatccctgtccagcgagaagctgtttcagagatccattcacagggagcctgggtcttatacagggaggcggacgatgcagtccatttctaatgagcagaaagcctgcaaagtcctaggtatcgtgttttttctgttcgtggtgatgtggtgccctttcttcattacaaatatcatggcagtgatttgcaaggaaagctgcaacgaggacgttatcggagcgctgctgaacgttttcgtgtggattggctacctatcctctgccgtgaacccccttgtgtataccctctttaataagacttatagatccgccttctctcgctatattcaatgccagtataaggagaataagaaacccttacagctgattctggtgaacaccattccagcgctcgcctataagtcaagtcagcttcagatgggacagaagaaaaactccaaacaggatgctaaaacaacagataacgattgtagcatggtggctttaggcaaacaacactcagaggaagcgagtaaggataacagcgacggtgttaacgagaaggtgagctgcgtctag

SEQ ID NO: 13777 - DNA, 3007 bp, Artificial Sequence
  derived and/or modified sequence
ccagccccgggagaacagcatgtacaccagcctcagtgttacagagtgtgggtacatcaaggtgaatggtgagcagaaactataacctgttagtccttctacacctcatctgctacaagttctggcttagacatggatattctttgtgaagaaaatacttctttgagctcaactacgaactccctaatgcaattaaatgatgacaccaggctctacagtaatgactttaactccggagaagctaacacttctgatgcatttaactggacagtcgactctgaaaatcgaaccaacctttcctgtgaagggtgcctctcaccgtcgtgtctctccttacttcatctccaggaaaaaaactggtctgctttactgacagccgtagtgattattctaactattgctggaaacatactcgtcatcatggcagtgtccctagagaaaaagctgcagaatgccaccaactatttcctgatgtcacttgccatagctgatatgctgctgggtttccttgtcatgcccgtgtccatgttaaccatcctgtatgggtaccggtggcctctgccgagcaagctttgtgcagtctggatttacctggacgtgctcttctccacggcctccatcatgcacctctgcgccatctcgctggaccgctacgtcgccatccagaatcccatccaccacagccgcttcaactccagaactaaggcatttctgaaaatcattgctgtttggaccatatcagtaggtatatccatgccaataccagtctttgggctacaggacgattcgaaggtctttaaggaggggagttgcttactcgccgatgataactttgtcctgatcggctcttttgtgtcatttttcattcccttaaccatcatggtgatcacctactttctaactatcaagtcactccagaaagaagctactttgtgtgtaagtgatcttggcacacgggccaaattagcttctttcagcttcctccctcagagttctttgtcttcagaaaagctcttccagcggtcgatccatagggagccagggtcctacacaggcaggaggactatgcagtccatcagcaatgagcaaaaggcatgcaaggtgctgggcatcgtcttcttcctgtttgtggtgatgtggtgccctttcttcatcacaaacatcatggccgtcatctgcaaagagtcctgcaatgaggatgtcattggggccctgctcaatgtgtttgtttggatcggttatctctcttcagcagtcaacccactagtctacacactgttcaacaagacctataggtcagccttttcacggtatattcagtgtcagtacaaggaaaacaaaaaaccattgcagttaattttagtgaacacaataccggctttggcctacaagtctagccaacttcaaatgggacaaaaaaagaattcaaagcaagatgccaagacaacagataatgactgctcaatggttgctctaggaaagcagcattctgaagaggcttctaaagacaatagcgacggagtgaatgaaaaggtgagctgtgtgtgataggctagttgccgtggcaactgtggaaggcacactgagcaagttttcacctatctggaaaaaaaaaaatatgagattggaaaaaattagacaagtctagtggaaccaacgatcatatctgtatgcctcattttattctgtcaatgaaaagcggggttcaatgctacaaaatgtgtgcttggaaaatgttctgacagcatttcagctgtgagctttctgatacttatttataacattgtaaatgatatgtctttaaaatgattcacttttattgtataattatgaagccctaagtaaatctaaattaacttctattttcaagtggaaaccttgctgctatgctgttcattgatgacatgggattgagttggttacctattgctgtaaataaaaatagctataaatagtgaaaattttattgaatataatggcctcttaaaaattatctttaaaacttactatggtatatattttgaaaggagaaaaaaaaagccactaaggtcagtgttataaaatctgtattgctaagataattaaatgaaatacttgacaacatttttcattcctgctttttcatagataccattttgaaatattcacaaggttgctggcatttgctgcatttcaagttaattctcagaagtgaaaaagacttcaaatgttattcaataactattgctgctttctcttctacttcttgtgctttactctgaatttccagtgtggtcttgtttaatatttgttcctctaggtaaactagcaaaaggatgatttaacattaccaaatgcctttctagcaattgcttctctaaaacagcactatcgaggtatttggtaacttgctgtgaaatgactgcatcatgcatgcactcttttgagcagtaaatgtatattgatgtaactgtgtcaggattgaggatgaactcaggtttccggctactgacagtggtagagtcctaggacatctctgtaaaaagcaggtgactttcctatgacactcatcaggtaaactgatgctttcagatccatcggtttatactatttattaaaaccattctgcttggttccacaatcatctattgagtgtacatttatgtgtgaagcaaatttctagatatgagaaatataaaaataattaaaacaaaatccttgccttcaaacgaaatggctcggccaggcacggaggctcgtgcatgtaatcctagcactttgggaggctgagatgggaggatcacttgaggccaagagtttgagaccaacctgggtaacaaagtgagacctccctgtctctacaaaaaaaatcaaaaaattatctgatccttgtggcacacaactgtggtcccagctacaggggaggctgagacgcaaggatcacttgagcccagaagctcaaggctgcagtgagccaagttcacaccactgccatttcctcctgggcaacagagtgagaccctatcac

SEQ ID NO: 13778 - DNA, 3564 bp, Artificial Sequence
  derived and/or modified sequence
gtggaaaccaggagtcccttggtgcagacagctcttcctactttcccatgcagttcttttgtgcgactttgaggggctcgtgaatgatttctaaatgtgtgcctgctgaggcgagccgcacagggagggaggaacccagccgagccgtgccagaggaagccaacaggatcctagcagtgcgggagctggctcagctcttgcatgcagtttttgaagtcagcaaaacagaaaccaaattactatcatattatgctggtggaagatcaagaagaggggactctacaccagtttaattactgtgagagatgcagcgagtcacagaataacaaatgtatctcatgtgtggaccctgaagacaaatgacatttatcttcccgagcgctcaaaaaaaaccctgcaacctctatgctaaaagttcattctgcttttttgtcctcggtttggtgagaaaataataaaaccaaacagtggactctcctaaaattgtgaatgaagaaaacttacagccaccacagttcagttctttaactatcattgtaataatggaagacaaaaatccagccccgggagaacagcatgtacaccagcctcagtgttacagagtgtgggtacatcaaggtgaatggtgagcagaaactataacctgttagtccttctacacctcatctgctacaagttctggcttagacatggatattctttgtgaagaaaatacttctttgagctcaactacgaactccctaatgcaattaaatgatgacaccaggctctacagtaatgactttaactccggagaagctaacacttctgatgcatttaactggacagtcgactctgaaaatcgaaccaacctttcctgtgaagggtgcctctcaccgtcgtgtctctccttacttcatctccaggaaaaaaactggtctgctttactgacagccgtagtgattattctaactattgctggaaacatactcgtcatcatggcagtgtccctagagaaaaagctgcagaatgccaccaactatttcctgatgtcacttgccatagctgatatgctgctgggtttccttgtcatgcccgtgtccatgttaaccatcctgtatgggtaccggtggcctctgccgagcaagctttgtgcagtctggatttacctggacgtgctcttctccacggcctccatcatgcacctctgcgccatctcgctggaccgctacgtcgccatccagaatcccatccaccacagccgcttcaactccagaactaaggcatttctgaaaatcattgctgtttggaccatatcagtaggtatatccatgccaataccagtctttgggctacaggacgattcgaaggtctttaaggaggggagttgcttactcgccgatgataactttgtcctgatcggctcttttgtgtcatttttcattcccttaaccatcatggtgatcacctactttctaactatcaagtcactccagaaagaagctactttgtgtgtaagtgatcttggcacacgggccaaattagcttctttcagcttcctccctcagagttctttgtcttcagaaaagctcttccagcggtcgatccatagggagccagggtcctacacaggcaggaggactatgcagtccatcagcaatgagcaaaaggcatgcaaggtgctgggcatcgtcttcttcctgtttgtggtgatgtggtgccctttcttcatcacaaacatcatggccgtcatctgcaaagagtcctgcaatgaggatgtcattggggccctgctcaatgtgtttgtttggatcggttatctctcttcagcagtcaacccactagtctacacactgttcaacaagacctataggtcagccttttcacggtatattcagtgtcagtacaaggaaaacaaaaaaccattgcagttaattttagtgaacacaataccggctttggcctacaagtctagccaacttcaaatgggacaaaaaaagaattcaaagcaagatgccaagacaacagataatgactgctcaatggttgctctaggaaagcagcattctgaagaggcttctaaagacaatagcgacggagtgaatgaaaaggtgagctgtgtgtgataggctagttgccgtggcaactgtggaaggcacactgagcaagttttcacctatctggaaaaaaaaaaatatgagattggaaaaaattagacaagtctagtggaaccaacgatcatatctgtatgcctcattttattctgtcaatgaaaagcggggttcaatgctacaaaatgtgtgcttggaaaatgttctgacagcatttcagctgtgagctttctgatacttatttataacattgtaaatgatatgtctttaaaatgattcacttttattgtataattatgaagccctaagtaaatctaaattaacttctattttcaagtggaaaccttgctgctatgctgttcattgatgacatgggattgagttggttacctattgctgtaaataaaaatagctataaatagtgaaaattttattgaatataatggcctcttaaaaattatctttaaaacttactatggtatatattttgaaaggagaaaaaaaaagccactaaggtcagtgttataaaatctgtattgctaagataattaaatgaaatacttgacaacatttttcattcctgctttttcatagataccattttgaaatattcacaaggttgctggcatttgctgcatttcaagttaattctcagaagtgaaaaagacttcaaatgttattcaataactattgctgctttctcttctacttcttgtgctttactctgaatttccagtgtggtcttgtttaatatttgttcctctaggtaaactagcaaaaggatgatttaacattaccaaatgcctttctagcaattgcttctctaaaacagcactatcgaggtatttggtaacttgctgtgaaatgactgcatcatgcatgcactcttttgagcagtaaatgtatattgatgtaactgtgtcaggattgaggatgaactcaggtttccggctactgacagtggtagagtcctaggacatctctgtaaaaagcaggtgactttcctatgacactcatcaggtaaactgatgctttcagatccatcggtttatactatttattaaaaccattctgcttggttccacaatcatctattgagtgtacatttatgtgtgaagcaaatttctagatatgagaaatataaaaataattaaaacaaaatccttgccttcaaacgaaatggctcggccaggcacggaggctcgtgcatgtaatcctagcactttgggaggctgagatgggaggatcacttgaggccaagagtttgagaccaacctgggtaacaaagtgagacctccctgtctctacaaaaaaaatcaaaaaattatctgatccttgtggcacacaactgtggtcccagctacaggggaggctgagacgcaaggatcacttgagcccagaagctcaaggctgcagtgagccaagttcacaccactgccatttcctcctgggcaacagagtgagaccctatcac

SEQ ID NO: 13779 - DNA, 1416 bp, Artificial Sequence
  derived and/or modified sequence
atggacatcctgtgcgaggagaacaccagcctgagcagcaccaccaacagcctgatgcagctgaacgacgacaccagactgtacagcaacgacttcaacagcggcgaggccaacaccagcgacgccttcaactggaccgtggacagcgagaacagaaccaacctgagctgcgagggctgcctgagccccagctgcctgagcctgctgcacctgcaggagaagaactggagcgccctgctgaccgccgtggtgatcatcctgaccatcgccggcaacatcctggtgatcatggccgtgagcctggagaagaagctgcagaacgccaccaactacttcctgatgagcctggccatcgccgacatgctgctgggcttcctggtgatgcccgtgagcatgctgaccatcctgtacggctacagatggcccctgcccagcaagctgtgcgccgtgtggatctacctggacgtgctgttcagcaccgccagcatcatgcacctgtgcgccatcagcctggacagatacgtggccatccagaaccccatccaccacagcagattcaacagcagaaccaaggccttcctgaagatcatcgccgtgtggaccatcagcgtgggcatcagcatgcccatccccgtgttcggcctgcaggacgacagcaaggtgttcaaggagggcagctgcctgctggccgacgacaacttcgtgctgatcggcagcttcgtgagcttcttcatccccctgaccatcatggtgatcacctacttcctgaccatcaagagcctgcagaaggaggccaccctgtgcgtgagcgacctgggcaccagagccaagctggccagcttcagcttcctgccccagagcagcctgagcagcgagaagctgttccagagaagcatccacagagagcccggcagctacaccggcagaagaaccatgcagagcatcagcaacgagcagaaggcctgcaaggtgctgggcatcgtgttcttcctgttcgtggtgatgtggtgccccttcttcatcaccaacatcatggccgtgatctgcaaggagagctgcaacgaggacgtgatcggcgccctgctgaacgtgttcgtgtggatcggctacctgagcagcgccgtgaaccccctggtgtacaccctgttcaacaagacctacagaagcgccttcagcagatacatccagtgccagtacaaggagaacaagaagcccctgcagctgatcctggtgaacaccatccccgccctggcctacaagagcagccagctgcagatgggccagaagaagaacagcaagcaggacgccaagaccaccgacaacgactgcagcatggtggccctgggcaagcagcacagcgaggaggccagcaaggacaacagcgacggcgtgaacgagaaggtgagctgcgtgtag

SEQ ID NO: 13780 - protein, 391 aa, Artificial Sequence
  derived and/or modified sequence
MFSPWKISMFLSVREDSVPTTASFSADMLNVTLQGPTLNGTFAQSKCPQVEWLGWLNTIQPPFLWVLFVLATLENIFVLSVFCLHKSSCTVAEIYLGNLAAADLILACGLPFWAITISNNFDWLFGETLCRVVNAIISMNLYSSICFLMLVSIDRYLALVKTMSMGRMRGVRWAKLYSLVIWGCTLLLSSPMLVFRTMKEYSDEGHNVTACVISYPSLIWEVFTNMLLNVVGFLLPLSVITFCTMQIMQVLRNNEMQKFKEIQTERRATVLVLVVLLLFIICWLPFQISTFLDTLHRLGILSSCQDERIIDVITQIASFMAYSNSCLNPLVYVIVGKRFRKKSWEVYQGVCQKGGCRSEPIQMENSMGTLRTSISVERQIHKLQDWAGSRQ

SEQ ID NO: 13781 - protein, 364 aa, Artificial Sequence
  derived and/or modified sequence
MLNVTLQGPTLNGTFAQSKCPQVEWLGWLNTIQPPFLWVLFVLATLENIFVLSVFCLHKSSCTVAEIYLGNLAAADLILACGLPFWAITISNNFDWLFGETLCRVVNAIISMNLYSSICFLMLVSIDRYLALVKTMSMGRMRGVRWAKLYSLVIWGCTLLLSSPMLVFRTMKEYSDEGHNVTACVISYPSLIWEVFTNMLLNVVGFLLPLSVITFCTMQIMQVLRNNEMQKFKEIQTERRATVLVLVVLLLFIICWLPFQISTFLDTLHRLGILSSCQDERIIDVITQIASFMAYSNSCLNPLVYVIVGKRFRKKSWEVYQGVCQKGGCRSEPIQMENSMGTLRTSISVERQIHKLQDWAGSRQ

SEQ ID NO: 13782 - DNA, 1176 bp, Artificial Sequence
  derived and/or modified sequence
atgttttcaccctggaagatttccatgtttctgtctgttcgggaagactccgtcccaacaaccgcctcgttttccgcggacatgttgaacgtcactttgcaggggccaacacttaatgggacgtttgcccagagcaagtgccctcaggtggagtggctgggctggttaaacaccatacagccaccctttctgtgggtgttatttgtcctcgctaccctggagaacatcttcgtcctctctgtgttctgtcttcataagagcagttgcactgtagccgagatttatcttggtaatctggcggccgccgacttgatcctggcgtgcggtcttcctttttgggccattaccatcagtaacaatttcgattggctgttcggagagaccctgtgtagagtcgtcaatgccattatctcaatgaacttgtactcaagtatctgttttctgatgctggtaagcatcgacaggtatctggccctggtaaaaactatgtccatgggtcggatgcggggggtccgatgggctaagctgtactcactggtgatttgggggtgtaccctcctgctgtcttccccgatgttagtcttccggaccatgaaggagtacagcgacgagggccataatgtgacggcttgcgtgatttcctaccctagtctaatctgggaggtctttacaaacatgcttctgaatgttgtcggcttcctgttaccgctgtctgtcatcactttttgtaccatgcagattatgcaggtgctccgtaataacgagatgcaaaagtttaaggaaatccaaaccgagcggcgggccacagttctggtgctggtcgttttactgctctttataatatgctggctcccatttcaaatttcaactttcctggatactctccaccggctgggcatactgtcatcttgtcaggatgagagaattattgacgtgattacacagattgcaagcttcatggcctactcgaattcatgcttgaaccctcttgtctatgtgatcgtgggaaagcgatttagaaaaaaatcctgggaagtgtaccaaggcgtatgtcagaaaggaggatgccggtccgaaccgatccagatggaaaacagcatgggcaccctgcgaacaagcatctctgtggagcggcagatacacaagctgcaagactgggcaggaagtcggcaatag

SEQ ID NO: 13783 - DNA, 1095 bp, Artificial Sequence
  derived and/or modified sequence
atgctcaacgtcacactgcaggggccaacgttgaatggaactttcgcccagagcaaatgccctcaagtggaatggctgggctggcttaacacaatccagccaccctttctttgggttctgttcgtgctggctaccttggagaacatctttgtgctcagcgtgttttgtctccacaaaagctcttgcacagtggctgaaatctacctgggcaatctggcagctgccgatctcatcctcgcttgtgggctgcccttttgggccattactatctcaaataattttgattggctgtttggcgagaccctttgccgtgtggtcaatgctattatctcgatgaacctttattccagcatatgctttttaatgttagtatccatcgatcgctatctagccctcgtaaaaaccatgagtatggggcggatgcgaggagttcggtgggcaaagttatattctttagtgatttggggctgcactctcctgctgagctcgcctatgctggtctttaggacaatgaaggagtactctgatgagggccataatgtgaccgcttgtgtgatcagctacccgagcctgatctgggaagtgtttacaaacatgcttcttaatgtcgttggttttttgctgccattgtctgttatcaccttctgcaccatgcagatcatgcaggtgctgaggaacaatgaaatgcagaaatttaaggaaatccaaacagagcgacgcgcaacagtgcttgtgttagtggttcttctccttttcattatttgttggctgcccttccagatttcgacctttctggatactctgcatagactcggcatcctctcctcttgccaggacgaacgaatcattgacgtcatcacacagatcgccagtttcatggcctattctaacagctgtctgaatcccttggtgtatgttattgtgggcaaaagattcaggaaaaaaagttgggaggtgtatcagggcgtctgtcaaaaaggtggctgcaggtccgagccaattcaaatggagaactcaatgggcaccctgaggacctccattagtgtcgaacgccagatccacaaactgcaggactgggctggttcgcgtcaatag

SEQ ID NO: 13784 - DNA, 1095 bp, Artificial Sequence
  derived and/or modified sequence
atgttgaatgttactctccagggcccaaccctgaatggcacgttcgcccagtccaagtgtcctcaagtggaatggctcggatggttaaatactatccagcctccgttcttgtgggttctattcgtgctcgctactttagagaatattttcgtactatccgtattttgccttcacaagagttcctgtaccgtcgcagaaatttatctagggaatctggccgccgctgacctcatcctggcttgcgggctacctttctgggctatcactatctcaaataattttgactggctgttcggcgagaccctgtgtagagtggtcaatgccataatctctatgaatctttattctagcatctgcttcttaatgctggtgtctattgacaggtatctggcactggtgaaaacaatgtccatggggcgaatgcggggagttagatgggccaaactgtattctcttgtaatttggggctgtacactgttgttgagcagccccatgctagtctttcgtactatgaaggaatactccgacgagggtcataacgtgactgcctgcgtgatctcatatccttccctgatatgggaggtgttcacaaacatgctgctcaacgtcgtgggtttccttttaccactgtccgtcatcactttttgcacaatgcagattatgcaggttcttcgcaataatgagatgcagaagtttaaggagatccaaacagagcggagagcaacggtgctggtgctggtggttttgctcctttttatcatttgttggctgccctttcagataagtaccttcctggacaccctccaccggctcggcatcctgtcaagttgtcaggacgagcgcattatagatgtgataacacagattgcatcattcatggcctactctaatagttgcctgaaccctctggtgtacgtgatagtcggtaagcgatttaggaagaaaagctgggaggtgtaccagggggtttgccagaaaggcggttgtaggtctgaacccattcagatggaaaactccatgggaacacttcgcacaagtattagcgtggagagacagatccataagcttcaggactgggccgggtctaggcagtag

SEQ ID NO: 13785 - DNA, 1176 bp, Artificial Sequence
  derived and/or modified sequence
atgttctccccatggaaaatctctatgttcctgtccgtcagggaggacagcgtgcccacaactgcaagtttcagcgctgacatgctgaacgtcaccctgcagggcccaacactcaatggcacttttgctcagtctaaatgtccccaggtggaatggttgggctggctgaacacgatccagcctcccttcttgtgggtgctgttcgtcctggctactctggagaacattttcgtcttgtcagtattctgtcttcacaagtcatcttgtaccgtggcagagatatacctcggtaacctagccgcagctgatttgatcctcgcttgtggcctaccattctgggccataacaatcagcaataattttgattggctgttcggcgagacactgtgccgcgtcgttaacgcgattatttccatgaatctgtatagcagcatctgtttcctgatgttagtgtcaatagatagatacttggcactggtcaagaccatgtccatgggacgcatgcggggggtgcgctgggcgaaactgtactctctagtaatctgggggtgcacactcttactgtcaagtcctatgttggttttccgcacaatgaaagaatatagtgacgaaggccacaatgtcaccgcttgtgttataagttacccgtccttaatttgggaagtgttcacgaatatgctgcttaatgtcgtagggtttctgcttccactgagtgtcatcacattctgcacaatgcagattatgcaggttctacggaacaacgagatgcagaaattcaaagaaatccagaccgagcgccgcgccaccgtcctcgtcctcgtcgttctattgctgttcatcatatgttggctgccatttcagatctctacattccttgataccctccatcgccttgggatactgtcttcatgtcaagacgaacgcattatcgacgtcatcactcaaatcgcaagttttatggcttactccaacagttgtctgaatcccctagtttatgtgattgtggggaagcgctttcgaaagaagagctgggaagtctaccagggcgtatgccagaagggaggatgtcggtccgagccaatccagatggaaaattcgatgggcactctgagaactagtatctcggtggaacggcaaatacacaagctccaagactgggccgggtcgcgtcagtag

SEQ ID NO: 13786 - DNA, 1176 bp, Artificial Sequence
  derived and/or modified sequence
atgttcagcccctggaagatctccatgttcctgtctgtgagagaagattctgtgcccaccacagccagcttctctgctgacatgctgaatgtgaccctgcagggccccaccctgaatggcacctttgcccagagcaagtgcccccaggtggagtggctgggctggctgaacaccatccagccccccttcctgtgggtgctgtttgtgctggccaccctggagaacatctttgtgctgagcgtcttctgcctgcacaagagcagctgcaccgtggccgagatctacctgggcaacctggccgctgctgacctgatcctggcctgtggcctgcccttctgggccatcaccatcagcaacaactttgactggctgtttggagagaccctgtgccgggtggtgaatgccatcatctccatgaacctgtacagcagcatctgcttcctgatgctggtgtccattgaccgctacctggccctggtgaagaccatgtccatgggccgcatgaggggcgtgcgctgggccaagctgtacagcctggtgatctggggctgcaccctgctgctgagcagccccatgctggtgttccgcaccatgaaggagtacagtgatgagggccacaacgtgacagcctgtgtgatctcctaccccagcctcatctgggaggtgttcaccaacatgctgctgaatgtggtgggcttcctgctgcccctgagcgtcatcaccttctgcaccatgcagatcatgcaggtgctgaggaacaatgagatgcagaagttcaaggagatccagacagagcggcgggccaccgtgctggtgctggtggtgctgctgctcttcatcatctgctggctgcccttccagatcagcaccttcctggacaccctgcaccggctgggcatcctgagcagctgccaggatgagcgcatcattgatgtgatcacccagatcgccagcttcatggcctacagcaacagctgcctgaaccccctggtgtatgtgattgtgggcaagcgcttcaggaagaagtcctgggaggtgtaccagggcgtgtgccagaagggcggctgccgctctgagcccatccagatggagaacagcatgggcaccctgcggaccagcatctctgtggagcggcagatccacaagctgcaggactgggccggcagccggcagtag

SEQ ID NO: 13787 - DNA, 1095 bp, Artificial Sequence
  derived and/or modified sequence
atgctgaatgtgaccctgcagggccccaccctgaatggcacctttgcccagagcaaatgtccccaggtggagtggctgggctggctgaacaccatccagccccccttcctgtgggtgctgtttgtgctggccaccctggagaacatctttgtgctgtctgtgttctgcctgcacaagagcagctgcaccgtggccgagatctacctgggcaacctggccgctgctgacctgatcctggcctgtggcctgcccttctgggccatcaccatcagcaacaactttgactggctgtttggagagaccctgtgccgggtggtgaatgccatcatctccatgaacctgtacagcagcatctgcttcctgatgctggtgtccattgaccgctacctggccctggtgaagaccatgtccatgggccgcatgagaggagtgcgctgggccaagctgtacagcctggtgatctggggctgcaccctgctgctgagcagccccatgctggtgttccgcaccatgaaggagtacagtgatgagggccacaacgtgacagcctgcgtcatctcctaccccagcctcatctgggaggtgttcaccaacatgctgctgaatgtggtgggcttcctgctgcccctgagcgtcatcaccttctgcaccatgcagatcatgcaggtgctgagaaataatgagatgcagaagttcaaggagatccagacagaaagaagagccaccgtgctggtgctggtggtgctgctgctcttcatcatctgctggctgcccttccagatcagcaccttcctggacaccctgcaccggctgggcatcctgagcagctgccaggatgagcgcatcattgatgtgatcacccagatcgccagcttcatggcctacagcaacagctgcctgaaccccctggtgtatgtgattgtgggcaagcgcttcaggaagaagtcctgggaggtgtaccagggcgtgtgccagaagggcggctgccgctctgagcccatccagatggagaacagcatgggcaccctgcggaccagcatctctgtggagcggcagatccacaagctgcaggactgggccggcagccggcagtag

SEQ ID NO: 13788 - DNA, 1176 bp, Artificial Sequence
  derived and/or modified sequence
atgttcagcccctggaagatcagcatgttcctgagcgtgcgggaggacagcgtcccgaccaccgctagcttttccgccgatatgctgaacgtgaccctgcagggtcctactctgaatggaacgtttgcacaaagcaaatgcccacaggtcgagtggctagggtggctcaacacaattcagcctccttttctgtgggtcctgttcgttctagcgacactggagaatattttcgttctctccgtgttctgcctgcataagtcctcgtgcactgtagcagagatttacctaggtaacctggctgctgcggacctgattctcgcctgcggactgccattctgggcgataaccatatctaacaacttcgactggttgttcggcgagaccttgtgccgcgtagtgaatgccattatctccatgaatctgtattcatccatttgttttctgatgctcgtcagcatcgacaggtatctggccctggtgaagactatgagcatgggtcgcatgagaggtgtaaggtgggctaaactgtatagtctggtgatttggggctgcacactgctgctctcttccccgatgctcgtcttcagaactatgaaggaatattccgatgagggtcataacgttacagcctgtgtcattagttaccccagtttgatttgggaggttttcactaacatgcttctcaatgtcgttggctttctgcttcccctatccgtcatcaccttttgcaccatgcagatcatgcaagtgctgcggaataatgaaatgcagaagtttaaagagatccagacagagagaagagccaccgtactggttttggtagtcttactgctcttcattatctgctggctgccattccaaatctcaacgtttctggacactctgcaccgcctgggcatcctgtcaagctgccaggatgagaggattatcgatgtcattacacagatcgcttccttcatggcttattcaaacagctgcttgaatcccctagtgtacgtgattgtcggcaaacggttccggaaaaaatcctgggaggtttatcaaggagtttgccagaaaggtggctgtcgaagtgagccaattcaaatggaaaacagtatgggtacccttaggactagtatatccgtcgagcgacagatacataagctccaggactgggctggatcacggcagtag

SEQ ID NO: 13789 - DNA, 1095 bp, Artificial Sequence
  derived and/or modified sequence
atgctgaacgtgaccctgcagggccccaccctgaacggcaccttcgcacagagcaagtgtccgcaggtcgagtggctgggctggttgaacaccatccaaccccctttcttatgggtgctgttcgttctcgcaacactcgagaatatcttcgtgctcagcgttttctgcctgcacaaatccagttgcacagtggcggagatctacctcggtaatctcgccgccgccgacttaatcttagcatgcggcctgcctttctgggctatcaccatctccaacaactttgactggctgttcggggagaccctgtgtcgcgtggtgaacgctattatctcgatgaacctttactcctcaatctgcttccttatgctggtcagtatcgacaggtatcttgctctggtcaaaactatgtccatgggtaggatgcgtggagtccgatgggccaaactgtatagcttggtcatttgggggtgtactctgttactttcctccccgatgttggtctttcggactatgaaggagtactccgacgagggacacaacgtcacagcctgtgtgatctcgtacccctctctgatttgggaggtgttcaccaatatgctcctgaatgtggtgggattcctgttgcctctctcggtgatcactttctgcacaatgcagattatgcaggtactgaggaacaacgagatgcaaaagtttaaagagatacaaacggagcgtagagccacggtgttggtgctggttgtcctgctactgtttatcatctgttggctgccgtttcaaatctccacatttctggatactcttcacaggctgggcatactctccagctgccaggacgaacggataatcgacgtcattacgcagatagcctcatttatggcatacagtaatagttgccttaacccgctagtctacgtcatcgtcggtaagagatttcgaaagaaaagctgggaagtttaccagggagtgtgccaaaaaggcggctgccgtagcgagcccatccagatggagaattcgatgggaacgctacgtactagtatctcggtggagcggcagatacataaactgcaagattgggcgggaagtaggcagtag

SEQ ID NO: 13790 - DNA, 1095 bp, Artificial Sequence
  derived and/or modified sequence
atgctgaacgtgaccctgcagggccccaccctgaacggcaccttcgcccagtccaaatgtcctcaggtggaatggttaggctggctcaataccattcagccccccttcttgtgggtgttatttgtgctggcgacgttagaaaacatcttcgtcttatccgtattctgtctgcataaatcatcttgtaccgtggccgaaatatatctcggtaacctggctgctgcagatctgattctggcctgtggtctcccattctgggcaataaccatttctaacaacttcgattggctcttcggggaaaccttgtgccgcgtggtgaatgcaatcatatcaatgaatttatatagctctatttgttttctgatgctggtgagtatcgacagatacctggcacttgtcaagaccatgtctatggggaggatgcggggcgtacgttgggccaaactatattccttggtaatttggggatgcacactgctgctctcttcccccatgctggtattcaggactatgaaggaatactcggatgaaggtcataatgtcacggcatgcgtcatcagctatccttcactgatttgggaagtcttcacaaacatgctcctgaacgtggtcgggttccttctgcccctcagcgtcattactttctgcacaatgcagattatgcaggtgctgcgcaataacgagatgcagaagttcaaagagatacaaaccgaaagacgtgcaaccgttttagtccttgtcgtcttgctcctcttcattatctgttggctaccattccagatcagtaccttcctcgacactctgcaccgactcggcatcctctcaagctgtcaagacgaacggataatagatgtgattacacagattgcttcatttatggcctactccaactcctgtttaaaccccctggtgtatgtaatcgtgggcaagagatttcgtaaaaaatcttgggaggtctaccagggcgtgtgtcaaaagggcggatgccgcagcgaaccaattcagatggagaacagcatgggcaccttgcgaacatccatcagtgtggagcgtcagatccacaaacttcaggactgggccgggtcccgtcagtag

SEQ ID NO: 13791 - DNA, 1176 bp, Artificial Sequence
  derived and/or modified sequence
atgttcagcccctggaagatcagcatgttcctgagcgtgcgggaggattcagtgccgacgaccgcctcattcagtgcggacatgctgaacgtcactctgcaagggccgactctaaacggcacatttgcccaatcaaagtgtcctcaggtggaatggctgggctggttgaacaccattcagcccccgttcctttgggtgctttttgtgcttgcaaccctggagaacatcttcgtactgagcgtcttctgccttcacaagagctcatgtaccgtggccgagatctatctgggcaacttggctgccgctgaccttattctggcttgtggtctccctttctgggcaataacgatttctaacaactttgattggctgttcggggagactttgtgtcgggtggtgaatgccatcatttctatgaatctgtacagttctatctgctttctaatgctggtgtctattgacagatacctggctctggtgaaaacaatgagtatgggtcggatgcggggggtgcgctgggccaaactgtacagcctggtaatctgggggtgcacacttttgctgtcttcaccaatgcttgtcttccgtacaatgaaggagtatagtgatgaggggcacaacgtaactgcctgcgttatatcctatccttcactgatctgggaggtctttaccaacatgctcttaaatgtggtgggttttctgctccctctctccgtgatcacattctgtacaatgcagatcatgcaagtacttcggaataatgaaatgcagaaattcaaggagatccagactgaacggcgcgccacagttctggtgctggtcgtactgctcctgtttatcatctgttggttaccctttcagatcagtacctttctcgacaccctgcatcgacttggaatcctaagctcctgtcaggatgagaggatcattgatgtaatcactcagattgcaagtttcatggcctactcaaacagctgcctaaatcctcttgtgtatgtaatagttggaaagcgctttcggaagaaatcctgggaggtttaccaaggcgtgtgtcaaaaaggtggatgccgaagcgagccaattcagatggagaacagcatgggtactctgagaacatctatatcagtggagcgccagatccacaaactccaggactgggccggctcaagacagtag

SEQ ID NO: 13792 - DNA, 1176 bp, Artificial Sequence
  derived and/or modified sequence
atgttctctccctggaagataagcatgtttctatcagttcgggaagatagcgtgccgacgacagccagtttctcggctgacatgctcaacgtgactttgcagggccctaccctgaacggaacttttgcacagtccaagtgcccgcaggttgagtggctgggctggctcaatactatccaacctcccttcttgtgggtattgttcgtgctggcaacactggagaatatatttgtcttatccgtcttctgcctgcacaaatcctcctgtacggttgccgagatctatctgggcaatttagctgccgcagacttgatcctggcatgtggactgccattctgggccatcaccatttctaacaactttgactggctgtttggagaaacgctatgccgcgttgtcaatgcaattatttccatgaatctgtactcctctatatgctttctgatgctagtgagcatcgatagatacctcgccctcgtgaaaactatgagcatgggacgtatgagaggagttcggtgggccaaactgtactccctggtgatttggggctgtaccttactcttgagcagcccaatgctcgtgttccggaccatgaaggaatatagcgacgaaggccataacgtgaccgcatgtgtcatatcctatccatccttgatttgggaagtgtttactaacatgctgctgaacgtcgtgggctttcttctgcccctcagcgtgataactttttgtacgatgcagataatgcaggttctgaggaacaacgaaatgcagaagttcaaggagattcagaccgagaggcgcgcaacagtccttgtgctggtggtgcttctcctctttatcatctgttggttaccttttcagatcagcaccttcctggacacattacatcggctgggaatcctcagctcttgtcaggatgagaggataatagatgtcattacgcagattgccagtttcatggcttattcaaattcctgtcttaaccccctggtctacgtgattgtgggtaaaaggtttcgcaagaagtcttgggaggtataccaaggggtttgccagaagggcggatgccggtccgaaccaatccaaatggagaacagtatgggaacactacggaccagtatctccgtggagagacagatccacaaactgcaggactgggctggatcaagacagtag

SEQ ID NO: 13793 - DNA, 1095 bp, Artificial Sequence
  derived and/or modified sequence
atgctcaacgtgaccctgcagggcccaactctaaatggaactttcgcccagagcaaatgccctcaggtggagtggctcggctggctcaacaccattcagcctccattcctctgggtcctgttcgtgttagcaactctggaaaacatcttcgttctctcagtgttctgtttacacaagagctcttgtactgtcgcagaaatttaccttggtaatctggcggcagcagatttaattctggcttgtggactgcccttctgggcaatcaccatcagcaacaacttcgattggctattcggagaaacactgtgccgcgtcgtgaatgctatcatctctatgaatctctactcgtctatctgctttctcatgctggtctccatagaccgctacttggctttggtcaaaacaatgtcgatgggacgcatgaggggcgtgcggtgggccaagctgtattccctggtcatctggggttgcacccttctgctgtcttcaccaatgctcgtgtttagaacaatgaaggagtactcagacgaggggcataatgttaccgcttgtgttatctcctatccatctctgatctgggaggtttttacaaacatgctcttgaatgtcgtaggattccttttgccactgtctgtgatcactttttgtacgatgcaaattatgcaggtgctgagaaacaatgagatgcagaagttcaaggaaattcaaaccgaaagacgcgctaccgttttagtgctcgtggtactgttgctgttcatcatctgctggctgccattccagatttcaacatttcttgacacactccaccgactgggtattctgtcatcctgccaggatgaacggatcattgatgtgattacacagatagcaagctttatggcttattccaactcctgcctcaatccactggtttacgtgattgtgggcaagcgattcagaaaaaaatcttgggaggtgtaccagggagtgtgtcagaaaggcggttgtaggtcagaacctattcagatggaaaactccatgggcaccctccggacatctattagcgtcgaacggcagattcataagctccaggactgggcagggtctagacagtag

SEQ ID NO: 13794 - DNA, 1095 bp, Artificial Sequence
  derived and/or modified sequence
atgctgaatgttacactacaaggtccgacgctgaacggcactttcgctcaatcaaagtgtccccaggtcgaatggctaggttggctaaacacaattcagccaccttttctttgggtgctattcgttctcgccacgctggagaatattttcgttttatcagtattctgtctgcataaatcatcctgcactgtggctgaaatatatcttggcaatctcgccgctgccgatctgattctggcatgcggcctgcctttctgggcaataaccatcagcaataatttcgactggctatttggggagaccctgtgcagagtggtgaacgccatcatcagtatgaacctgtattcctctatatgcttcctgatgctggtttctattgacaggtatctggctctcgtcaaaacaatgagcatggggagaatgagaggcgtgcgttgggcgaagctgtactcactagtgatctggggatgcacgctgctactttcttcgcctatgctggtgtttaggaccatgaaggaatactctgatgaggggcacaacgttacagcttgtgtcatctcctacccatctctcatctgggaggtgttcaccaacatgctgctaaatgttgtagggtttctgttgccactcagcgttatcacattttgtacaatgcagatcatgcaggtcctccggaataatgagatgcaaaagttcaaggagattcaaacggagcgaagggccacagttcttgtcctggtagtgttactgttgttcatcatctgctggctgcctttccagatcagcacttttctggacacccttcatagacttgggatcctgtccagctgccaggatgaaaggataatcgatgtgatcacccagatcgcctcctttatggcctactctaactcttgtttaaacccgttggtgtacgtcatcgtgggcaagcgcttccggaaaaaaagctgggaagtataccagggggtgtgccaaaagggcggatgtcggagcgagcccattcagatggagaactcaatggggacactccggacgtcaatctccgttgagagacagattcataagctccaagactgggctggtagtaggcagtag

SEQ ID NO: 13795 - DNA, 1176 bp, Artificial Sequence
  derived and/or modified sequence
atgttcagtccctggaagatttctatgttcctctcagtgagggaagatagcgtgcccactaccgcgagtttctcagccgacatgcttaatgtcaccctccagggccctaccctaaatggtacttttgcacagagtaaatgccctcaggtggaatggctcggctggctgaatacgattcagcctccattcctatgggtgcttttcgtcctggccactttggaaaacatcttcgtgttgtcagtattctgtctccataaatcctcttgcacagtggccgagatctatctggggaacttggccgctgcagacctcatcctggcttgtggcttgcctttctgggccattactatttccaataacttcgattggctttttggcgagactctctgtagagtcgtaaacgcgattatcagtatgaatctgtactcctcgatctgcttcttgatgcttgttagtattgacaggtaccttgctctggtgaaaaccatgagcatgggtcgcatgaggggcgtgcggtgggccaagttgtattccctcgtgatctggggttgtacacttctcttgagttctccaatgctggttttccgtaccatgaaagaatactccgacgaggggcacaatgtcaccgcgtgcgtcatttcatacccgagtctgatctgggaagtgttcaccaacatgttgctgaacgtagtcggttttctattgccccttagcgtcataacattttgcactatgcaaatcatgcaagtgctgcggaacaacgagatgcagaagtttaaggaaatccagacggaacgcagagccactgtgttggttctcgtggtcttgctgttgttcattatttgttggcttccctttcagatatcaacatttcttgacacgctccatagattgggcatactcagttcatgccaggatgaacgtattatcgacgtgattacacagatagcgtctttcatggcatacagcaatagttgcctcaatcctctggtgtacgtgattgtcggcaagcgcttcaggaagaagagctgggaagtgtaccagggtgtttgccagaaaggtggttgtcgtagcgaaccaattcagatggagaattctatgggcactctgcgtacctctatttcagtggaacggcagatccacaaactgcaggattgggccggaagccggcagtag

SEQ ID NO: 13796 - DNA, 4197 bp, Artificial Sequence
  derived and/or modified sequence
atcactacccagcccttgaaagatgagctgttcccgccgccactccagctctggcttctgggctccgaggaggggtggggacggtggggacggtggggacatcaggctgccccgcagtaccagggagcgactgaagtgcccatgccgcttgctccggagaaggtgtggcctcactcacatcccactctgagtccaaatgttctctccctggaagatatcaatgtttctgtctgttcgtgaggactccgtgcccaccacggcctctttcagcgccgacatgctcaatgtcaccttgcaagggcccactcttaacgggacctttgcccagagcaaatgcccccaagtggagtggctgggctggctcaacaccatccagccccccttcctctgggtgctgttcgtgctggccaccctagagaacatctttgtcctcagcgtcttctgcctgcacaagagcagctgcacggtggcagagatctacctggggaacctggccgcagcagacctgatcctggcctgcgggctgcccttctgggccatcaccatctccaacaacttcgactggctctttggggagacgctctgccgcgtggtgaatgccattatctccatgaacctgtacagcagcatctgtttcctgatgctggtgagcatcgaccgctacctggccctggtgaaaaccatgtccatgggccggatgcgcggcgtgcgctgggccaagctctacagcttggtgatctgggggtgtacgctgctcctgagctcacccatgctggtgttccggaccatgaaggagtacagcgatgagggccacaacgtcaccgcttgtgtcatcagctacccatccctcatctgggaagtgttcaccaacatgctcctgaatgtcgtgggcttcctgctgcccctgagtgtcatcaccttctgcacgatgcagatcatgcaggtgctgcggaacaacgagatgcagaagttcaaggagatccagacagagaggagggccacggtgctagtcctggttgtgctgctgctattcatcatctgctggctgcccttccagatcagcaccttcctggatacgctgcatcgcctcggcatcctctccagctgccaggacgagcgcatcatcgatgtaatcacacagatcgcctccttcatggcctacagcaacagctgcctcaacccactggtgtacgtgatcgtgggcaagcgcttccgaaagaagtcttgggaggtgtaccagggagtgtgccagaaagggggctgcaggtcagaacccattcagatggagaactccatgggcacactgcggacctccatctccgtggaacgccagattcacaaactgcaggactgggcagggagcagacagtgagcaaacgccagcagggctgctgtgaatttgtgtaaggattgagggacagttgcttttcagcatgggcccaggaatgccaaggagacatctatgcacgaccttgggaaatgagttgatgtctccggtaaaacaccggagactaattcctgccctgcccaattttgcagggagcatggctgtgaggatggggtgaactcacgcacagccaaggactccaaaatcacaacagcattactgttcttatttgctgccacacctgagccagcctgctccttcccaggagtggaggaggcctgggggcagggagaggagtgactgagcttccctcccgtgtgttctccgtccctgccccagcaagacaacttagatctccaggagaactgccatccagctttggtgcaatggctgagtgcacaagtgagttgttgccctgggtttctttaatctattcagctagaactttgaaggacaatttcttgcattaataaaggttaagccctgaggggtccctgataacaacctggagaccaggattttatggctcccctcactgatggacaaggaggtctgtgccaaagaagaatccaataagcacatattgagcacttgctgtatatgcagtattgagcactgtaggcaagagggaagaaagagaaggagccatctccatcttgaaggaactcaaagactcaagtgggaacgactgggcactgccaccaccagaaagctgttcgacgagacggtcgagcagggtgctgtgggtgatatggacagcagaagggggagaccaaggttccagctcaaccaataactattgcacaaccatctgtccctgcctcagttccctcttctgtaacatgaagtcgttgtgagggttaaaggcagtaacaggtataaagtacttagaaaagcaaagggtgctacgtacatgtgaggcatcattacgcagacgtaactgggatatgtttactataaggaaaagacactgaggtctagaaatagctccgtggagcagaatcagtattgggagccggtggcggtgtgaagcaccagtgtctggcacacagtaggtgctcattggctcccttccacctgtcattcccaccaccctgaggccccaaccgccacacacacaggagcatttggagagaaggccatgtcttcaaagtctgatttgtgatgaggcagaggaagatatttctaatcggtcttgcccagaggatcacagtgctgagaccccccaccaccagccggtacctgggaagggggagagtgcaggcctgctcagggactgttcctgtctcagcaaccaagggattgttcctgtcaatcaatggtttattggaaggtggcccagtatgagccctagaagagtgtgaaaaggaatggcaatggtgttcaccatcggcagtgccagggcagcactcattcacttgataaatgaatatttattagctggttggagagctagaacctggagagctagaacctggagaactagaacctggagggctagaactggagaggctagaaccaagaagggctagaacctggaggggctagaacctagagaagctaaaacctgagctagaagctggaggactagaacctggagggctggaatctggagagctagaacctggagggctagaacctggagggctagaatctggagagctagaacctggagggctagaatctggagagctagaacctggagggctagaacctggagagctagaacctagaagggctagaacctggagggctggaatctggagagctagaacctggagggctagaacctggagggctagaacctagaagggctagaacctggagggctggaatctggagagctagaacctggagggctagaacctggagggctagaacctagaagggctagaacctggagggctagaacctggcaggttagaacctagaagggctagaacctggagagccagaacctggagggctagaacctggaagggctagaacctgtagagctagaacatggagagctagaacccggcaggctagaacctggcaagctagaacctggagggaatgaacctggagggctagaacctggagaatgagaaaaatttacatggcaaagagcccataaatcctgaccaatccaactctgaattttaaagcaaaagcgtcaaaaaaaagattccctccttacccccaacccactcttttttcccaccacccactctcctctgcctcagtaagtatctggaggaagaaaacaggtgaaagaagaagtaaaaaccatttagtattagtattagaatgaagtcaaactgtgccacacatggtgaatgaaaaaaaaaaaaagaggctgtgttttgtcacacagggcagtcattcagcaccagagcacgtgatggtctgagactctcttaggagcagagctctgccgcaatggccatgtggggatccacacctggtctgaggggcaactgagtctgcgggagaagagcggccctatgcatggtgtagatgccctgataaagaacatctgtcctgtgaaagactcaatgagctgttatgttgtaaacaggaagcatttcacatccaaacgagaaaatcatgtaaacatgtgtcttttctgtagagcataataaatggatgaggtttttgcatagctctagcatttgttacaactcccgaaacccccgagtttggtccctggggtaccgccttgcacactcagaagcctttgggaaggggtgctattcatttctgctcaatctgttaacaggcttctggcatgtagatcagtggtctccaagcttttgtgattgtat

SEQ ID NO: 13797 - DNA, 1600 bp, Artificial Sequence
  derived and/or modified sequence
actccagctctggcttctgggctccgaggaggggtggggacggtggggacggtggggacatcaggctgccccgcagtaccagggagcgactgaagtgcccatgccgcttgctccggagaaggtgtggcctcactcacatcccactctgagtccaaatgttctctccctggaagatatcaatgtttctgtctgttcgtgaggactccgtgcccaccacggcctctttcaggtgaggtcattgtggttcaaggacgttaagtaacttccccagcgtcacacggcttataagtaaggcagccaggatgtgaacccagtaggactatctggctgcaaagtccccaccctccctcgccatctgtatcctccaatcatcttcagtgctttgctgatagaagcgccgacatgctcaatgtcaccttgcaagggcccactcttaacgggacctttgcccagagcaaatgcccccaagtggagtggctgggctggctcaacaccatccagccccccttcctctgggtgctgttcgtgctggccaccctagagaacatctttgtcctcagcgtcttctgcctgcacaagagcagctgcacggtggcagagatctacctggggaacctggccgcagcagacctgatcctggcctgcgggctgcccttctgggccatcaccatctccaacaacttcgactggctctttggggagacgctctgccgcgtggtgaatgccattatctccatgaacctgtacagcagcatctgtttcctgatgctggtgagcatcgaccgctacctggccctggtgaaaaccatgtccatgggccggatgcgcggcgtgcgctgggccaagctctacagcttggtgatctgggggtgtacgctgctcctgagctcacccatgctggtgttccggaccatgaaggagtacagcgatgagggccacaacgtcaccgcttgtgtcatcagctacccatccctcatctgggaagtgttcaccaacatgctcctgaatgtcgtgggcttcctgctgcccctgagtgtcatcaccttctgcacgatgcagatcatgcaggtgctgcggaacaacgagatgcagaagttcaaggagatccagacagagaggagggccacggtgctagtcctggttgtgctgctgctattcatcatctgctggctgcccttccagatcagcaccttcctggatacgctgcatcgcctcggcatcctctccagctgccaggacgagcgcatcatcgatgtaatcacacagatcgcctccttcatggcctacagcaacagctgcctcaacccactggtgtacgtgatcgtgggcaagcgcttccgaaagaagtcttgggaggtgtaccagggagtgtgccagaaagggggctgcaggtcagaacccattcagatggagaactccatgggcacactgcggacctccatctccgtggaacgccagattcacaaactgcaggactgggcagggagcagacagtgagcaaacgccagcagggctgctgtgaatttgtgtaaggattgagggacagttgcttttcagcatgggcccaggaatgccaaggagacatctatgcacgaccttg

SEQ ID NO: 13798 - DNA, 6845 bp, Artificial Sequence
  derived and/or modified sequence
agagcggagagcgaaggtggccgcagccttcccggccccacagccagcctggctccagctgggcaggagtgcagagctcagctggaggcggagggggaagtgcccaggaggctgatgacatcactacccagcccttgaaagatgagctgttcccgccgccactccagctctggcttctgggctccgaggaggggtggggacggtggggacggtggggacatcaggctgccccgcagtaccagggagcgactgaagtgcccatgccgcttgctccggagaagcccaggtgtggcctcactcacatcccactctgagtccaaatgttctctccctggaagatatcaatgtttctgtctgttcgtgaggactccgtgcccaccacggcctctttcaggtgctgcctatgatgaagatgagcagatggccatctcagctggggccacagtgcactggacctatagtttccaattccgcactcagcaggcatctttctgatgatccgatggcttctcagagccagggatgggccaggatccatccccttggctactgtcttgctgagaaattaataagcagcatctggtgctatactttggtctctagtgagttagctcatgaaagatgacagactctccaagccaggggtatgcaggaaatgggttttctgtagctacagaaatggggttgagggttggaccaaggggactacccaggggaagtcttaccttcagaggactctggaaaggaggctgcaagttttcatgggtcaagaattcagagcccagtagagacagcttatctctgttccaagatgtctggggccttggttggaagattcaaaggctaggaaaccaggagccaccaaaagcgtaactggggccagaggatccactttcaaggtggcaagttggttccccccatgtggctgcttgagtatcctcacatggcggctcacatccttccaagtaagcaatgcaaaaggccaagaaagatgctgcaaagcatgttatgacctagcctcagaaatcacacaccatccctgccaccattagtaagaagtccagcccacgtccaggagaagaggaagcagattcctccttttgaaatgaagaatatcaagtaattcggggggcatatgaaagccaccacacaccacagggatctttttagagcatacttcttataccatcactgtagttccttaagactcaggggcaaagcctcacttccttagcacccagtgaagaccacgcttactccctcactcaacctcttgctacttcccacctctcctgtccaacatctagtgtcactttccagaacataccaacagcttccccagttctgtgcctctgctcaggctgttccccctgcctggtccacttgtcctccttcttgtcccgtcaaaatgcttcttatccttcaagacccagctctagagtcacctccaaccccttacccaccagccccctctccaagtctgtgtcccacaacccccctgctccctccagggcaccctccaccctctgggccacagttgtcaggagtcaggcagggcaggggccgggtggtgtcttctttgtgttcttgcactcagggcagagctcagcacagagcagacgctcaaaaaacatttaaaggatagaagcattgatttgtgggtcccccagtctggctccaggatgccagccagctgctcctagaagcaaacggacttttcctgggaaatcccagaggtgatgatcagtatctctcccgtgactcgtagttcagctcttcctccatgagcctgactatcagtggaccttccagaaagagccccttttccttctctcacccacagcacagggcactgggaaaatgcccaatgagtcctgccctctgggttgtgctttggacttttcagtgtgtcttcgcatccactcttcagcttgaatgttgcaacagccatgaaaaaagaaatgcaaagcgattcaggatgagagcaataccctactccaaagaaggcaaaatagaagctcagagaggtcaagcattttgcccaagaccacacagctaggagtggaactcatggctgtccaagccccacgcctctgctgaaggtagagatgaattacagcaacaagtctagaaaggtgcctgccctatggtctgtgagtcttgcctaagaatgaaagaggagccagtgggttaaagatgaggtcaccaacaaacggtggtgttggagtttaccactggttattttaatgggtttgcaagaattgttaattactaatgtttattgagcctagtgcagtgcttggggcattttgcacattgtctctgatccctatcacaaccctgagaggtagtttttttaactcccattttacaggtgaggtcattgtggttcaaggacgttaagtaacttccccagcgtcacacggcttataagtaaggcagccaggatgtgaacccagtaggactatctggctgcaaagtccccaccctccctcgccatctgtatcctccaatcatcttcagtgctttgctgatagaaggtacggaaatacgatgccacagactgtccaggaagacagaaactaggcagatgggctggccatggtctccaagccagactggaatctccaggtctggaatgatatcatttttctcttttaataaattaactcacccaccacacggctttgagaggctcaaaggtgaccaactcccttgggagggccccggttgataaggaaggaatgtgaatcctcccatcacggaagcttcaaggaggtcaagggtccaacacttgagattgttagtgctgttggtggatactggccaaggaaatatcccagtggagcctcgagatgaagaacatgaggcccccgtttagatccaaggatcagagggggctctgtaagacccaggggagtcaggtgcactggagcgcgggctgcagaaaacagcctgagctccacctcggcttctccttgccctggctggttgtccttaacccctgtctccttctggaccagtttttgtccttcccttgtgaccctgaggggtaacagcctcttttccactttctttcagcgccgacatgctcaatgtcaccttgcaagggcccactcttaacgggacctttgcccagagcaaatgcccccaagtggagtggctgggctggctcaacaccatccagccccccttcctctgggtgctgttcgtgctggccaccctagagaacatctttgtcctcagcgtcttctgcctgcacaagagcagctgcacggtggcagagatctacctggggaacctggccgcagcagacctgatcctggcctgcgggctgcccttctgggccatcaccatctccaacaacttcgactggctctttggggagacgctctgccgcgtggtgaatgccattatctccatgaacctgtacagcagcatctgtttcctgatgctggtgagcatcgaccgctacctggccctggtgaaaaccatgtccatgggccggatgcgcggcgtgcgctgggccaagctctacagcttggtgatctgggggtgtacgctgctcctgagctcacccatgctggtgttccggaccatgaaggagtacagcgatgagggccacaacgtcaccgcttgtgtcatcagctacccatccctcatctgggaagtgttcaccaacatgctcctgaatgtcgtgggcttcctgctgcccctgagtgtcatcaccttctgcacgatgcagatcatgcaggtgctgcggaacaacgagatgcagaagttcaaggagatccagacagagaggagggccacggtgctagtcctggttgtgctgctgctattcatcatctgctggctgcccttccagatcagcaccttcctggatacgctgcatcgcctcggcatcctctccagctgccaggacgagcgcatcatcgatgtaatcacacagatcgcctccttcatggcctacagcaacagctgcctcaacccactggtgtacgtgatcgtgggcaagcgcttccgaaagaagtcttgggaggtgtaccagggagtgtgccagaaagggggctgcaggtcagaacccattcagatggagaactccatgggcacactgcggacctccatctccgtggaacgccagattcacaaactgcaggactgggcagggagcagacagtgagcaaacgccagcagggctgctgtgaatttgtgtaaggattgagggacagttgcttttcagcatgggcccaggaatgccaaggagacatctatgcacgaccttgggaaatgagttgatgtctccggtaaaacaccggagactaattcctgccctgcccaattttgcagggagcatggctgtgaggatggggtgaactcacgcacagccaaggactccaaaatcacaacagcattactgttcttatttgctgccacacctgagccagcctgctccttcccaggagtggaggaggcctgggggcagggagaggagtgactgagcttccctcccgtgtgttctccgtccctgccccagcaagacaacttagatctccaggagaactgccatccagctttggtgcaatggctgagtgcacaagtgagttgttgccctgggtttctttaatctattcagctagaactttgaaggacaatttcttgcattaataaaggttaagccctgaggggtccctgataacaacctggagaccaggattttatggctcccctcactgatggacaaggaggtctgtgccaaagaagaatccaataagcacatattgagcacttgctgtatatgcagtattgagcactgtaggcaagagggaagaaagagaaggagccatctccatcttgaaggaactcaaagactcaagtgggaacgactgggcactgccaccaccagaaagctgttcgacgagacggtcgagcagggtgctgtgggtgatatggacagcagaagggggagaccaaggttccagctcaaccaataactattgcacaaccatctgtccctgcctcagttccctcttctgtaacatgaagtcgttgtgagggttaaaggcagtaacaggtataaagtacttagaaaagcaaagggtgctacgtacatgtgaggcatcattacgcagacgtaactgggatatgtttactataaggaaaagacactgaggtctagaaatagctccgtggagcagaatcagtattgggagccggtggcggtgtgaagcaccagtgtctggcacacagtaggtgctcattggctcccttccacctgtcattcccaccaccctgaggccccaaccgccacacacacaggagcatttggagagaaggccatgtcttcaaagtctgatttgtgatgaggcagaggaagatatttctaatcggtcttgcccagaggatcacagtgctgagaccccccaccaccagccggtacctgggaagggggagagtgcaggcctgctcagggactgttcctgtctcagcaaccaagggattgttcctgtcaatcaatggtttattggaaggtggcccagtatgagccctagaagagtgtgaaaaggaatggcaatggtgttcaccatcggcagtgccagggcagcactcattcacttgataaatgaatatttattagctggttggagagctagaacctggagagctagaacctggagaactagaacctggagggctagaactggagaggctagaaccaagaagggctagaacctggaggggctagaacctagagaagctaaaacctgagctagaagctggaggactagaacctggagggctggaatctggagagctagaacctggagggctagaacctggagggctagaatctggagagctagaacctggagggctagaatctggagagctagaacctggagggctagaacctggagagctagaacctagaagggctagaacctggagggctggaatctggagagctagaacctggagggctagaacctggagggctagaacctagaagggctagaacctggagggctggaatctggagagctagaacctggagggctagaacctggagggctagaacctagaagggctagaacctggagggctagaacctggcaggttagaacctagaagggctagaacctggagagccagaacctggagggctagaacctggaagggctagaacctgtagagctagaacatggagagctagaacccggcaggctagaacctggcaagctagaacctggagggaatgaacctggagggctagaacctggagaatgagaaaaatttacatggcaaagagcccataaatcctgaccaatccaactctgaattttaaagcaaaagcgtcaaaaaaaagattccctccttacccccaacccactcttttttcccaccacccactctcctctgcctcagtaagtatctggaggaagaaaacaggtgaaagaagaagtaaaaaccatttagtattagtattagaatgaagtcaaactgtgccacacatggtgaatgaaaaaaaaaaaaagaggctgtgttttgtcacacagggcagtcattcagcaccagagcacgtgatggtctgagactctcttaggagcagagctctgccgcaatggccatgtggggatccacacctggtctgaggggcaactgagtctgcgggagaagagcggccctatgcatggtgtagatgccctgataaagaacatctgtcctgtgaaagactcaatgagctgttatgttgtaaacaggaagcatttcacatccaaacgagaaaatcatgtaaacatgtgtcttttctgtagagcataataaatggatgaggtttttgcata

SEQ ID NO: 13799 - DNA, 4040 bp, Artificial Sequence
  derived and/or modified sequence
gacatcactacccagcccttgaaagatgagctgttcccgccgccactccagctctggcttctgggctccgaggaggggtggggacggtggggacggtggggacatcaggctgccccgcagtaccagggagcgactgaagtgcccatgccgcttgctccggagaagcccaggtgtggcctcactcacatcccactctgagtccaaatgttctctccctggaagatatcaatgtttctgtctgttcgtgaggactccgtgcccaccacggcctctttcagcgccgacatgctcaatgtcaccttgcaagggcccactcttaacgggacctttgcccagagcaaatgcccccaagtggagtggctgggctggctcaacaccatccagccccccttcctctgggtgctgttcgtgctggccaccctagagaacatctttgtcctcagcgtcttctgcctgcacaagagcagctgcacggtggcagagatctacctggggaacctggccgcagcagacctgatcctggcctgcgggctgcccttctgggccatcaccatctccaacaacttcgactggctctttggggagacgctctgccgcgtggtgaatgccattatctccatgaacctgtacagcagcatctgtttcctgatgctggtgagcatcgaccgctacctggccctggtgaaaaccatgtccatgggccggatgcgcggcgtgcgctgggccaagctctacagcttggtgatctgggggtgtacgctgctcctgagctcacccatgctggtgttccggaccatgaaggagtacagcgatgagggccacaacgtcaccgcttgtgtcatcagctacccatccctcatctgggaagtgttcaccaacatgctcctgaatgtcgtgggcttcctgctgcccctgagtgtcatcaccttctgcacgatgcagatcatgcaggtgctgcggaacaacgagatgcagaagttcaaggagatccagacagagaggagggccacggtgctagtcctggttgtgctgctgctattcatcatctgctggctgcccttccagatcagcaccttcctggatacgctgcatcgcctcggcatcctctccagctgccaggacgagcgcatcatcgatgtaatcacacagatcgcctccttcatggcctacagcaacagctgcctcaacccactggtgtacgtgatcgtgggcaagcgcttccgaaagaagtcttgggaggtgtaccagggagtgtgccagaaagggggctgcaggtcagaacccattcagatggagaactccatgggcacactgcggacctccatctccgtggaacgccagattcacaaactgcaggactgggcagggagcagacagtgagcaaacgccagcagggctgctgtgaatttgtgtaaggattgagggacagttgcttttcagcatgggcccaggaatgccaaggagacatctatgcacgaccttgggaaatgagttgatgtctccggtaaaacaccggagactaattcctgccctgcccaattttgcagggagcatggctgtgaggatggggtgaactcacgcacagccaaggactccaaaatcacaacagcattactgttcttatttgctgccacacctgagccagcctgctccttcccaggagtggaggaggcctgggggcagggagaggagtgactgagcttccctcccgtgtgttctccgtccctgccccagcaagacaacttagatctccaggagaactgccatccagctttggtgcaatggctgagtgcacaagtgagttgttgccctgggtttctttaatctattcagctagaactttgaaggacaatttcttgcattaataaaggttaagccctgaggggtccctgataacaacctggagaccaggattttatggctcccctcactgatggacaaggaggtctgtgccaaagaagaatccaataagcacatattgagcacttgctgtatatgcagtattgagcactgtaggcaagagggaagaaagagaaggagccatctccatcttgaaggaactcaaagactcaagtgggaacgactgggcactgccaccaccagaaagctgttcgacgagacggtcgagcagggtgctgtgggtgatatggacagcagaagggggagaccaaggttccagctcaaccaataactattgcacaaccatctgtccctgcctcagttccctcttctgtaacatgaagtcgttgtgagggttaaaggcagtaacaggtataaagtacttagaaaagcaaagggtgctacgtacatgtgaggcatcattacgcagacgtaactgggatatgtttactataaggaaaagacactgaggtctagaaatagctccgtggagcagaatcagtattgggagccggtggcggtgtgaagcaccagtgtctggcacacagtaggtgctcattggctcccttccacctgtcattcccaccaccctgaggccccaaccgccacacacacaggagcatttggagagaaggccatgtcttcaaagtctgatttgtgatgaggcagaggaagatatttctaatcggtcttgcccagaggatcacagtgctgagaccccccaccaccagccggtacctgggaagggggagagtgcaggcctgctcagggactgttcctgtctcagcaaccaagggattgttcctgtcaatcaatggtttattggaaggtggcccagtatgagccctagaagagtgtgaaaaggaatggcaatggtgttcaccatcggcagtgccagggcagcactcattcacttgataaatgaatatttattagctggttggagagctagaacctggagagctagaacctggagaactagaacctggagggctagaactggagaggctagaaccaagaagggctagaacctggaggggctagaacctagagaagctaaaacctgagctagaagctggaggactagaacctggagggctggaatctggagagctagaacctggagggctagaacctggagggctagaatctggagagctagaacctggagggctagaatctggagagctagaacctggagggctagaacctggagagctagaacctagaagggctagaacctggagggctggaatctggagagctagaacctggagggctagaacctggagggctagaacctagaagggctagaacctggagggctggaatctggagagctagaacctggagggctagaacctggagggctagaacctagaagggctagaacctggagggctagaacctggcaggttagaacctagaagggctagaacctggagagccagaacctggagggctagaacctggaagggctagaacctgtagagctagaacatggagagctagaacccggcaggctagaacctggcaagctagaacctggagggaatgaacctggagggctagaacctggagaatgagaaaaatttacatggcaaagagcccataaatcctgaccaatccaactctgaattttaaagcaaaagcgtcaaaaaaaagattccctccttacccccaacccactcttttttcccaccacccactctcctctgcctcagtaagtatctggaggaagaaaacaggtgaaagaagaagtaaaaaccatttagtattagtattagaatgaagtcaaactgtgccacacatggtgaatgaaaaaaaaaaaaagaggctgtgttttgtcacacagggcagtcattcagcaccagagcacgtgatggtctgagactctcttaggagcagagctctgccgcaatggccatgtggggatccacacctggtctgaggggcaactgagtctgcgggagaagagcggccctatgcatggtgtagatgccctgataaagaacatctgtcctgtgaaagactcaatgagctgttatgttgtaaacaggaagcatttcacatccaaacgagaaaatcatgtaaacatgtgtcttttctgtagagcataataaatggatgaggtttttgca

SEQ ID NO: 13800 - DNA, 1176 bp, Artificial Sequence
  derived and/or modified sequence
atgttcagcccctggaagatcagcatgttcctgagcgtgagagaggacagcgtgcccaccaccgccagcttcagcgccgacatgctgaacgtgaccctgcagggccccaccctgaacggcaccttcgcccagagcaagtgcccccaggtggagtggctgggctggctgaacaccatccagccccccttcctgtgggtgctgttcgtgctggccaccctggagaacatcttcgtgctgagcgtgttctgcctgcacaagagcagctgcaccgtggccgagatctacctgggcaacctggccgccgccgacctgatcctggcctgcggcctgcccttctgggccatcaccatcagcaacaacttcgactggctgttcggcgagaccctgtgcagagtggtgaacgccatcatcagcatgaacctgtacagcagcatctgcttcctgatgctggtgagcatcgacagatacctggccctggtgaagaccatgagcatgggcagaatgagaggcgtgagatgggccaagctgtacagcctggtgatctggggctgcaccctgctgctgagcagccccatgctggtgttcagaaccatgaaggagtacagcgacgagggccacaacgtgaccgcctgcgtgatcagctaccccagcctgatctgggaggtgttcaccaacatgctgctgaacgtggtgggcttcctgctgcccctgagcgtgatcaccttctgcaccatgcagatcatgcaggtgctgagaaacaacgagatgcagaagttcaaggagatccagaccgagagaagagccaccgtgctggtgctggtggtgctgctgctgttcatcatctgctggctgcccttccagatcagcaccttcctggacaccctgcacagactgggcatcctgagcagctgccaggacgagagaatcatcgacgtgatcacccagatcgccagcttcatggcctacagcaacagctgcctgaaccccctggtgtacgtgatcgtgggcaagagattcagaaagaagagctgggaggtgtaccagggcgtgtgccagaagggcggctgcagaagcgagcccatccagatggagaacagcatgggcaccctgagaaccagcatcagcgtggagagacagatccacaagctgcaggactgggccggcagcagacagtag

SEQ ID NO: 13801 - DNA, 1095 bp, Artificial Sequence
  derived and/or modified sequence
atgctgaacgtgaccctgcagggccccaccctgaacggcaccttcgcccagagcaagtgcccccaggtggagtggctgggctggctgaacaccatccagccccccttcctgtgggtgctgttcgtgctggccaccctggagaacatcttcgtgctgagcgtgttctgcctgcacaagagcagctgcaccgtggccgagatctacctgggcaacctggccgccgccgacctgatcctggcctgcggcctgcccttctgggccatcaccatcagcaacaacttcgactggctgttcggcgagaccctgtgcagagtggtgaacgccatcatcagcatgaacctgtacagcagcatctgcttcctgatgctggtgagcatcgacagatacctggccctggtgaagaccatgagcatgggcagaatgagaggcgtgagatgggccaagctgtacagcctggtgatctggggctgcaccctgctgctgagcagccccatgctggtgttcagaaccatgaaggagtacagcgacgagggccacaacgtgaccgcctgcgtgatcagctaccccagcctgatctgggaggtgttcaccaacatgctgctgaacgtggtgggcttcctgctgcccctgagcgtgatcaccttctgcaccatgcagatcatgcaggtgctgagaaacaacgagatgcagaagttcaaggagatccagaccgagagaagagccaccgtgctggtgctggtggtgctgctgctgttcatcatctgctggctgcccttccagatcagcaccttcctggacaccctgcacagactgggcatcctgagcagctgccaggacgagagaatcatcgacgtgatcacccagatcgccagcttcatggcctacagcaacagctgcctgaaccccctggtgtacgtgatcgtgggcaagagattcagaaagaagagctgggaggtgtaccagggcgtgtgccagaagggcggctgcagaagcgagcccatccagatggagaacagcatgggcaccctgagaaccagcatcagcgtggagagacagatccacaagctgcaggactgggccggcagcagacagtag

SEQ ID NO: 13802 - protein, 406 aa, Artificial Sequence
  derived and/or modified sequence
MQLFLLLCLVLLSPQGASLHRHHPREMKKRVEDLHVGATVAPSSRRDFTFDLYRALASAAPSQSIFFSPVSISMSLAMLSLGAGSSTKMQILEGLGLNLQKSSEKELHRGFQQLLQELNQPRDGFQLSLGNALFTDLVVDLQDTFVSAMKTLYLADTFPTNFRDSAGAMKQINDYVAKQTKGKIVDLLKNLDSNAVVIMVNYIFFKAKWETSFNHKGTQEQDFYVTSETVVRVPMMSREDQYHYLLDRNLSCRVVGVPYQGNATALFILPSEGKMQQVENGLSEKTLRKWLKMFKKRQLELYLPKFSIEGSYQLEKVLPSLGISNVFTSHADLSGISNHSNIQVSEMVHKAVVEVDESGTRAAAATGTIFTFRSARLNSQRLVFNRPFLMFIVDNNILFLGKVNRP

SEQ ID NO: 13803 - protein, 330 aa, Artificial Sequence
  derived and/or modified sequence
MQLFLLLCLVLLSPQGASLHRHHPREMKKRVEDLHVGATVAPSSRRDFTFDLLGNALFTDLVVDLQDTFVSAMKTLYLADTFPTNFRDSAGAMKQINDYVAKQTKGKIVDLLKNLDSNAVVIMVNYIFFKAKWETSFNHKGTQEQDFYVTSETVVRVPMMSREDQYHYLLDRNLSCRVVGVPYQGNATALFILPSEGKMQQVENGLSEKTLRKWLKMFKKRQLELYLPKFSIEGSYQLEKVLPSLGISNVFTSHADLSGISNHSNIQVSEMVHKAVVEVDESGTRAAAATGTIFTFRSARLNSQRLVFNRPFLMFIVDNNILFLGKVNRP

SEQ ID NO: 13804 - protein, 258 aa, Artificial Sequence [sequence omitted]

SEQ ID NO: 13805 - protein, 90 aa, Artificial Sequence
  derived and/or modified sequence
MQLFLLLCLVLLSPQGASLHRHHPREMKKRVEDLHVGATVAPSSRRDFTFDLYRALASAAPSQSIFFSPVSISMSLAMLSLGAGSSTKMQ

SEQ ID NO: 13806 - protein, 172 aa, Artificial Sequence
  derived and/or modified sequence
MQLFLLLCLVLLSPQGASLHRHHPREMKKRVEDLHVGATVAPSSRRDFTFDLYRALASAAPSQSIFFSPVSISMSLAMLSLGAGSSTKMQILEGLGLNLQKSSEKELHRGFQQLLQELNQPRDGFQLSLGNALFTDLVVDLQDTFVSAMKTLYLADTFPTNFRDSAGAMKQI

SEQ ID NO: 13807 - protein, 86 aa, Artificial Sequence
  derived and/or modified sequence
MQLFLLLCLVLLSPQGASLHRHHPREMKKRVEDLHVGATVAPSSRRDFTFDLYRALASAAPSQSIFFSPVSISMSLAMLSLGAGSS

SEQ ID NO: 13808 - protein, 301 aa, Artificial Sequence
  derived and/or modified sequence
MQLFLLLCLVLLSPQGASLHRHHPREMKKRVEDLHVGATVAPSSRRDFTFDLYRALASAAPSQSIFFSPVSISMSLAMLSLGAGSSTKMQILEGLGLNLQKSSEKELHRGFQQLLQELNQPRDGFQLSLGNALFTDLVVDLQDTFVSAMKTLYLADTFPTNFRDSAGAMKQINDYVAKQTKGKIVDLLKNLDSNAVVIMVNYIFFKAKWETSFNHKGTQEQDFYVTSETVVRVPMMSREDQYHYLLDRNLSCRVVGVPYQGNATALFILPSEGKMQQVENGLSEKTLRKWLKMFKKRYFQT

SEQ ID NO: 13809 - protein, 144 aa, Artificial Sequence
  derived and/or modified sequence
MQLFLLLCLVLLSPQGASLHRHHPREMKKRVEDLHVGATVAPSSRRDFTFDLYRALASAAPSQSIFFSPVSISMSLAMLSLGAGSSTKMQILEGLGLNLQKSSEKELHRGFQQLLQELNQPRDGFQLSLGNALFTDLVVDLQDT

SEQ ID NO: 13810 - protein, 24 aa, Artificial Sequence
  derived and/or modified sequence
MQLFLLLCLVLLSPQGASLHRHHP

SEQ ID NO: 13811 - protein, 231 aa, Artificial Sequence
  derived and/or modified sequence
MQLFLLLCLVLLSPQGASLHRHHPREMKKRVEDLHVGATVAPSSRRDFTFDLYRALASAAPSQSIFFSPVSISMSLAMLSLGAGSSTKMQILEGLGLNLQKSSEKELHRGFQQLLQELNQPRDGFQLSLGNALFTDLVVDLQDTFVSAMKTLYLADTFPTNFRDSAGAMKQINDYVAKQTKGKIVDLLKNLDSNAVVIMVNYIFFKAKWETSFNHKGTQEQDFYVTSETVV

SEQ ID NO: 13812 - protein, 157 aa, Artificial Sequence
  derived and/or modified sequence
MQLFLLLCLVLLSPQGASLHRHHPREMKKRVEDLHVGATVAPSSRRDFTFDLYRALASAAPSQSIFFSPVSISMSLAMLSLGAGSSTKMQILEGLGLNLQKSSEKELHRGFQQLLQELNQPRDGFQLSLGNALFTDLVVDLQDTFVSAMKTLYLADT

SEQ ID NO: 13813 - DNA, 273 bp, Artificial Sequence
  derived and/or modified sequence
atgcagctgttcctgctgctgtgcctggtgctgctgagcccccagggcgcaagtctacaccgccaccatcctcgcgaaatgaagaaacgggtggaagatcttcacgtgggggcaaccgtggccccgtctagtcggagagattttactttcgatctctatagagctctcgccagcgctgctccctctcagtccattttcttttctcccgtgtcaataagcatgagcctcgcaatgctctccctaggggctgggtcaagcaccaagatgcagtag

SEQ ID NO: 13814 - DNA, 1221 bp, Artificial Sequence
  derived and/or modified sequence
atgcagctgttcctgctgctgtgcctggtgctgctgagcccccagggagcctccctgcaccgacaccacccccgggagatgaaaaaacgggtcgaagatttacacgttggggcaaccgtggcaccttccagtcgtcgggatttcaccttcgatctgtatcgggccctcgccagcgccgctcccagccagtccatcttcttttcgccggtctccatatccatgagcctggccatgttatcactcggagcggggtcctcaacaaaaatgcagattttagaaggattgggcctgaatttgcagaagtctagtgagaaggaacttcaccgtgggtttcagcagctgctgcaagagctcaatcaaccacgggacgggttccagctctcactggggaacgccctgtttactgaccttgtcgtcgacctgcaggacacatttgtgagtgctatgaaaaccctgtacctggccgatacattcccaacaaatttccgggattcagccggggctatgaagcagatcaatgattacgtcgccaagcagactaaaggaaagattgtcgatctgttaaaaaatttggactctaacgccgtggttattatggtgaactacattttcttcaaagccaaatgggagaccagctttaaccacaagggcacccaggaacaggacttctacgtcacgtccgaaaccgtggtgagggtgccaatgatgagtagagaagatcagtaccattatctcctggacagaaatctctcgtgccgggtggtgggcgttccctaccagggtaacgcgactgcactgttcatcctgccctccgaagggaaaatgcagcaggtcgagaacggtttgagtgaaaagacactaagaaagtggctgaagatgttcaaaaagagacagctggaactgtacctgcctaagttctctatcgaggggagttaccagctggaaaaagtgctgccaagcttgggcattagtaatgtgtttacatctcacgcagacctttccgggatctccaatcatagcaacattcaagtgagcgaaatggtgcataaggcagtggtagaggtggacgagagtggcacccgtgcagcagccgccaccggtactatatttacttttcgcagcgcccggctcaactctcagcgcctcgtgttcaatagacctttcctgatgttcattgttgacaataacattttgttcctcggcaaggtcaataggccatag

SEQ ID NO: 13815 - DNA, 519 bp, Artificial Sequence
  derived and/or modified sequence
atgcagctgttcctgctgctgtgcctggtgctgctgagcccccagggtgcctcactccacaggcatcacccccgcgagatgaagaagagggtggaggacttacacgtaggggccactgtggccccaagctccagacgggactttacattcgacctttaccgcgctctggcgtccgccgccccatctcagtcgatcttcttctcacccgtcagcatttcaatgtcactagcgatgctgtcactcggagccgggtctagcaccaaaatgcagatcctggaaggcctcgggctaaacctgcaaaagagctccgagaaagagctgcacagaggtttccagcagctgttgcaggagctgaaccagccgcgggacggtttccagctttccctcgggaatgcattgtttaccgatcttgtggtcgacctgcaagataccttcgtatcagccatgaaaaccttgtatctcgctgacaccttccccacgaatttccgcgacagtgcgggggccatgaaacagatttag

SEQ ID NO: 13816 - DNA, 1221 bp, Artificial Sequence
  derived and/or modified sequence
atgcagctgttcctgctgctgtgcctggtgctgctgagcccccagggcgcatctctgcacagacaccacccgcgggagatgaaaaagagggtggaagatctacacgtaggcgccactgtagctccgtcgagccgacgggacttcaccttcgacctgtaccgcgctctcgcctctgcagcgccttcccagagcattttcttcagtccagtaagcataagtatgtcgcttgctatgctgagcctcggggctggatcaagtacaaaaatgcagatcctcgagggtcttggcctgaacctccagaagtcttccgagaaagaacttcatcgcggcttccagcaactactgcaggaactgaatcagcccagagacggcttccagctgagcctgggcaatgcgctgttcaccgatctcgtggtcgacctacaagacaccttcgtgagcgccatgaaaacgttatatcttgcagacacattccccactaatttcagagactccgctggagccatgaagcagattaacgactatgtagccaagcagacgaagggcaagatcgttgatctgctgaagaatctggattccaatgccgttgttatcatggtgaactatatcttcttcaaagccaaatgggagacttcattcaaccacaaaggcactcaggaacaagacttctacgtaacttcagagaccgtggtccgcgttcccatgatgagcagggaggaccaataccactatttactcgacaggaacctgagctgccgtgtggtaggtgtcccctatcaagggaacgcaaccgccctgttcatattgccctcagaggggaagatgcagcaagtggaaaacggactgagtgagaagacgctccggaagtggctgaaaatgtttaaaaaacggcagcttgaactgtaccttccaaagttcagcattgaggggtcttaccaactggagaaggttctgccttcactgggcatcagtaatgttttcacgagccatgcggatttaagtggcatcagcaatcacagcaacatccaggtctcagaaatggtgcataaagccgtggtggaggtagacgagagtgggactcgcgccgcggcagccactggtacaatatttaccttcagaagcgcccgcttgaattcgcagaggctggtctttaatagacctttcctgatgttcatcgtcgacaataatatcctgttcttgggcaaagtgaaccgtccttag

SEQ ID NO: 13817 - DNA, 261 bp, Artificial Sequence
  derived and/or modified sequence
atgcagctgttcctgctgctgtgcctggtgctgctgagcccccagggtgcaagcttacatcgccaccatccaagagaaatgaagaagcgagtcgaagatctgcatgttggggctacagtcgcccctagttctaggagagacttcacttttgacctttacagggctcttgcaagcgcagcaccatctcagtctattttcttttctccagtaagcatctctatgtccctggccatgctgtctttgggcgctggctcctcctag

SEQ ID NO: 13818 - DNA, 906 bp, Artificial Sequence
  derived and/or modified sequence
atgcagctgttcctgctgctgtgcctggtgctgctgagcccccagggcgcaagcctgcatcgccaccatccgcgggaaatgaagaaaagggtggaagatctgcacgttggcgctacagtggctccaagtagtcggcgcgactttacgttcgatttatatagggcactggcttccgcggcacctagtcaatccattttctttagtcctgtctcaatttccatgtctctcgccatgctgtctttaggtgctggctcttcaactaaaatgcagattttggaagggctggggctgaaccttcagaagtccagcgagaaggagttgcatcggggctttcagcagctgctccaagagctgaaccaacctcgagatggcttccagctgtcactagggaatgccttgtttacagatctagtcgtggatctacaggataccttcgtctccgcaatgaagacactgtacttagctgatacattccccactaatttccgggattcagcaggtgccatgaagcagattaatgactacgtggctaagcagactaaaggtaagatcgttgacctcttgaagaacctggactcaaacgcagtggtgattatggtgaactatatattttttaaggctaaatgggagacaagctttaaccataagggtacgcaggaacaggacttctatgtgaccagcgagaccgttgtacgggttccaatgatgagtcgggaggatcaatatcactacctcctggatcgaaacctgtcctgtagggtagtgggagtgccgtatcagggaaacgcaacagcactgttcatcctgccctccgaaggcaagatgcagcaagttgagaacgggctcagtgaaaaaactctgaggaaatggctcaaaatgtttaagaagcggtactttcagacctag

SEQ ID NO: 13819 - DNA, 1221 bp, Artificial Sequence
  derived and/or modified sequence
atgcagctgttcctgctgctgtgcctggtgctgctgagcccccagggcgcatccctgcatcggcaccaccctagagagatgaaaaagcgggtagaggatcttcacgtgggagcgaccgtggctccatctagtagacgcgatttcactttcgacctctacagagcgctcgcctctgctgcaccttctcagagcatctttttttcacctgtctcaatctcaatgagcctggccatgctatcattgggtgctggaagctccactaaaatgcagatcctggaaggcctgggactgaaccttcaaaaatcatctgagaaggaattacaccggggtttccagcagctcttgcaggaactcaaccagccacgcgatgggtttcaactgtccttaggaaacgcactgttcacagacctcgtggtggatctccaggatacttttgtgtcggccatgaagaccctatacctcgctgacacattccctactaatttccgggatagcgcaggagctatgaagcagatcaacgactatgttgccaaacagacaaaaggaaagattgtagatctgttaaagaacttggactctaatgccgtcgtgatcatggtcaactacatcttcttcaaggccaaatgggagacctcatttaaccacaagggcacccaggagcaggacttttatgtaaccagcgaaacggttgtgcgagtgccaatgatgagcagggaagaccagtatcattacctgttggaccgaaatctgagttgccgcgtagtaggggttccttatcagggtaatgccacagctctgttcatcctacccagcgaaggcaagatgcagcaggtcgagaacgggctctcagaaaaaacgttaaggaagtggctgaaaatgttcaaaaagcgacagctggagctctatcttccgaagtttagtatagaaggctcctatcagttagagaaagtgctcccgtcactgggaattagtaatgtgtttacatctcatgcggatctcagtggcatttccaaccacagcaatattcaggtctccgaaatggtgcacaaagccgtggtggaagtggatgaatcagggacccgggcggccgccgccacagggaccatcttcacgttcagatcagcacgtctcaattctcaacgcctcgtgtttaaccggccgttcctcatgtttatagtggacaataatatactctttctggggaaggttaatcgtccttag

SEQ ID NO: 13820 - DNA, 435 bp, Artificial Sequence
  derived and/or modified sequence
atgcagctgttcctgctgctgtgcctggtgctgctgagcccccagggagcttcactgcatcggcaccacccccgcgaaatgaaaaagcgcgtggaggacctgcatgtgggtgctacagttgcccctagttctcgtagagattttacatttgatttgtaccgtgccctcgcaagcgcagcaccgtctcaaagcatctttttcagcccggtaagcatcagcatgagcttagcgatgctttctcttggagctggttcttccaccaagatgcaaatcctcgaaggactcgggctgaaccttcagaaatcctctgaaaaggaactccatagaggctttcagcagctgttacaggagctgaaccagcccagggatggattccagctgtcgctggggaacgccctcttcaccgacctggtcgtggatctgcaggacacttag

SEQ ID NO: 13821 - DNA, 75 bp, Artificial Sequence
  derived and/or modified sequence
atgcagctgttcctgctgctgtgcctggtgctgctgagcccccagggagcttccttgcaccggcaccatccctag

SEQ ID NO: 13822 - DNA, 696 bp, Artificial Sequence
  derived and/or modified sequence
atgcagctgttcctgctgctgtgcctggtgctgctgagcccccagggggcctcactgcatcgccaccatccccgagagatgaagaagagggtggaggacctgcacgttggcgctacagtcgctccttcttcaagacgggacttcaccttcgatctgtaccgcgccctcgcatctgctgctccatcccagtctatcttcttcagccctgtgtcgatttcgatgagcttagcaatgctctctctgggagccggatcctccacaaaaatgcagattctggaggggctagggctaaatttgcaaaaaagcagcgagaaagagctgcacagaggattccagcagttgttgcaggagctcaaccagccaagggacggctttcagctgtctctaggtaacgccttgttcactgatctggtagttgacctgcaggacactttcgtttccgctatgaaaaccctttatctggccgatacatttcctaccaacttccgcgattctgccggcgctatgaagcagataaatgactatgtcgccaaacagactaaaggcaagattgttgacctacttaaaaacctcgacagtaacgcagtggtgataatggtgaattatatttttttcaaggccaaatgggaaacttcattcaaccacaaaggaacgcaggaacaagacttttacgttacaagcgagactgtggtctag

SEQ ID NO: 13823 - DNA, 474 bp, Artificial Sequence
  derived and/or modified sequence
atgcagctgttcctgctgctgtgcctggtgctgctgagcccccagggtgcaagcttgcacagacaccatcctagagaaatgaagaaaagagtggaagatctgcatgtcggggccacagtggcgccgagttctagacgagatttcacttttgacttgtaccgagctctagcttctgccgccccaagccagagcatcttcttttcccccgttagtataagtatgagcctagccatgctgtctctcggcgcgggaagtagcactaagatgcagattttggagggcttaggtttaaatctgcagaaatcctctgaaaaggaactgcatcgggggttccagcagctcctgcaagaattgaaccagccccgggatgggttccagctgtctctgggaaacgctctctttaccgacctggtcgttgatctgcaggatacatttgtcagcgccatgaagacattatatctggccgacacctag

SEQ ID NO: 13824 - DNA, 1221 bp, Artificial Sequence
  derived and/or modified sequence
atgcagctctttctccttctgtgcctcgtcttactctccccccaaggcgcttctctccatcggcaccaccccagagaaatgaaaaagagggtggaggatctgcatgtgggcgctactgtagcgccttcctcgaggcgagattttacctttgacttatacagagcacttgcatctgcggcacccagccagagtatcttcttcagcccagtgtcaatctcaatgagtttggctatgctcagcctgggagccggttcaagtaccaagatgcagattctggaagggttgggccttaacctgcagaagagtagtgaaaaggaacttcatcggggtttccagcagctgttacaagagctcaaccagcccagggacggctttcagttgtccctggggaacgccctctttacggatttggttgtggatctccaggataccttcgtctcggccatgaaaactctctatctggcagatacattccctaccaacttccgggattctgctggagcaatgaagcagataaatgattatgtggccaagcagaccaaaggcaagatcgtagatctccttaagaatctggacagtaatgccgtagtgatcatggtgaactacattttctttaaagccaagtgggaaacgtcttttaaccataagggcactcaagagcaggatttttacgttacatctgaaaccgtcgtccgggtccctatgatgtctcgcgaagaccagtaccactatctgctcgacaggaacctgagctgcagagtcgtcggggtgccttaccaaggtaacgccaccgctctctttatcctgccaagtgaggggaagatgcaacaggttgaaaacggtctgagtgaaaagactcttcggaaatggcttaaaatgtttaagaagcgtcaactggagttatacctgccaaagtttagtattgagggttcttatcagctcgagaaagtactgcccagcctgggaatatccaacgtgttcacttcccatgcagacctgtcaggaatatccaatcacagcaacatccaggtctctgaaatggtccacaaggcagtagtggaagtggatgagagcggaacccgcgcagccgctgccacaggtacgattttcacgtttcgatccgcgaggctgaacagccagcgactcgtgtttaacaggcctttcctgatgtttattgtggataacaatattctgttcctggggaaagttaacaggccctag

SEQ ID NO: 13825 - DNA, 993 bp, Artificial Sequence
  derived and/or modified sequence
atgcagctgttcctcctgttgtgcctagtgctcctctcgccgcagggagcctcactgcacaggcaccatcctcgggagatgaagaagagggtggaggatctccacgtcggcgctacagtggctcctagctcgagaagggacttcactttcgacctgctcggaaatgctctattcacagacctggtcgtggacttacaggatactttcgtgagcgccatgaagacactctatcttgccgatacttttccaaccaactttagggactccgccggagctatgaagcagatcaacgattacgtggcaaaacagaccaaaggaaagatcgtggatctcctgaagaatttagactctaatgctgtcgtcatcatggtgaactacatcttctttaaagccaagtgggagacaagttttaaccacaagggcactcaggagcaagatttttatgtgactagcgagaccgtcgttcgggtccccatgatgtcacgcgaggatcagtatcactacctcctggacaggaatctttcatgtagagtagtgggagttccttatcagggaaatgccaccgccctgtttatcctcccaagcgagggaaagatgcagcaggtcgagaatggactgagcgaaaagacgctgcgcaaatggctgaaaatgtttaagaaacgacagcttgagctgtacctgccaaagttttctatcgagggtagctatcagttggaaaaagtcttgcccagtttgggaatttcgaacgtctttacatcacatgcggatctatctggcatatccaaccactccaatatccaggtcagcgagatggtccataaagcagtggtggaggttgacgaatccggaactcgtgccgcagccgctaccggtaccatctttacctttaggtctgctagacttaattcccaaagactcgtgtttaacaggccattcctaatgtttatcgtcgataacaatattctgttcctgggaaaagttaatcgcccttag

SEQ ID NO: 13826 - DNA, 777 bp, Artificial Sequence
  derived and/or modified sequence
atgaagactctctacttggctgacacctttcccaccaacttcagggatagcgccggtgcaatgaaacaaatcaatgactacgtcgccaagcaaaccaagggcaagatcgtggatctactgaaaaatctcgactcaaacgcagttgtcataatggttaattacatcttctttaaggctaagtgggaaacctccttcaaccacaagggcacgcaggagcaggacttttacgtcacctctgaaaccgttgtgagagtgcctatgatgtctagggaggaccaataccactacctgctcgatcggaacctgtcatgccgagtcgttggggtgccgtatcaggggaacgcaacggccctgttcatcctcccgtcggaaggcaaaatgcaacaagtcgagaacgggctgtccgagaaaaccctgcggaaatggctgaaaatgttcaagaaacgacaactggagctgtaccttccaaagtttagcattgaagggagctaccagctggagaaggtgttaccttcactgggaatttccaatgtgttcactagccacgcagacttatctggcatctcgaaccactccaatatacaagtttccgagatggtgcataaggcggtggtcgaagtggatgagtccggtaccagggccgcagccgctacgggaacaattttcaccttcagaagcgcgagactaaattcacagcgcctggtatttaaccggccatttttgatgttcatcgtggacaacaatatcctctttctggggaaggtgaatcggccatag

SEQ ID NO: 13827 - DNA, 273 bp, Artificial Sequence
  derived and/or modified sequence
atgcagctgttcttgcttctctgtcttgtattgctgagtccccagggagcatccctgcataggcaccatccccgagagatgaaaaaacgcgtcgaagacctccatgtgggcgcaaccgtggccccaagctctcggagggatttcaccttcgacctgtatcgggcacttgctagcgcagctccgtcacagtccatctttttttcgcccgtgtctatttccatgtctctcgcaatgctcagcttgggtgctggctcttcgacaaaaatgcagtag

SEQ ID NO: 13828 - DNA, 1221 bp, Artificial Sequence
  derived and/or modified sequence
atgcagctattcctcctgttgtgcctggtgctgctgagcccgcaaggagcatcactgcaccgtcaccacccacgggaaatgaaaaagcgagtggaggaccttcacgtcggagcaaccgtggccccatcatcgagacgggacttcaccttcgatctgtacagggcccttgcctccgccgcaccttcacagagtatttttttttccccagtgtcaatttcaatgagcttggccatgctcagcttgggcgcaggaagctccaccaaaatgcagatcctggagggtctcggccttaatttgcagaagtcctccgagaaagaactgcatcgcggttttcaacagctgttacaggaactgaaccagcctagagacggttttcagctcagtctgggcaatgccctgttcacagatttggtggtagatttgcaggatactttcgtgtccgctatgaagactctgtatctggccgacactttccccaccaactttcgtgactccgccggagccatgaagcagataaacgattatgtggctaagcagactaaaggtaagattgtggacttactgaaaaaccttgattcaaacgcggtggtaatcatggtgaactacatctttttcaaggctaaatgggagacctcttttaatcacaaaggtacccaagagcaagatttctacgttacgagtgagactgttgttagggtgcctatgatgagtagggaagatcagtatcattaccttctggataggaatctctcctgtcgggtggtgggagttccttatcaggggaacgctaccgctttgtttatcctcccttctgaggggaaaatgcagcaggtggaaaatggtttatccgagaaaacgctgaggaagtggcttaaaatgttcaagaagagacagttggaactgtatttgccaaagttctctattgagggttcataccagctcgagaaagtgcttccatctctcggcatctcaaacgtgttcacaagtcacgcagatctctctggcatctccaaccattctaacatccaggtcagcgagatggtccacaaagccgtagtggaagtggacgaaagcggaacccgggctgccgctgctactggaaccatttttacctttcgctctgccaggttgaactcgcagcggcttgtgttcaacagaccatttcttatgttcatagtagacaataatatactttttttgggcaaggtgaatcggccatag

SEQ ID NO: 13829 - DNA, 519 bp, Artificial Sequence
  derived and/or modified sequence
atgcagctttttttactactctgtttagtgctccttagtccccagggggcttcgctgcatagacaccaccccagagaaatgaagaagcgagtggaagatttacatgtgggagctacggtagcacccagcagtcggagagatttcaccttcgatctgtatagagctctggcgtccgctgctcctagccagagcatatttttctcccccgtgtcgatctcaatgtccctggctatgctgagtctgggtgccggatcttctaccaaaatgcagatcctcgaggggctgggactgaatctccaaaagtcgtccgagaaggaactgcaccgcggatttcaacagttattgcaagaactgaaccagccaagagacggttttcagctgagcctgggtaatgccctcttcactgatctagtggtcgacctgcaggacacatttgtgtcggccatgaaaactctctatctggccgatacttttccaacaaacttccgggattctgcgggagctatgaaacagatatag

SEQ ID NO: 13830 - DNA, 1221 bp, Artificial Sequence
  derived and/or modified sequence
atgcagctgtttctgctgctctgcttggttctactgagcccacagggagctagtctccacagacaccacccgagagagatgaagaaacgggttgaagatcttcatgtgggggcaaccgtggccccttcctcgcgtcgcgactttacatttgatctctatcgagccctagccagcgccgcacccagccagtctattttctttagtccggtctctatcagcatgtccttagcaatgctgagtttaggagccggaagcagcactaagatgcagatcttggaaggcttggggctgaatctccagaagagctctgaaaaagaactgcatcggggattccaacaactgctgcaagagctcaaccagccccgtgatggcttccagctcagcctgggcaacgcactgttcaccgatctggtagtggacctgcaggacacgttcgtctctgccatgaagacactgtacttagctgatacattccctacaaatttcagggactccgcaggggcaatgaaacaaattaatgactacgtggccaaacaaaccaaaggaaagatcgttgaccttctgaaaaacctagactctaacgccgttgtaatcatggtaaactatatctttttcaaggccaagtgggaaacctccttcaaccacaaagggacacaggagcaggatttttatgtgacttctgagaccgtagtgagggtgccaatgatgagcagagaggatcaatatcactatctgctggatcgtaacttgtcgtgtcgggttgtgggagtgccctatcagggtaatgcaactgccttgtttatcctgcccagcgagggcaagatgcagcaagtcgagaatgggctgagtgagaaaacactgcgaaagtggttgaaaatgttcaagaagcgacaattggaactttacctacctaaattttctattgaaggctcatatcagctagagaaagtcttaccgagtctgggaatcagtaatgtgtttacctctcacgctgacctgtctggtatatctaatcactcgaatatccaggtgtccgaaatggttcacaaggcagtcgtggaagtcgatgaaagtggaactcgagctgccgcagccacgggcaccatattcaccttcagatccgcaagactgaattcacagcgccttgtcttcaacaggcccttcctgatgtttattgttgacaacaacatcctgtttctgggaaaggtcaatcggccttag

SEQ ID NO: 13831 - DNA, 261 bp, Artificial Sequence
  derived and/or modified sequence
atgcagttatttctcctcctttgtctcgtcctcctctcaccccagggtgcctcactgcatcgacatcatcctcgcgaaatgaaaaagcgcgtggaagacttgcacgtcggggctaccgttgccccttcgagccgccgtgatttcacatttgacttgtaccgcgctctggcttccgccgcaccaagccaatctattttcttttccccagtctctataagcatgtccctagccatgttgagccttggggcaggctcttcctag

SEQ ID NO: 13832 - DNA, 906 bp, Artificial Sequence
  derived and/or modified sequence
atgcaactttttttactactgtgcttggtgcttctgagccctcagggggcatcactccatcgtcatcatcccagagagatgaaaaagagggtggaagatctgcatgtgggagcgacagtcgccccttccagcagaagggatttcacatttgacctttacagagccctcgcaagcgcagccccaagccaaagtatcttcttttcccctgttagtattagcatgagcctggctatgctgagcctgggggctgggtcttcaacaaaaatgcagattctcgaggggctgggcctgaacttgcagaaaagctccgagaaggagctccaccgcggtttccagcagctgctacaagagctgaatcagccacgggatgggtttcaactgtccctggggaacgctctgttcaccgatctggtggtggatctacaggacacattcgtcagcgcaatgaagacactgtaccttgccgacacatttcccaccaactttagagattccgccggtgccatgaagcagattaatgattacgtcgcaaaacagaccaaaggaaagattgtagatctgttaaaaaacctggactccaacgctgtcgtgattatggtgaactacattttttttaaggccaagtgggaaaccagcttcaaccataaagggacccaggagcaggacttttacgtcacaagtgaaacagtagttcgggtgcccatgatgagtcgcgaggaccagtaccactacctgctggatcgcaatctgagctgtagggtcgtgggggttccctatcagggcaacgccacagcacttttcattttaccttctgaagggaagatgcagcaggtcgaaaatggattgagcgagaagactctgcgcaagtggctgaagatgtttaagaagcgctattttcagacgtag

SEQ ID NO: 13833 - DNA, 1221 bp, Artificial Sequence
  derived and/or modified sequence
atgcagttgtttctgctgctctgtctcgtgctgctctctcctcagggagcttcccttcataggcatcaccctcgggagatgaaaaaacgagttgaggacttgcacgtcggcgcaacagtcgctccgagcagtcgcagggactttacattcgacctgtaccgggcattggctagtgctgctccaagccaatccatttttttttcacctgtctccattagcatgtccctcgctatgctaagcctgggtgcaggtagcagtacaaaaatgcagattctggaaggcttgggcctcaacctccaaaaatcaagtgaaaaagagctgcacagaggttttcagcagttgctccaggaactgaaccagcccagagatgggttccaattgagcctaggaaacgcgctgtttacagacctggtggttgacctgcaagacacatttgttagtgctatgaagacgttgtacttggccgacacattcccgaccaatttccgcgatagtgccggtgcaatgaaacagatcaatgattacgttgccaagcagactaaaggtaagatcgtggatctgctcaaaaatctcgactccaatgcagtggtaatcatggttaattatattttttttaaagccaaatgggagacatctttcaaccacaagggcactcaggagcaagacttttatgtcacttctgagaccgtggtgcgggtccccatgatgagtcgggaggaccagtaccactatctgttggatcgcaatttgagctgtcgcgtggtgggcgtaccctaccagggaaatgcaaccgcactatttatcctgccctcagagggaaagatgcagcaagttgaaaacgggctgagcgagaagacattgcggaaatggcttaagatgtttaagaagcgtcagctggaactctacttgcccaagttttctatcgagggatcctatcagctggagaaagtgctgccttcccttggcatcagcaatgtatttacatcccacgcggacctctcaggaataagtaatcattccaatatccaagtgtccgaaatggtccataaggctgtggtggaggtggacgaatccggaactagagccgcagctgccacgggaacaatatttacctttcgcagcgcccgtctgaactctcagcgcctggtttttaatcgccctttcctgatgttcattgtcgataacaacatactgtttcttgggaaggttaaccgcccatag

SEQ ID NO: 13834 - DNA, 435 bp, Artificial Sequence
  derived and/or modified sequence
atgcaactgtttttgctgctgtgtctggttctcctatctcctcaaggtgcctctctacacaggcatcacccccgtgagatgaagaagcgtgtggaggacctccatgtcggcgcaaccgtggctccctccagccgacgggactttacgttcgacctctatagggcgctcgcttctgccgcaccaagtcagtctatctttttctcacccgtttctatttctatgagcttggctatgctgagcctgggagctggatctagtaccaaaatgcagatactggagggactggggttgaacctgcaaaagtcttccgagaaggaattgcatcggggttttcagcagttgctccaggaactcaatcagccaagggacggctttcagcttagcctgggaaacgcactgttcactgacctcgtggtcgacttacaggacacttag

SEQ ID NO: 13835 - DNA, 75 bp, Artificial Sequence
  derived and/or modified sequence
atgcagttattcctcctcctctgcctagttctgctgagcccccaaggcgcttctctgcacagacaccatccttag

SEQ ID NO: 13836 - DNA, 696 bp, Artificial Sequence
  derived and/or modified sequence
atgcaattattccttctactgtgtctggttctcctgtcgccccaaggggctagcctgcaccgccaccatccaagggagatgaaaaaacgcgtggaagacttgcatgtgggcgctacagtcgccccatcttcgagacgcgatttcacctttgatctctatagagccctagccagcgcagctccctcccagtctattttcttctcccccgtctccatttccatgtccctagcgatgctttcgcttggggctggctcttcgaccaaaatgcagattttggaggggcttgggctgaatctgcagaagtcttccgagaaagagttacacagggggtttcagcagctgcttcaggagctcaatcaaccgagagatggtttccagctctccctgggtaatgccctgtttacggatctggtcgtcgatctccaagatacatttgttagcgctatgaaaaccctttacctggccgacacctttcccacgaatttcagggactccgctggggctatgaaacagatcaacgactacgtggcgaaacaaacaaagggaaagatcgtggatctcctaaagaacctagattcaaacgctgtcgtcattatggttaattacatattttttaaggctaagtgggagacctcattcaaccacaagggaactcaggaacaagacttttacgttacaagtgaaacagtagtgtag

SEQ ID NO: 13837 - DNA, 474 bp, Artificial Sequence
  derived and/or modified sequence
atgcagttgttcttgttgctttgtctagtcctgctgagtccccaaggcgcatccctccatagacaccatcccagagagatgaaaaaacgtgttgaggatcttcatgttggggcaaccgtggccccatcttcacgacgcgatttcacctttgatctgtatcgggctctcgcctctgcagcccctagccagagcatattcttctcccccgtgtccatatccatgtccttggccatgctatctctgggtgctggaagctccactaagatgcagatcctcgagggtctgggactgaatctccagaaatctagtgaaaaggagttgcaccggggattccagcagctgctgcaagagctaaatcagcctcgggacggatttcagctcagcctaggaaacgctttattcacagatctggttgtcgacctgcaggatacttttgtgagcgccatgaaaactctgtacttagccgacacctag

SEQ ID NO: 13838 - DNA, 1221 bp, Artificial Sequence
  derived and/or modified sequence
atgcagctttttctgctactttgcttggtactgctgagcccccagggcgcctccttgcacaggcaccacccacgcgagatgaagaagcgggtcgaagacctacacgtcggagccacagtcgccccatctagtaggcgcgactttacttttgacctgtatagagccctcgcctctgcagccccctcccagtcaatttttttctccccagtaagtatcagcatgtccctagctatgctctccctgggtgcgggttcatccactaaaatgcagatcctggaaggattaggcctgaatcttcaaaaatcgtctgagaaagagcttcaccggggttttcaacagctgctccaggagctcaatcagcctagagatgggtttcagctgagtctgggcaacgcactcttcactgaccttgtggtggacctacaagataccttcgtgagcgccatgaaaactctatatcttgctgatacatttcccaccaattttcgcgacagtgcaggcgcaatgaaacaaatcaatgattacgtggcaaagcagacgaaagggaaaattgtggatttgctgaagaatctggatagcaatgcagtcgtcattatggtgaactacatcttttttaaggcgaagtgggagacaagctttaaccataaaggaacccaggagcaggacttctatgtcacaagcgagaccgttgttagagtccccatgatgagtcgtgaagaccagtatcactatcttctggacagaaatctgtcctgcagagtggttggcgtgccataccagggtaacgcaacggcactttttatccttccgtctgaaggcaaaatgcagcaggtagagaacgggctgtcggagaaaacactgaggaaatggctcaaaatgttcaagaaacgccaactcgaactgtatttacctaagttctctattgaggggtcctaccagctggaaaaggtcctgccctccctaggaatttcaaatgtcttcacttcccatgccgacctgtctggcattagtaatcattctaacatccaagtctcagagatggttcataaagcagttgtggaggttgatgagagcggaacacgcgctgctgctgccaccgggactattttcactttcagatcagctcgcctgaatagccaacgtctcgtttttaacaggccctttttgatgttcatcgtcgataataatattctatttcttggaaaagttaacaggccctag

SEQ ID NO: 13839 - DNA, 993 bp, Artificial Sequence
  derived and/or modified sequence
atgcagctatttttgttactctgtctggtactcctgagccctcagggtgcttccctgcaccgccatcaccccagggaaatgaagaaacgcgttgaagatcttcacgtcggagcaaccgtggctccttcatccagacgcgacttcacctttgatctactgggtaatgcactgttcaccgacctcgttgtggaccttcaggacaccttcgtcagcgccatgaagaccttatatctcgcagacaccttccccacgaattttagagattctgcaggcgctatgaaacaaatcaacgactacgtggctaagcaaacaaagggaaagatcgtagatctgttaaagaacctggactccaatgcggtagttatcatggtcaattatatcttttttaaggctaagtgggagacgtcattcaaccacaaaggtacccaagagcaggatttctatgtcacttcagagacagtggtgcgagtcccaatgatgagccgcgaagaccaatatcactacctattagatcgcaatctatcgtgtagagttgtaggggttccatatcaagggaacgctaccgcactatttatactgccgagcgaaggaaagatgcagcaagtcgagaacggtttgagcgaaaagacactacgtaaatggctgaaaatgtttaagaagcgccagctcgaactgtatctcccaaaatttagcatcgaaggatcatatcagttggaaaaggtccttccctccctggggattagcaatgtgttcacctcacatgcggacctgagcggcattagcaaccactcaaatatccaggtcagcgaaatggtccacaaagctgtggtggaggtcgatgagagtggtactagggccgcagccgcaacagggacaattttcacctttcggtctgctcggctgaactcgcagaggctggtcttcaatcgaccattcctgatgtttatcgtggacaataatatccttttcctcggtaaggtcaatcggccatag

SEQ ID NO: 13840 - DNA, 2039 bp, Artificial Sequence
  derived and/or modified sequence
gacacagtaagtaccgatgccgcaaagggaggtccccagggcttgagggcatgtgaggcgaggagaggatggactctagagttttggggtttggggtctgcaaagctctgaaggagtctcatctctgcagtttcaggtatccaaggcagcagagaacaaagaacagccaccatgcagctcttcctcctcttgtgcctggtgcttctcagccctcagggggcctcccttcaccgccaccacccccgggagatgaagaagagagtcgaggacctccatgtaggtgccacggtggcccccagcagcagaagggactttacctttgacctcctcggcaatgcccttttcaccgacctggtggtagacctgcaggacaccttcgtaagtgccatgaagacgctgtacctggcagacactttccctaccaactttagggactctgcaggggccatgaagcagatcaatgattatgtggcaaagcaaacgaagggcaagattgtggacttgcttaagaacctcgatagcaatgcggtcgtgatcatggtgaattacatcttctttaaagctaagtgggagacaagcttcaaccacaaaggcacccaagagcaagacttctacgtgacctcggagactgtggtgcgggtacccatgatgagccgcgaggatcagtatcactacctcctggaccggaacctctcctgcagggtggtgggggtcccctaccaaggcaatgccacggctttgttcattctccccagtgagggaaagatgcagcaggtggagaatggactgagtgagaaaacgctgaggaagtggcttaagatgttcaaaaagaggcagctcgagctttaccttcccaaattctccattgagggctcctatcagctggagaaagtcctccccagtctggggatcagtaacgtcttcacctcccatgctgatctgtccggcatcagcaaccactcaaatatccaggtgtctgagatggtgcacaaagctgtggtggaggtggacgagtcgggaaccagagcagcggcagccacggggacaatattcactttcaggtcggcccgcctgaactctcagaggctagtgttcaacaggccctttctgatgttcattgtggataacaacatcctcttccttggcaaagtgaaccgcccctgaggtggggcttctcctgaaatctacaggcctcagggtgggagatgaagggggctaagctatggcccatctgtatgctggtagctagtgatttacacaggtttagttgactaatgaggcattacaaataatattactctatgatgattgcttccacccacacgactgcaacatacaggtgccttggggaaatgtggagaacattcaatcttgccgtcactattcatcaatgaagattaacactgagatccagagaggctggatgacttgctcaagttcaccagcatggtagtggcaaagagaggtccagagtcctggcccttgatgcccagctcagtgccacaaagctcaataggagggatgttccagtggatgagggccaccaggaagcacaggtccaaggctggtcccacacttatcagcagcaacaactgtcagttcatcctgcatgggaaaaatgttggaatgggagtctgaaatggggctactgtttcagtcctaatgtgctgtgtgacattgggacaacactttccctctctggacctcagtttccctctgtatacaaggatcagattcttgctgtgacccaagaactcctgaaatcatatagaaaggctggggtgggccctgtcattcgtggttgatttcaatacactcaagtgccattcatcctttaagaaaaacatctggatatcaaggtggaaatggcccatttaatgattgattatatcattttgtggatatagttataatctgatgggcctggctgggagtggaagaagggaagccttttgcaaatagtagagtatcagttgcaggtgccaatgactaactttttgaattctatgttggcattaacaataaagcattttgcaaac

SEQ ID NO: 13841 - DNA, 777 bp, Artificial Sequence
  derived and/or modified sequence
atgaaaacgttgtacttggctgacactttccctacaaactttcgagactccgccggagctatgaaacagatcaatgattacgtggccaagcagaccaaaggaaagattgtcgatcttctcaagaatctagattctaacgctgtcgtcattatggtaaattacatcttctttaaagccaaatgggagacatcattcaatcataaaggcacacaggagcaggacttttacgttacttctgaaacagttgtccgggtgccaatgatgagtagggaggaccaatatcactatctcctagacaggaatctgtcttgtcgggtcgtgggcgtcccttatcagggcaacgctactgccttatttatcctgccctcagaaggcaagatgcagcaggtggagaacgggctaagcgaaaaaacactacgtaaatggctcaaaatgttcaagaagcggcagttggagctgtacttacccaagttttctatcgaaggtagctaccagctcgaaaaagtgctcccatccctcggcatttcaaatgtgtttacaagccatgcagatctgtctggcatttccaatcactccaatattcaggtcagcgagatggtgcataaagcggtagtagaggtagatgagtcaggaactcgtgctgcagcggccaccggcacaattttcacgtttaggagcgccaggctgaactctcaacggctagtttttaatagacctttcctaatgttcatagtagacaataatatccttttcctcggaaaggtgaaccggccatag

SEQ ID NO: 13842 - DNA, 273 bp, Artificial Sequence
  derived and/or modified sequence
atgcagcttttcttactcctatgtctcgtgctgttgagcccacagggagcgtctctgcacagacatcatccccgagaaatgaagaagagggttgaagatctccatgttggagcaactgtcgccccaagctcaagacgagatttcacctttgatctatatcgcgctctcgcatctgctgccccctcccagtctatatttttctcccccgtatccatctctatgtccctggccatgctctccctgggagccgggagctctacaaagatgcagtag

SEQ ID NO: 13843 - DNA, 1221 bp, Artificial Sequence
  derived and/or modified sequence
atgcagctgtttctgttgctgtgccttgtcctcctaagtccccaaggggcttcgctccatcgacatcaccctcgagaaatgaagaaacgtgttgaagacctccatgtgggcgctactgtcgctccgagttccaggagggacttcaccttcgatctctaccgcgcgctcgcatccgcagcacccagtcaaagtattttcttctctcccgtgtcaatctcgatgtcgctagccatgttgagccttggcgccggttcgagtaccaagatgcagatactggagggattgggcctcaatcttcagaagtcttccgagaaggagctgcacagaggcttccagcaactgcttcaggaattgaatcagcccagggatggctttcagctcagtctgggcaatgccttatttaccgatctggtcgtggacttgcaggatacttttgtgagcgcgatgaagacactatacctcgcagacacattcccgacaaacttcagagactccgccggagccatgaaacaaatcaacgattacgtcgccaagcagactaaaggaaagatcgtcgatctgctgaagaatctggactccaacgcagttgtgattatggttaactatattttcttcaaggctaaatgggagacctcatttaaccacaagggcactcaggaacaggatttttatgtgacctccgaaactgtggttagggttccaatgatgtccagggaggatcagtaccattacctcctcgatcgtaatctgagctgtagggttgtgggtgttccgtatcagggcaacgcgactgcccttttcattcttccaagcgaaggaaagatgcagcaagttgagaatggcctgagcgaaaagacattaagaaagtggctgaagatgttcaagaagcgacagttagagttgtatctccccaagttttccatcgagggatcctatcagctcgagaaggtgctcccttccctcggcataagcaatgttttcacatctcacgctgacctctcggggatttctaaccatagcaacatccaggtgtctgaaatggtacataaggccgtggtcgaggttgatgagagcgggacacgagcggccgccgctaccgggacgatttttaccttcaggtcagctaggctgaactcacaaagactcgtttttaacagaccctttctgatgttcatagtagacaataacatcttattcctgggcaaggtaaatagaccctag

SEQ ID NO: 13844 - DNA, 519 bp, Artificial Sequence
  derived and/or modified sequence
atgcagctatttttactactttgccttgtacttctctctcctcagggtgccagccttcatcgccatcaccccagggaaatgaagaagcgtgtcgaagatctccatgtcggggccacagttgcgcccagttcaaggagggactttaccttcgacctgtatagagctctagcctccgcagcaccatctcaatcgatttttttttctcctgtgagtatctctatgagtttggcaatgctgagcctgggggctggcagcagcactaagatgcagattctggaagggttagggctgaatttacaaaagtcaagtgagaaagagcttcacaggggctttcaacagcttctgcaagagctgaatcaaccccgcgatggtttccagctgagccttggaaatgcacttttcacggacctggtggttgatttgcaagacacgttcgtttctgcgatgaaaactctctacctcgccgacacgttcccaactaactttcgggacagcgccggtgctatgaaacagatctag

SEQ ID NO: 13845 - DNA, 1221 bp, Artificial Sequence
  derived and/or modified sequence
atgcagctctttttgcttctgtgtctggtgcttctctcaccccagggtgcatctctacaccgtcatcatccgcgtgagatgaagaaacgcgtcgaggatttgcatgttggggcgacagtggccccttcctcgagaagggacttcacattcgacctatacagggcgcttgccagcgctgccccgagtcaatccattttcttttccccagtctccatctccatgagcctcgcaatgctgtctcttggcgcaggatcttccacaaagatgcaaattctagaaggtcttggactaaacctgcagaaaagtagcgaaaaagaactacacaggggatttcaacaactgctgcaggaactgaaccagccacgggatggatttcagctctcattaggaaatgcattattcaccgaccttgttgtggacctgcaggacacatttgtcagcgccatgaaaactttgtacctggcggataccttccccaccaacttcagggacagtgccggagcaatgaaacagattaatgactatgtcgccaaacaaactaagggtaaaattgtagatctactgaagaatctagattccaatgctgttgttattatggttaattatatcttcttcaaggctaaatgggaaacgtcatttaaccacaaaggcacccaggagcaggatttctacgtcacttcagagacagtagtgcgcgtccccatgatgtcccgagaggaccagtaccactatctgctggaccggaatttgtcatgccgagtagtaggcgtgccataccagggcaatgctacagcactgttcattctgcccagtgagggaaagatgcagcaggtggaaaatgggctcagcgagaagacattacgtaagtggctgaaaatgtttaagaagagacagctggaactataccttccgaagttcagcattgagggaagctaccagctagagaaggttctcccttcgctggggattagcaacgtttttaccagccacgctgatctttctggcattagtaaccactccaatatccaggtatccgaaatggtgcacaaagctgtcgttgaagtggatgagagtggtacaagggcggccgcggccacaggaactatttttactttccggtctgctcgtttgaattcccagaggttagtattcaatcggccattcctgatgtttatcgtcgacaataacatcctgtttctaggcaaggtgaaccgcccctag

SEQ ID NO: 13846 - DNA, 261 bp, Artificial Sequence
  derived and/or modified sequence
atgcaactgttcctcctactgtgtctcgtgctgttgagcccacaaggtgcatctttgcacaggcatcatccccgcgaaatgaagaagcgcgtggaagatctgcatgtcggcgccaccgtagccccctcatctaggcgcgattttaccttcgacctttaccgagctctcgctagcgccgcaccgagtcagagtattttctttagtccagtatctatttccatgagcctcgcaatgcttagtctcggcgccggtagctcatag

SEQ ID NO: 13847 - DNA, 906 bp, Artificial Sequence
  derived and/or modified sequence
atgcaactgttcctcctgttgtgcctagtgctgctctcaccgcagggggcctctctccacagacaccatccaagagagatgaagaagcgagttgaagacctgcatgtcggagccacagtcgccccatcatctagaagagattttacatttgacctctaccgcgcattagctagcgctgcgcccagccaatccatcttctttagccctgtctctattagcatgagcttggcgatgctcagtttgggcgccgggtcctccaccaagatgcagattttagagggcctgggtttaaatttgcagaaaagctctgaaaaagaactgcaccgaggttttcaacagctccttcaagagctcaaccagcccagggatgggtttcagttgtctttaggaaacgcactatttacggatttggtcgtggatcttcaggatacattcgtcagcgcgatgaaaaccctctacctcgccgacaccttcccaaccaacttcagagattccgccggagctatgaagcagattaacgactatgtggctaagcaaacaaagggcaagattgtggatctgctcaagaaccttgactccaacgcggtcgtcatcatggtcaactacatattctttaaagccaagtgggaaacttctttcaaccataaaggtactcaggagcaggacttttacgtgacctcagagacagttgttcgggttcctatgatgtctagagaagatcagtaccactatttgctggatagaaatctaagctgcagggtggtcggtgtaccatatcagggtaatgccacagccctttttattttgccttctgaaggaaagatgcagcaggttgaaaacgggctctccgaaaaaacactcagaaagtggctaaagatgttcaaaaaacggtacttccaaacttag

SEQ ID NO: 13848 - DNA, 1221 bp, Artificial Sequence
  derived and/or modified sequence
atgcaactattcctgctgttatgtttggtcctcttgagcccccaaggcgcctccctccatcgacaccacccacgcgaaatgaagaaaagagttgaagatttgcacgtgggcgccacagtcgctccctcatctaggagggatttcacctttgacctgtatcgcgcgctggctagtgccgcccctagccagtcaatcttttttagcccagtgtcgatctcgatgtctcttgccatgctgtctctaggggctggatcttcaactaagatgcagatactggagggcctgggtctcaacctccagaagagttctgagaaggagctgcataggggctttcagcagctgctgcaagagcttaatcagccaagagatgggtttcagctcagtctcggtaatgcactgttcaccgacctcgtcgtggatcttcaggataccttcgtgtccgccatgaaaactctgtacctggccgatacattccccactaactttagggacagtgccggtgctatgaagcagatcaatgattacgtggctaaacagacgaaaggtaaaattgtcgacctgttgaaaaatctggattctaacgccgttgtgattatggtgaactatatatttttcaaagccaagtgggagacctcctttaaccacaagggaacccaggagcaagacttctatgtgacatctgaaaccgttgtgagggtaccgatgatgagccgggaagaccagtatcattatctgcttgatagaaatctgagctgccgggtggttggcgtcccctatcagggcaatgcaaccgccttgttcatactccccagtgaaggtaagatgcaacaggtagagaatggtttgtcagaaaaaacactgcggaaatggctgaaaatgtttaaaaagagacagcttgaactctacctccctaaattcagtatcgaagggtcctatcaactggagaaagtcctcccgagcttggggattagcaatgtatttacaagtcacgccgacctgtccggtatctctaaccacagcaatatacaagtgagcgaaatggtacataaggccgtcgtggaggttgatgaatccgggacacgggctgctgcagcaactggcacaatctttacttttcgatcggctcggctcaactcccaacggcttgtattcaaccggccttttctgatgtttatcgtcgataacaacatcctgtttctgggcaaagtcaaccgcccttag

SEQ ID NO: 13849 - DNA, 435 bp, Artificial Sequence
  derived and/or modified sequence
atgcagctgttcctgctcttatgtctggtacttctgagtccgcaaggcgcctccttacacagacatcatccccgtgagatgaagaagcgggtagaagatcttcacgtgggtgcaactgtggcccccagcagcaggagggacttcacctttgacctgtaccgtgcattggcctccgcagccccctctcagtcaattttcttttctccggttagcatctcgatgagcttggccatgctttctcttggagcagggtcttccactaagatgcagatattagaaggccttggattaaacctacagaaatcatccgagaaggaattacaccgggggttccagcagctacttcaggaactgaaccagcctcgcgatggtttccagctaagccttggaaatgcattattcactgaccttgtcgtagacttgcaggacacatag

SEQ ID NO: 13850 - DNA, 75 bp, Artificial Sequence
  derived and/or modified sequence
atgcagctgttccttttactttgcttggtactgctctctccacaaggcgcctcactacaccgccaccacccttag

SEQ ID NO: 13851 - DNA, 696 bp, Artificial Sequence
  derived and/or modified sequence
atgcagttgtttttactcttatgtctcgtgcttttgtcacctcagggcgcgtcactgcacaggcaccacccaagagaaatgaagaagagggtcgaagatctgcacgtgggcgctaccgttgctccttcaagtcgccgtgacttcacttttgacctctaccgcgccttagcatcagccgctccctctcagagcatatttttctccccagtgagcatttccatgtcactcgcaatgctcagcctgggtgcaggctcttctaccaaaatgcagattctcgagggcctcggcctgaatctgcagaaatcctccgaaaaagagttacaccgcggctttcagcagctacttcaggaactcaaccagccaagagacggctttcaactgtccctgggtaacgcactgttcacagacctggtcgtcgatttgcaggatacttttgtgagtgccatgaagactctgtatctcgcagataccttccccacaaatttcagagacagtgcaggggctatgaaacagattaacgactacgtcgcaaaacagacaaaagggaagattgtggacttactgaaaaacctggatagcaacgctgtggtaatcatggtgaactacatattctttaaggcgaaatgggaaacaagctttaatcacaaaggcacacaggaacaagatttttatgtgacaagcgagaccgtcgtttag

SEQ ID NO: 13852 - DNA, 474 bp, Artificial Sequence
  derived and/or modified sequence
atgcagctgtttcttctcttgtgcttagtcctcctatcaccccaaggggcctccctgcaccgccaccatcccagggagatgaagaaaagagtggaggatcttcatgttggagcgactgtggctccgagcagcagacgagattttacttttgacctgtatagggcccttgcatccgctgctccctctcagtcgatcttcttttctcctgtgtcaatatctatgtccctggcgatgctctccttaggcgccggatcttcaactaagatgcagattctggaaggccttggtctgaacctgcaaaagtcctccgagaaagagttacatcgaggctttcagcaattactgcaagaattgaatcagccgagagacggatttcagctttcactgggtaatgccctgtttaccgatttagttgtagatttgcaggacacttttgtctccgcaatgaaaacgttgtacctggccgacacctag

SEQ ID NO: 13853 - DNA, 1221 bp, Artificial Sequence
  derived and/or modified sequence
atgcaactgtttctcctcctgtgcctggtgctcctgagtccacagggagctagtctccacagacaccatcctagagaaatgaagaaacgcgtggaagacctgcacgtaggcgctactgtcgcaccgtctagcaggagagatttcaccttcgatttgtaccgcgcccttgcatctgccgcaccaagtcagtccattttctttagccccgtgtctatcagcatgagccttgccatgttatctttgggagccggttcgtcaacaaaaatgcaaatcctcgaaggcctcggactcaacctgcaaaagtcctctgagaaggaactgcacagaggcttccagcaactcctccaagagctgaatcaaccaagagatggattccaacttagcttaggcaatgctctgtttacagatttagttgtggatctccaagataccttcgtgagtgctatgaaaacactttacctagcagatacatttccaactaactttcgggatagcgcaggcgcaatgaaacagatcaatgattacgtggctaagcagacgaagggaaagatcgttgacctcctcaagaatctcgactcaaatgcggtcgtgatcatggtcaactatatattctttaaggctaagtgggagacctcattcaaccacaaaggaacccaggaacaagatttttatgtaacttccgagacagtagtgagggtaccaatgatgagcagagaagaccagtaccattatttgctcgaccgaaacctatcctgtagagtggtgggagtgccatatcaagggaatgccacagccctgtttatacttccaagcgagggcaaaatgcagcaggttgagaatggactcagtgaaaagactctgaggaaatggctgaagatgttcaagaagcgacagctcgagctgtatttacctaagttctctattgaggggtcctaccagctggaaaaggtcctgccctccctaggaatttcaaatgtcttcacttcccatgccgacctgtctggcattagtaatcattctaacatccaagtctcagagatggttcataaagcagttgtggaggttgatgagagcggaacacgcgctgctgctgccaccgggactattttcactttcagatcagctcgcctgaatagccaacgtctcgtttttaacaggccctttttgatgttcatcgtcgataataatattctatttcttggaaaagtaaacagaccatag

SEQ ID NO: 13854 - DNA, 993 bp, Artificial Sequence
  derived and/or modified sequence
atgcagctgttcctgttgctgtgtcttgtattactgtctcctcaaggggcaagcctccatagacaccatcctagagagatgaaaaagagagtcgaggatcttcatgttggggctacagtcgccccttctagccgccgcgatttcacgttcgacctgctcggcaatgccctgtttactgatctcgtcgttgacttgcaagacactttcgtttctgccatgaagaccctttacctagccgacactttccccaccaactttcgcgattctgcaggagctatgaagcagataaatgattacgttgctaagcaaacaaagggaaagatcgtagatctgttaaagaacctggactccaatgcggtagttatcatggtcaattatatcttttttaaggctaagtgggagacgtcattcaaccacaaaggtacccaagagcaggatttctatgtcacttcagagacagtggtgcgagtcccaatgatgagccgcgaagaccaatatcactacctattagatcgcaatctatcgtgtagagttgtaggggttccatatcaagggaacgctaccgcactatttatactgccgagcgaaggaaagatgcagcaagtggagaacggtctgtccgagaaaaccctccgcaaatggctcaaaatgtttaagaagcgccaactagagttatacctgccaaaattttctatcgaaggctcctaccagctagagaaggttctgcctagcctggggattagtaatgtgttcacatcacacgccgaccttagcggcatctccaatcacagcaacattcaggtcagcgaaatggtccataaagctgtagttgaggttgacgagagcgggacaagggccgcggccgcaacaggcaccatatttacattcagatcggcaaggcttaacagccaacgactcgtgttcaataggccatttctgatgtttattgtggataataatatcttatttctgggaaaagtcaaccgaccatag

SEQ ID NO: 13855 - DNA, 777 bp, Artificial Sequence
  derived and/or modified sequence
atgaaaacactctatctcgctgatactttcccaactaacttcagggacagtgcgggtgccatgaaacaaataaacgattacgttgctaagcagacaaaaggaaagattgtagatttgttgaaaaatctggatagtaacgccgtggtcataatggtgaattatatcttcttcaaggccaaatgggaaacaagtttcaatcacaaaggaacccaggagcaggatttctatgtgacaagcgaaacagttgtgcgagtccctatgatgtcacgtgaagatcaataccactaccttttagacagaaacctgtcatgcagagtggttggggtgccctatcaaggcaacgcaactgcactgtttattctcccgagcgaaggcaagatgcagcaggtagagaacggactatcagagaaaacattgcgcaaatggctgaagatgttcaaaaagagacaattagaactatacctaccgaaattttcaattgagggttcctaccagctcgagaaagtcctcccatccttaggaatctccaatgtgttcacctcccacgccgatctcagcggcatttcgaatcacagcaatattcaggttagcgagatggtccataaggctgtggtagaagtagacgagtccgggacgagagccgcagctgccactggcacaatatttacttttcgctccgcgcgccttaattcacagagattagtttttaacagacccttccttatgtttatagtggataataatattttgttcttaggaaaagtgaaccggccttag

SEQ ID NO: 13856 - DNA, 1221 bp, Artificial Sequence
  derived and/or modified sequence
atgcagctgttcctgctcctgtgtctagtcctgttaagcccacagggcgccagtcttcatagacatcacccgcgagaaatgaagaagagagtggaagatctgcacgtgggagccaccgtagcgccgtcatccagaagagacttcactttcgatttgtatcgggcacttgcgtccgccgctccaagccagtccatttttttttcacctgtcagtatctctatgtctctagctatgttatcactgggcgctgggtcctcaactaaaatgcaaatcctggaaggcctgggactgaatctccagaagtcctcagagaaagaacttcacagaggctttcagcagctactgcaggaacttaaccagcctagggacgggttccaactcagtttagggaacgctctgtttacagacctggtggtagaccttcaggatacattcgtcagcgctatgaaaacattgtacttggccgatacttttccaacaaatttccgcgattctgccggggctatgaaacagattaatgattacgtcgccaagcaaaccaagggaaaaatagtcgaccttctgaaaaaccttgatagcaatgccgttgtgatcatggtgaattacatcttcttcaaggcaaagtgggagactagtttcaaccataagggaacgcaagagcaggacttttacgtaacttcagagacagttgtgagagtgcctatgatgagcagggaggaccagtaccactaccttttggaccgtaatctatcttgtagggtcgttggggtgccgtaccagggcaacgccacagccttgtttattctccccagtgaagggaagatgcaacaggtcgagaacggactgtccgaaaaaaccttaaggaaatggctcaaaatgttcaagaaacgacaactcgaactgtatttacctaaatttagtattgagggcagttaccagctggagaaagtccttccatcccttggtatttctaacgtattcacctcccacgctgacttaagcggtatttcaaaccattctaacatacaggtaagcgagatggtacataaggcagttgttgaagtagatgagtcaggcactagagccgccgctgctaccggcacaatatttacatttagaagcgcaagattaaacagtcagaggctggtgttcaataggcctttcctgatgtttattgtcgataacaatattctgttcctgggcaaagtgaatagaccctag

SEQ ID NO: 13857 - DNA, 519 bp, Artificial Sequence
  derived and/or modified sequence
atgcagctctttctactcctctgcctcgtgttacttagtcctcagggagcatcactgcatagacaccacccaagggagatgaaaaaaagggtagaggacctccacgttggggctacagtggcaccttcaagtaggcgagatttcacttttgacctctaccgcgctctggcttcggccgctccatcccaaagcatatttttcagtcctgtctctattagcatgtcgcttgctatgctgagtcttggcgcaggctcctcaaccaaaatgcagatactcgagggcctaggcttgaacttgcagaagtcatcggaaaaagaactgcatcgaggatttcagcagctgctgcaggaactaaatcagccgcgggacggatttcagcttagtctaggcaatgccttgtttaccgacctcgttgtcgacttgcaagacacattcgtgagtgcaatgaaaacactttatctcgctgacactttccccaccaattttcgagattccgctggcgccatgaaacaaatctag

SEQ ID NO: 13858 - DNA, 1221 bp, Artificial Sequence
  derived and/or modified sequence
atgcagctgttcttactgctatgtctcgtgctgctctctccacaaggtgcctctttgcacaggcatcacccaagggaaatgaaaaaacgagtcgaagacttgcatgtcggtgcaactgtggccccaagctctcgtcgcgattttacattcgacctgtaccgcgctctcgcgtcagctgctccctcccagagtatattcttcagtcccgtgtcaatatctatgtcgctggcaatgctcagcctgggcgccggatccagtacaaaaatgcagatcctcgaaggcctcggccttaatctccagaaaagtagcgaaaaagaactacacaggggatttcaacaactgctgcaggaactgaaccagccacgggatggatttcagctctcattaggaaatgcattattcaccgaccttgttgtggacctgcaggacacatttgtcagcgccatgaaaactttgtacctggcggataccttccccaccaacttcagggacagtgccggagcaatgaaacagattaatgactatgtcgccaaacaaactaagggtaaaattgtagatctactgaagaatctagattccaatgctgttgttattatggttaattatatttttttcaaggccaaatgggagacctcctttaaccacaaggggactcaggagcaggatttctatgtcactagcgagaccgtcgtcagagtacccatgatgagcagagaagaccaataccactatctgctggaccgtaacctgtcatgtcgagtggtgggcgtgccctaccaaggcaatgcaacagccctctttattttaccttccgaaggaaaaatgcaacaagtggaaaatgggctgtccgagaagaccctcaggaaatggcttaagatgtttaaaaaacggcaactggagctgtacctccctaagttctcaattgagggtagttatcaactagaaaaggttctccccagcttaggtattagcaatgttttcacatcacatgcagatctgtcaggaatttccaatcattcgaacatccaggtgtcagagatggtgcacaaagccgtagtcgaggtggacgagagtgggacacgggccgcagccgctacgggaacaatctttaccttcagatcagctcggttaaacagtcagcgattagtgttcaatcgacctttcttaatgttcattgtggataacaatatcttattcttaggaaaagttaaccggccctag

SEQ ID NO: 13859 - DNA, 906 bp, Artificial Sequence
  derived and/or modified sequence
atgcagttgttcctactcctttgcctggtcctgctctcccctcagggagctagcctccacagacatcacccccgtgagatgaaaaaacgggttgaggatctccatgttggtgctacagtcgccccaagttcacgcagagacttcactttcgacttgtaccgtgccctcgcaagtgctgccccttcccagagcatttttttcagccctgtgtctatttctatgtccctggccatgctgtctctcggagctggctcctccactaaaatgcaaatactggaaggccttggtctgaacctccaaaaatctagtgaaaaagaactgcatcgcggattccagcagctgcttcaggaactgaatcaaccgagggacggatttcagttgagtctcggcaatgctctttttactgatctggttgtggatctacaggatacctttgtctccgcaatgaagacactatatttagcagatacgttccctaccaattttagggatagcgctggcgcaatgaaacagatcaacgattacgtcgctaaacaaacaaaaggtaaaatagtggacttgcttaaaaatttagatagcaatgcggttgttattatggttaattacatctttttcaaagctaaatgggagacttcatttaaccataaaggtactcaggaacaggatttctatgtgacgagtgaaaccgttgtgagagttcccatgatgtccagggaagatcagtaccactacttgttagatcggaacctatcctgccgtgttgttggagtgccctaccaaggcaatgccaccgctctttttatcctgccatctgagggcaagatgcagcaagttgaaaatggactcagtgagaaaaccctccggaaatggctcaaaatgtttaagaagcgttactttcagacatag

SEQ ID NO: 13860 - DNA, 1221 bp, Artificial Sequence
  derived and/or modified sequence
atgcagcttttcctgttgctgtgtcttgtacttctaagcccccagggggccagtctccaccgtcatcatcctagggaaatgaagaaacgagtagaggaccttcacgttggcgctactgtggcaccatcaagcagacgggacttcaccttcgacctgtacagagccctcgcttccgcggcccctagccagtctatctttttctcccccgtgtcaatttccatgtctctcgccatgctgtctttaggagccggatcctctacgaaaatgcagatcctagagggactcggcttgaatctgcaaaagtctagcgaaaaagaactccataggggcttccagcaattacttcaggaactaaatcaacctcgcgatggcttccagctgtccctgggtaacgccctttttaccgatctggttgtagatctacaggatacattcgtatctgccatgaaaacgttatacctggctgacacatttccaactaattttagagacagcgcaggagcaatgaagcagatcaatgattatgttgccaaacagaccaaagggaaaattgttgatctactgaagaatctcgactctaacgcagtggtaattatggtaaattacatctttttcaaggccaagtgggagacaagctttaaccataaaggaacacaggaacaggacttctatgtaacatccgagactgtggtgagggttccaatgatgagcagggaggatcagtaccattatctcctggaccgaaacttaagctgccgtgtggtgggagtgccataccaagggaacgcaaccgccttgtttattctgccatcagaaggaaaaatgcagcaagtggagaacggactgtccgaaaagacccttagaaaatggcttaaaatgttcaagaagcgccaactagaactttatctccccaaattctctatcgaaggttcctatcagcttgagaaagtgctgccttccctgggaatctccaacgtgttcacatcacacgccgacctgtctggcatatctaatcactcgaacatccaggtatcagagatggtgcacaaagcagtcgtggaggtcgacgagagtgggacccgagccgcagcagcgaccgggacaatttttaccttcagaagcgcccgtttaaacagtcagagactggttttcaacagacccttcttaatgttcatagtagacaacaatatattgttcttgggaaaagtaaatagaccttag

SEQ ID NO: 13861 - DNA, 435 bp, Artificial Sequence
  derived and/or modified sequence
atgcagttattcctccttctctgtctcgtactcctttcccctcaaggagctagcctgcatcgccatcacccacgagaaatgaagaaacgagtggaagatctgcatgtgggagccacagttgcccccagctctagacgggactttaccttcgacttgtatcgcgccctcgcctccgccgccccatcccagtccatattcttttccccagtgagcatatccatgagcctggccatgttgagccttggggcaggaagctcaacaaagatgcagattctcgaaggtttgggcctaaatctgcagaagtcctccgaaaaggaactgcacagaggctttcaacagctgctgcaagaactgaaccaaccccgcgacggcttccaactcagccttggcaacgctctgtttaccgacttagttgtcgatcttcaggatacctag

SEQ ID NO: 13862 - DNA, 696 bp, Artificial Sequence
  derived and/or modified sequence
atgcagctgtttctgctcctttgcctggtccttctgtcaccccaaggggcctcgctgcacagacaccatcctcgggagatgaaaaagagagtggaagacttgcatgttggcgccacagtagccccgtcaagcagaagagacttcacatttgacttgtatagagccctcgcttcggccgcacctagtcagagcatatttttctcccccgtatctatctcaatgtccttagcaatgctcagtctcggagccggctcctcaaccaagatgcagatcctggagggccttggcctgaatcttcaaaagtccagtgagaaagagttacaccgggggtttcagcagttgctacaagagcttaatcagccacgtgacggtttccaactctctctggggaatgccctctttactgacctcgttgtggacctccaagataccttcgtgagcgcgatgaagacattatatctggccgatacattccccaccaacttcagagattccgccggcgccatgaaacagatcaacgattacgtagcaaagcagaccaagggcaagatcgtcgacttgcttaaaaatctcgattcgaacgctgtggtgattatggtgaactatattttttttaaggccaaatgggagacaagcttcaatcataaaggaacgcaggaacaggacttctatgttacttctgaaacagtcgtctag

SEQ ID NO: 13863 - DNA, 474 bp, Artificial Sequence
  derived and/or modified sequence
atgcagctttttctgctgctgtgtctcgtattgctctcccctcagggagcctctctccaccggcaccacccacgagagatgaagaaacgggttgaggatctccatgtcggcgccacagtggctccctcctctcgccgcgactttacttttgatctctacagagctctcgcgtctgctgcgccctcccagtccatcttcttctcaccagtatctatctctatgagtcttgccatgttatcccttggagccggttcctctacaaaaatgcaaattttagagggcctgggcctgaacctgcagaaaagctccgagaaggagttacatcggggatttcagcagcttctgcaggaactcaatcaacctcgggatggcttccaactttcactgggcaacgctctttttactgatctcgttgttgatctacaagatacattcgtatccgctatgaagaccttatacctggccgatacatag

SEQ ID NO: 13864 - DNA, 1539 bp, Artificial Sequence
  derived and/or modified sequence
gtgtgcacactcagctacgggacacatttcaggtatccaaggcagcagaggtgagtgggtcccccgagctctgtgaccttatgctccacactaactctggcagagcctccgtttcctcatagaacaaagaacagccaccacccccgggagatgaagaagagagtcgaggacctccatgtaggtgccacggtggcccccagcagcaggagggcctgggcctcaacctccagaaaagctcagagaaggagctgcacagaggctttcagcagctccttcaggaactcaaccagcccagagatggcttccagctgagcctcggcaatgcccttttcaccgacctggtggtagacctgcaggacaccttcgtaagtgccatgaagacgctgtacctggcagacactttccctaccaactttagggactctgcaggggccatgaagcagatcaatgattatgtggcaaagcaaacgaagggcaagattgtggacttgcttaagaacctcgatagcaatgcggtcgtgatcatggtgaattacatcttctttaaagctaagtgggagacaagcttcaaccacaaaggcacccaagagcaagacttctacgtgacctcggagactgtggtgcgggtacccatgatgagccgcgaggatcagtatcactacctcctggaccggaacctctcctgcagggtggtgggggtcccctaccaaggcaatgccacggctttgttcattctccccagtgagggaaagatgcagcaggtggagaatggactgagtgagaaaacgctgaggaagtggcttaagatgttcaaaaagaggcagctcgagctttaccttcccaaattctccattgagggctcctatcagctggagaaagtcctccccagtctggggatcagtaacgtcttcacctcccatgctgatctgtccggcatcagcaaccactcaaatatccaggtgtctgagatggtgcacaaagctgtggtggaggtggacgagtcgggaaccagagcagcggcagccacggggacaatattcactttcaggtcggcccgcctgaactctcagaggctagtgttcaacaggccctttctgatgttcattgtggataacaacatcctcttccttggcaaagtgaaccgcccctgaggtggggcttctcctgaaatctacaggcctcagggtgggagatgaagggggctaagctatggcccatctgtatgctggtagctagtgatttacacaggtttagttgactaatgaggcattacaaataatattactctatgatgattgcttccacccacacgactgcaacatacaggtgccttggggaaatgtggagaacattcaatcttgccgtcactattcatcaatgaagattaacactgagatccagagaggctggatgacttgctcaagttcaccagcatggtagtggcaaagagaggtccagagtcctggcccttgatgcccagctcagtgccacaaagctcaataggagggatgttccagtggatgagggccaccaggaagc

SEQ ID NO: 13865 - DNA, 574 bp, Artificial Sequence
  derived and/or modified sequence
ctctgccctttctgagcccgagggactgccacctccactgtgtgcacactcagctacgggacacagtaagtaccgatgccgcaaagggaggtccccagggcttgagggcatgtgaggcgaggagaggatggactctagagttttggggtttggggtctgcaaagctctgaaggagtctcatctctgcagtttcaggtatccaaggcagcagaggtgagtgggtcccccgagctctgtgaccttatgctccacactaactctggcagagcctccgtttcctcatagaacaaagaacagccaccatgcagctcttcctcctcttgtgcctggtgcttctcagccctcagggggcctcccttcaccgccaccacccccgggagatgaagaagagagtcgaggacctccatgtaggtgccacggtggcccccagcagcagaagggactttacctttgacctctacagggccttggcttccgctgcccccagccagagcatcttcttctcccctgtgagcatctccatgagcctggccatgctctccctgggggctgggtccagcacaaagatgcagat

SEQ ID NO: 13866 - DNA, 2071 bp, Artificial Sequence
  derived and/or modified sequence
aagacagagctgagacagccacccagggggtccactccaggacagactgtgcctgtgggctcacagggaagaggtcatgggcgaacagagtgaaggcaaccatctataagtgccagagagccctcaccagagaccaaccctgacggcaccttgaccttggatttccagcgtccagaactccacataattgggccccaaagccatgaagaaggaagaggaaatgtcttaaaggttgtcgatggacagtgtttgctgaacatcaaaatcactttccagaacaaagaacagccaccatgcagctcttcctcctcttgtgcctggtgcttctcagccctcagggggcctcccttcaccgccaccacccccgggagatgaagaagagagtcgaggacctccatgtaggtgccacggtggcccccagcagcagaagggactttacctttgacctctacagggccttggcttccgctgcccccagccagagcatcttcttctcccctgtgagcatctccatgagcctggccatgctctccctgggggctgggtccagcacaaagatgcagatcctggagggcctgggcctcaacctccagaaaagctcagagaaggagctgcacagaggctttcagcagctccttcaggaactcaaccagcccagagatggcttccagctgagcctcggcaatgcccttttcaccgacctggtggtagacctgcaggacaccttcgtaagtgccatgaagacgctgtacctggcagacactttccctaccaactttagggactctgcaggggccatgaagcagatcaatgattatgtggcaaagcaaacgaagggcaagattgtggacttgcttaagaacctcgatagcaatgcggtcgtgatcatggtgaattacatcttctttaaagctaagtgggagacaagcttcaaccacaaaggcacccaagagcaagacttctacgtgacctcggagactgtggtgcgggtacccatgatgagccgcgaggatcagtatcactacctcctggaccggaacctctcctgcagggtggtgggggtcccctaccaaggcaatgccacggctttgttcattctccccagtgagggaaagatgcagcaggtggagaatggactgagtgagaaaacgctgaggaagtggcttaagatgttcaaaaagaggcagctcgagctttaccttcccaaattctccattgagggctcctatcagctggagaaagtcctccccagtctggggatcagtaacgtcttcacctcccatgctgatctgtccggcatcagcaaccactcaaatatccaggtgtctgagatggtgcacaaagctgtggtggaggtggacgagtcgggaaccagagcagcggcagccacggggacaatattcactttcaggtcggcccgcctgaactctcagaggctagtgttcaacaggccctttctgatgttcattgtggataacaacatcctcttccttggcaaagtgaaccgcccctgaggtggggcttctcctgaaatctacaggcctcagggtgggagatgaagggggctaagctatggcccatctgtatgctggtagctagtgatttacacaggtttagttgactaatgaggcattacaaataatattactctatgatgattgcttccacccacacgactgcaacatacaggtgccttggggaaatgtggagaacattcaatcttgccgtcactattcatcaatgaagattaacactgagatccagagaggctggatgacttgctcaagttcaccagcatggtagtggcaaagagaggtccagagtcctggcccttgatgcccagctcagtgccacaaagctcaataggagggatgttccagtggatgagggccaccaggaagcacaggtccaaggctggtcccacacttatcagcagcaacaactgtcagttcatcctgcatgggaaaaatgttggaatgggagtctgaaatggggctactgtttcagtcctaatgtgctgtgtgacattgggacaacactttccctctctggacctcagtttccctctgta

SEQ ID NO: 13867 - DNA, 586 bp, Artificial Sequence
  derived and/or modified sequence
aagacagagctgagacagccacccagggggtccactccaggacagactgtgccaacaaagaacagccaccatgcagctcttcctcctcttgtgcctggtgcttctcagccctcagggggcctcccttcaccgccaccacccccgggagatgaagaagagagtcgaggacctccatgtaggtgccacggtggcccccagcagcagaagggactttacctttgacctctacagggccttggcttccgctgcccccagccagagcatcttcttctcccctgtgagcatctccatgagcctggccatgctctccctgggggctgggtccagcacaaagatgcagatcctggagggcctgggcctcaacctccagaaaagctcagagaaggagctgcacagaggctttcagcagctccttcaggaactcaaccagcccagagatggcttccagctgagcctcggcaatgcccttttcaccgacctggtggtagacctgcaggacaccttcgtaagtgccatgaagacgctgtacctggcagacactttccctaccaactttagggactctgcaggggccatgaagcagatc

SEQ ID NO: 13868 - DNA, 2210 bp, Artificial Sequence
  derived and/or modified sequence
tttcaggtatccaaggcagcagaggtgagtgggtcccccgagctctgtgaccttatgctccacactaactctggcagagcctccgtttcctcatagaacaaagaacagccaccatgcagctcttcctcctcttgtgcctggtgcttctcagccctcagggggcctcccttcaccgccaccacccccgggagatgaagaagagagtcgaggacctccatgtaggtgccacggtggcccccagcagcagaagggactttacctttgacctctacagggccttggcttccgctgcccccagccagagcatcttcttctcccctgtgagcatctccatgagcctggccatgctctccctgggggctgggtccagcacaaagatgcagatcctggagggcctgggcctcaacctccagaaaagctcagagaaggagctgcacagaggctttcagcagctccttcaggaactcaaccagcccagagatggcttccagctgagcctcggcaatgcccttttcaccgacctggtggtagacctgcaggacaccttcgtaagtgccatgaagacgctgtacctggcagacactttccctaccaactttagggactctgcaggggccatgaagcagatcaatgattatgtggcaaagcaaacgaagggcaagattgtggacttgcttaagaacctcgatagcaatgcggtcgtgatcatggtgaattacatcttctttaaagctaagtgggagacaagcttcaaccacaaaggcacccaagagcaagacttctacgtgacctcggagactgtggtgcgggtacccatgatgagccgcgaggatcagtatcactacctcctggaccggaacctctcctgcagggtggtgggggtcccctaccaaggcaatgccacggctttgttcattctccccagtgagggaaagatgcagcaggtggagaatggactgagtgagaaaacgctgaggaagtggcttaagatgttcaaaaagaggcagctcgagctttaccttcccaaattctccattgagggctcctatcagctggagaaagtcctccccagtctggggatcagtaacgtcttcacctcccatgctgatctgtccggcatcagcaaccactcaaatatccaggtgtctgagatggtgcacaaagctgtggtggaggtggacgagtcgggaaccagagcagcggcagccacggggacaatattcactttcaggtcggcccgcctgaactctcagaggctagtgttcaacaggccctttctgatgttcattgtggataacaacatcctcttccttggcaaagtgaaccgcccctgaggtggggcttctcctgaaatctacaggcctcagggtgggagatgaagggggctaagctatggcccatctgtatgctggtagctagtgatttacacaggtttagttgactaatgaggcattacaaataatattactctatgatgattgcttccacccacacgactgcaacatacaggtgccttggggaaatgtggagaacattcaatcttgccgtcactattcatcaatgaagattaacactgagatccagagaggctggatgacttgctcaagttcaccagcatggtagtggcaaagagaggtccagagtcctggcccttgatgcccagctcagtgccacaaagctcaataggagggatgttccagtggatgagggccaccaggaagcacaggtccaaggctggtcccacacttatcagcagcaacaactgtcagttcatcctgcatgggaaaaatgttggaatgggagtctgaaatggggctactgtttcagtcctaatgtgctgtgtgacattgggacaacactttccctctctggacctcagtttccctctgtatacaaggatcagattcttgctgtgacccaagaactcctgaaatcatatagaaaggctggggtgggccctgtcattcgtggttgatttcaatacactcaagtgccattcatcctttaagaaaaacatctggatatcaaggtggaaatggcccatttaatgattgattatatcattttgtggatatagttataatctgatgggcctggctgggagtggaagaagggaagccttttgcaaatagtagagtatcagttgcaggtgccaatgactaactttttgaattctatgttggcattaacaataaagcattttgcaaaca

SEQ ID NO: 13869 - DNA, 533 bp, Artificial Sequence
  derived and/or modified sequence
gtgcacactcagctacgggacacatttcaggtatccaaggcagcagaggtgagtgggtcccccgagctctgtgaccttatgctccacactaactctggcagagcctccgtttcctcatagggcaaggccagcagtgctgatggtcccaggcatgtagctggtctgagttcatagaaggaccacagcgccctgccatgtgccaaaccaggacaccagagtgaaggccagaagctcacatggaagcagcttagttccctgaacaaagaacagccaccatgcagctcttcctcctcttgtgcctggtgcttctcagccctcagggggcctcccttcaccgccaccacccccgggagatgaagaagagagtcgaggacctccatgtaggtgccacggtggcccccagcagcagaagggactttacctttgacctctacagggccttggcttccgctgcccccagccagagcatcttcttctcccctgtgagcatctccatgagcctggccatgctctccctgggggctgggtccagc

SEQ ID NO: 13870 - DNA, 1113 bp, Artificial Sequence
  derived and/or modified sequence
agtgacaaatgctggctgcaatccagccagccctctgccctttctgagcccgagggactgccacctccactgtgtgcacactcagctacgggacacatttcaggtatccaaggcagcagaggtgagtgggtcccccgagctctgtgaccttatgctccacactaactctggcagagcctccgtttcctcatagaacaaagaacagccaccatgcagctcttcctcctcttgtgcctggtgcttctcagccctcagggggcctcccttcaccgccaccacccccgggagatgaagaagagagtcgaggacctccatgtaggtgccacggtggcccccagcagcagaagggactttacctttgacctctacagggccttggcttccgctgcccccagccagagcatcttcttctcccctgtgagcatctccatgagcctggccatgctctccctgggggctgggtccagcacaaagatgcagatcctggagggcctgggcctcaacctccagaaaagctcagagaaggagctgcacagaggctttcagcagctccttcaggaactcaaccagcccagagatggcttccagctgagcctcggcaatgcccttttcaccgacctggtggtagacctgcaggacaccttcgtaagtgccatgaagacgctgtacctggcagacactttccctaccaactttagggactctgcaggggccatgaagcagatcaatgattatgtggcaaagcaaacgaagggcaagattgtggacttgcttaagaacctcgatagcaatgcggtcgtgatcatggtgaattacatcttctttaaagctaagtgggagacaagcttcaaccacaaaggcacccaagagcaagacttctacgtgacctcggagactgtggtgcgggtacccatgatgagccgcgaggatcagtatcactacctcctggaccggaacctctcctgcagggtggtgggggtcccctaccaaggcaatgccacggctttgttcattctccccagtgagggaaagatgcagcaggtggagaatggactgagtgagaaaacgctgaggaagtggcttaagatgttcaaaaagaggtactttcagact

SEQ ID NO: 13871 - DNA, 2211 bp, Artificial Sequence
  derived and/or modified sequence
agtgacaaatgctggctgcaatccagccagccctctgccctttctgagcccgagggactgccacctccactgtgtgcacactcagctacgggacacaaacaaagaacagccaccatgcagctcttcctcctcttgtgcctggtgcttctcagccctcagggggcctcccttcaccgccaccacccccgggagatgaagaagagagtcgaggacctccatgtaggtgccacggtggcccccagcagcagaagggactttacctttgacctctacagggccttggcttccgctgcccccagccagagcatcttcttctcccctgtgagcatctccatgagcctggccatgctctccctgggggctgggtccagcacaaagatgcagatcctggagggcctgggcctcaacctccagaaaagctcagagaaggagctgcacagaggctttcagcagctccttcaggaactcaaccagcccagagatggcttccagctgagcctcggcaatgcccttttcaccgacctggtggtagacctgcaggacaccttcgtaagtgccatgaagacgctgtacctggcagacactttccctaccaactttagggactctgcaggggccatgaagcagatcaatgattatgtggcaaagcaaacgaagggcaagattgtggacttgcttaagaacctcgatagcaatgcggtcgtgatcatggtgaattacatcttctttaaagctaagtgggagacaagcttcaaccacaaaggcacccaagagcaagacttctacgtgacctcggagactgtggtgcgggtacccatgatgagccgcgaggatcagtatcactacctcctggaccggaacctctcctgcagggtggtgggggtcccctaccaaggcaatgccacggctttgttcattctccccagtgagggaaagatgcagcaggtggagaatggactgagtgagaaaacgctgaggaagtggcttaagatgttcaaaaagaggcagctcgagctttaccttcccaaattctccattgagggctcctatcagctggagaaagtcctccccagtctggggatcagtaacgtcttcacctcccatgctgatctgtccggcatcagcaaccactcaaatatccaggtgtctgagatggtgcacaaagctgtggtggaggtggacgagtcgggaaccagagcagcggcagccacggggacaatattcactttcaggtcggcccgcctgaactctcagaggctagtgttcaacaggccctttctgatgttcattgtggataacaacatcctcttccttggcaaagtgaaccgcccctgaggtggggcttctcctgaaatctacaggcctcagggtgggagatgaagggggctaagctatggcccatctgtatgctggtagctagtgatttacacaggtttagttgactaatgaggcattacaaataatattactctatgatgattgcttccacccacacgactgcaacatacaggtgccttggggaaatgtggagaacattcaatcttgccgtcactattcatcaatgaagattaacactgagatccagagaggctggatgacttgctcaagttcaccagcatggtagtggcaaagagaggtccagagtcctggcccttgatgcccagctcagtgccacaaagctcaataggagggatgttccagtggatgagggccaccaggaagcacaggtccaaggctggtcccacacttatcagcagcaacaactgtcagttcatcctgcatgggaaaaatgttggaatgggagtctgaaatggggctactgtttcagtcctaatgtgctgtgtgacattgggacaacactttccctctctggacctcagtttccctctgtatacaaggatcagattcttgctgtgacccaagaactcctgaaatcatatagaaaggctggggtgggccctgtcattcgtggttgatttcaatacactcaagtgccattcatcctttaagaaaaacatctggatatcaaggtggaaatggcccatttaatgattgattatatcattttgtggatatagttataatctgatgggcctggctgggagtggaagaagggaagccttttgcaaatagtagagtatcagttgcaggtgccaatgactaactttttgaattctatgttggcattaacaataaagcattttgcaaaca

SEQ ID NO: 13872 - DNA, 618 bp, Artificial Sequence
  derived and/or modified sequence
acactcagctacgggacacagtaagtaccgatgccgcaaagggaggtccccagggcttgagggcatgtgaggcgaggagaggatggactctagagttttggggtttggggtctgcaaagctctgaaggagtctcatctctgcagtttcaggtatccaaggcagcagagaacaaagaacagccaccatgcagctcttcctcctcttgtgcctggtgcttctcagccctcagggggcctcccttcaccgccaccacccccgggagatgaagaagagagtcgaggacctccatgtaggtgccacggtggcccccagcagcagaagggactttacctttgacctctacagggccttggcttccgctgcccccagccagagcatcttcttctcccctgtgagcatctccatgagcctggccatgctctccctgggggctgggtccagcacaaagatgcagatcctggagggcctgggcctcaacctccagaaaagctcagagaaggagctgcacagaggctttcagcagctccttcaggaactcaaccagcccagagatggcttccagctgagcctcggcaatgcccttttcaccgacctggtggtagacctgcaggacacct

SEQ ID NO: 13873 - DNA, 462 bp, Artificial Sequence
  derived and/or modified sequence
aaaatgtcggctggataggaggtgctcagtaagtggcagcttctgttgttttctgtgcctggagtcttgggcctttagaaatcaggaacaatgatccaatattatcggcttccgtgagataagggcatcttgcctggaggctgccacccaggccggtcatggcagctgctcatgaaggacagtaacaatttggcagtttgttaaatgaacaaaatgtagaaataaagtaagcagaatttttagtttttctgaaggtagggcttttggccagatatgcagcaataaaagagcaaactgcttccttgggccagtgtccttgctcatagatcaggaaaccgaagcatgaagaatacaggcggcagatgcctgaagaacaaagaacagccaccatgcagctcttcctcctcttgtgcctggtgcttctcagccctcagggggcctcccttcaccgccaccaccccc

SEQ ID NO: 13874 - DNA, 829 bp, Artificial Sequence
  derived and/or modified sequence
gacaaatgctggctgcaatccagccagccctctgccctttctgagcccgagggactgccacctccactgtgtgcacactcagctacgggacacatttcaggtatccaaggcagcagagaacaaagaacagccaccatgcagctcttcctcctcttgtgcctggtgcttctcagccctcagggggcctcccttcaccgccaccacccccgggagatgaagaagagagtcgaggacctccatgtaggtgccacggtggcccccagcagcagaagggactttacctttgacctctacagggccttggcttccgctgcccccagccagagcatcttcttctcccctgtgagcatctccatgagcctggccatgctctccctgggggctgggtccagcacaaagatgcagatcctggagggcctgggcctcaacctccagaaaagctcagagaaggagctgcacagaggctttcagcagctccttcaggaactcaaccagcccagagatggcttccagctgagcctcggcaatgcccttttcaccgacctggtggtagacctgcaggacaccttcgtaagtgccatgaagacgctgtacctggcagacactttccctaccaactttagggactctgcaggggccatgaagcagatcaatgattatgtggcaaagcaaacgaagggcaagattgtggacttgcttaagaacctcgatagcaatgcggtcgtgatcatggtgaattacatcttctttaaagctaagtgggagacaagcttcaaccacaaaggcacccaagagcaagacttctacgtgacctcggagactgtggtgc

SEQ ID NO: 13875 - DNA, 607 bp, Artificial Sequence
  derived and/or modified sequence
acaatgcccaggacaagatcacaaagcatcatcctgttcaaaaggtcaacaggatcaaggttgagagaccctgaaataaggccatggggacaaaatgtcggctggataggaggtgctcaaacaaagaacagccaccatgcagctcttcctcctcttgtgcctggtgcttctcagccctcagggggcctcccttcaccgccaccacccccgggagatgaagaagagagtcgaggacctccatgtaggtgccacggtggcccccagcagcagaagggactttacctttgacctctacagggccttggcttccgctgcccccagccagagcatcttcttctcccctgtgagcatctccatgagcctggccatgctctccctgggggctgggtccagcacaaagatgcagatcctggagggcctgggcctcaacctccagaaaagctcagagaaggagctgcacagaggctttcagcagctccttcaggaactcaaccagcccagagatggcttccagctgagcctcggcaatgcccttttcaccgacctggtggtagacctgcaggacaccttcgtaagtgccatgaagacgctgtacctggcagacact

SEQ ID NO: 13876 - DNA, 1221 bp, Artificial Sequence
  derived and/or modified sequence
atgcagctgttcctgctgctgtgcctggtgctgctgagcccccagggcgccagcctgcacagacaccaccccagagagatgaagaagagagtggaggacctgcacgtgggcgccaccgtggcccccagcagcagaagagacttcaccttcgacctgtacagagccctggccagcgccgcccccagccagagcatcttcttcagccccgtgagcatcagcatgagcctggccatgctgagcctgggcgccggcagcagcaccaagatgcagatcctggagggcctgggcctgaacctgcagaagagcagcgagaaggagctgcacagaggcttccagcagctgctgcaggagctgaaccagcccagagacggcttccagctgagcctgggcaacgccctgttcaccgacctggtggtggacctgcaggacaccttcgtgagcgccatgaagaccctgtacctggccgacaccttccccaccaacttcagagacagcgccggcgccatgaagcagatcaacgactacgtggccaagcagaccaagggcaagatcgtggacctgctgaagaacctggacagcaacgccgtggtgatcatggtgaactacatcttcttcaaggccaagtgggagaccagcttcaaccacaagggcacccaggagcaggacttctacgtgaccagcgagaccgtggtgagagtgcccatgatgagcagagaggaccagtaccactacctgctggacagaaacctgagctgcagagtggtgggcgtgccctaccagggcaacgccaccgccctgttcatcctgcccagcgagggcaagatgcagcaggtggagaacggcctgagcgagaagaccctgagaaagtggctgaagatgttcaagaagagacagctggagctgtacctgcccaagttcagcatcgagggcagctaccagctggagaaggtgctgcccagcctgggcatcagcaacgtgttcaccagccacgccgacctgagcggcatcagcaaccacagcaacatccaggtgagcgagatggtgcacaaggccgtggtggaggtggacgagagcggcaccagagccgccgccgccaccggcaccatcttcaccttcagaagcgccagactgaacagccagagactggtgttcaacagacccttcctgatgttcatcgtggacaacaacatcctgttcctgggcaaggtgaacagaccctag

SEQ ID NO: 13877 - DNA, 993 bp, Artificial Sequence
  derived and/or modified sequence
atgcagctgttcctgctgctgtgcctggtgctgctgagcccccagggcgccagcctgcacagacaccaccccagagagatgaagaagagagtggaggacctgcacgtgggcgccaccgtggcccccagcagcagaagagacttcaccttcgacctgctgggcaacgccctgttcaccgacctggtggtggacctgcaggacaccttcgtgagcgccatgaagaccctgtacctggccgacaccttccccaccaacttcagagacagcgccggcgccatgaagcagatcaacgactacgtggccaagcagaccaagggcaagatcgtggacctgctgaagaacctggacagcaacgccgtggtgatcatggtgaactacatcttcttcaaggccaagtgggagaccagcttcaaccacaagggcacccaggagcaggacttctacgtgaccagcgagaccgtggtgagagtgcccatgatgagcagagaggaccagtaccactacctgctggacagaaacctgagctgcagagtggtgggcgtgccctaccagggcaacgccaccgccctgttcatcctgcccagcgagggcaagatgcagcaggtggagaacggcctgagcgagaagaccctgagaaagtggctgaagatgttcaagaagagacagctggagctgtacctgcccaagttcagcatcgagggcagctaccagctggagaaggtgctgcccagcctgggcatcagcaacgtgttcaccagccacgccgacctgagcggcatcagcaaccacagcaacatccaggtgagcgagatggtgcacaaggccgtggtggaggtggacgagagcggcaccagagccgccgccgccaccggcaccatcttcaccttcagaagcgccagactgaacagccagagactggtgttcaacagacccttcctgatgttcatcgtggacaacaacatcctgttcctgggcaaggtgaacagaccctag

SEQ ID NO: 13878 - DNA, 2312 bp, Artificial Sequence
  derived and/or modified sequence
agtgacaaatgctggctgcaatccagccagccctctgccctttctgagcccgagggactgccacctccactgtgtgcacactcagctacgggacacatttcaggtatccaaggcagcagaggtgagtgggtcccccgagctctgtgaccttatgctccacactaactctggcagagcctccgtttcctcatagaacaaagaacagccaccatgcagctcttcctcctcttgtgcctggtgcttctcagccctcagggggcctcccttcaccgccaccacccccgggagatgaagaagagagtcgaggacctccatgtaggtgccacggtggcccccagcagcagaagggactttacctttgacctctacagggccttggcttccgctgcccccagccagagcatcttcttctcccctgtgagcatctccatgagcctggccatgctctccctgggggctgggtccagcacaaagatgcagatcctggagggcctgggcctcaacctccagaaaagctcagagaaggagctgcacagaggctttcagcagctccttcaggaactcaaccagcccagagatggcttccagctgagcctcggcaatgcccttttcaccgacctggtggtagacctgcaggacaccttcgtaagtgccatgaagacgctgtacctggcagacactttccctaccaactttagggactctgcaggggccatgaagcagatcaatgattatgtggcaaagcaaacgaagggcaagattgtggacttgcttaagaacctcgatagcaatgcggtcgtgatcatggtgaattacatcttctttaaagctaagtgggagacaagcttcaaccacaaaggcacccaagagcaagacttctacgtgacctcggagactgtggtgcgggtacccatgatgagccgcgaggatcagtatcactacctcctggaccggaacctctcctgcagggtggtgggggtcccctaccaaggcaatgccacggctttgttcattctccccagtgagggaaagatgcagcaggtggagaatggactgagtgagaaaacgctgaggaagtggcttaagatgttcaaaaagaggcagctcgagctttaccttcccaaattctccattgagggctcctatcagctggagaaagtcctccccagtctggggatcagtaacgtcttcacctcccatgctgatctgtccggcatcagcaaccactcaaatatccaggtgtctgagatggtgcacaaagctgtggtggaggtggacgagtcgggaaccagagcagcggcagccacggggacaatattcactttcaggtcggcccgcctgaactctcagaggctagtgttcaacaggccctttctgatgttcattgtggataacaacatcctcttccttggcaaagtgaaccgcccctgaggtggggcttctcctgaaatctacaggcctcagggtgggagatgaagggggctaagctatggcccatctgtatgctggtagctagtgatttacacaggtttagttgactaatgaggcattacaaataatattactctatgatgattgcttccacccacacgactgcaacatacaggtgccttggggaaatgtggagaacattcaatcttgccgtcactattcatcaatgaagattaacactgagatccagagaggctggatgacttgctcaagttcaccagcatggtagtggcaaagagaggtccagagtcctggcccttgatgcccagctcagtgccacaaagctcaataggagggatgttccagtggatgagggccaccaggaagcacaggtccaaggctggtcccacacttatcagcagcaacaactgtcagttcatcctgcatgggaaaaatgttggaatgggagtctgaaatggggctactgtttcagtcctaatgtgctgtgtgacattgggacaacactttccctctctggacctcagtttccctctgtatacaaggatcagattcttgctgtgacccaagaactcctgaaatcatatagaaaggctggggtgggccctgtcattcgtggttgatttcaatacactcaagtgccattcatcctttaagaaaaacatctggatatcaaggtggaaatggcccatttaatgattgattatatcattttgtggatatagttataatctgatgggcctggctgggagtggaagaagggaagccttttgcaaatagtagagtatcagttgcaggtgccaatgactaactttttgaattctatgttggcattaacaataaagcattttgcaaacactggt

SEQ ID NO: 13879 - DNA, 777 bp, Artificial Sequence
  derived and/or modified sequence
atgaagaccctgtacctggccgacaccttccccaccaacttcagagacagcgccggcgccatgaagcagatcaacgactacgtggccaagcagaccaagggcaagatcgtggacctgctgaagaacctggacagcaacgccgtggtgatcatggtgaactacatcttcttcaaggccaagtgggagaccagcttcaaccacaagggcacccaggagcaggacttctacgtgaccagcgagaccgtggtgagagtgcccatgatgagcagagaggaccagtaccactacctgctggacagaaacctgagctgcagagtggtgggcgtgccctaccagggcaacgccaccgccctgttcatcctgcccagcgagggcaagatgcagcaggtggagaacggcctgagcgagaagaccctgagaaagtggctgaagatgttcaagaagagacagctggagctgtacctgcccaagttcagcatcgagggcagctaccagctggagaaggtgctgcccagcctgggcatcagcaacgtgttcaccagccacgccgacctgagcggcatcagcaaccacagcaacatccaggtgagcgagatggtgcacaaggccgtggtggaggtggacgagagcggcaccagagccgccgccgccaccggcaccatcttcaccttcagaagcgccagactgaacagccagagactggtgttcaacagacccttcctgatgttcatcgtggacaacaacatcctgttcctgggcaaggtgaacagaccctag

SEQ ID NO: 13880 - DNA, 273 bp, Artificial Sequence
  derived and/or modified sequence
atgcagctgttcctgctgctgtgcctggtgctgctgagcccccagggcgccagcctgcacagacaccaccccagagagatgaagaagagagtggaggacctgcacgtgggcgccaccgtggcccccagcagcagaagagacttcaccttcgacctgtacagagccctggccagcgccgcccccagccagagcatcttcttcagccccgtgagcatcagcatgagcctggccatgctgagcctgggcgccggcagcagcaccaagatgcagtag

SEQ ID NO: 13881 - DNA, 519 bp, Artificial Sequence
  derived and/or modified sequence
atgcagctgttcctgctgctgtgcctggtgctgctgagcccccagggcgccagcctgcacagacaccaccccagagagatgaagaagagagtggaggacctgcacgtgggcgccaccgtggcccccagcagcagaagagacttcaccttcgacctgtacagagccctggccagcgccgcccccagccagagcatcttcttcagccccgtgagcatcagcatgagcctggccatgctgagcctgggcgccggcagcagcaccaagatgcagatcctggagggcctgggcctgaacctgcagaagagcagcgagaaggagctgcacagaggcttccagcagctgctgcaggagctgaaccagcccagagacggcttccagctgagcctgggcaacgccctgttcaccgacctggtggtggacctgcaggacaccttcgtgagcgccatgaagaccctgtacctggccgacaccttccccaccaacttcagagacagcgccggcgccatgaagcagatctag

SEQ ID NO: 13882 - DNA, 261 bp, Artificial Sequence
  derived and/or modified sequence
atgcagctgttcctgctgctgtgcctggtgctgctgagcccccagggcgccagcctgcacagacaccaccccagagagatgaagaagagagtggaggacctgcacgtgggcgccaccgtggcccccagcagcagaagagacttcaccttcgacctgtacagagccctggccagcgccgcccccagccagagcatcttcttcagccccgtgagcatcagcatgagcctggccatgctgagcctgggcgccggcagcagctag

SEQ ID NO: 13883 - DNA, 906 bp, Artificial Sequence
  derived and/or modified sequence
atgcagctgttcctgctgctgtgcctggtgctgctgagcccccagggcgccagcctgcacagacaccaccccagagagatgaagaagagagtggaggacctgcacgtgggcgccaccgtggcccccagcagcagaagagacttcaccttcgacctgtacagagccctggccagcgccgcccccagccagagcatcttcttcagccccgtgagcatcagcatgagcctggccatgctgagcctgggcgccggcagcagcaccaagatgcagatcctggagggcctgggcctgaacctgcagaagagcagcgagaaggagctgcacagaggcttccagcagctgctgcaggagctgaaccagcccagagacggcttccagctgagcctgggcaacgccctgttcaccgacctggtggtggacctgcaggacaccttcgtgagcgccatgaagaccctgtacctggccgacaccttccccaccaacttcagagacagcgccggcgccatgaagcagatcaacgactacgtggccaagcagaccaagggcaagatcgtggacctgctgaagaacctggacagcaacgccgtggtgatcatggtgaactacatcttcttcaaggccaagtgggagaccagcttcaaccacaagggcacccaggagcaggacttctacgtgaccagcgagaccgtggtgagagtgcccatgatgagcagagaggaccagtaccactacctgctggacagaaacctgagctgcagagtggtgggcgtgccctaccagggcaacgccaccgccctgttcatcctgcccagcgagggcaagatgcagcaggtggagaacggcctgagcgagaagaccctgagaaagtggctgaagatgttcaagaagagatacttccagacctag

SEQ ID NO: 13884 - DNA, 435 bp, Artificial Sequence
  derived and/or modified sequence
atgcagctgttcctgctgctgtgcctggtgctgctgagcccccagggcgccagcctgcacagacaccaccccagagagatgaagaagagagtggaggacctgcacgtgggcgccaccgtggcccccagcagcagaagagacttcaccttcgacctgtacagagccctggccagcgccgcccccagccagagcatcttcttcagccccgtgagcatcagcatgagcctggccatgctgagcctgggcgccggcagcagcaccaagatgcagatcctggagggcctgggcctgaacctgcagaagagcagcgagaaggagctgcacagaggcttccagcagctgctgcaggagctgaaccagcccagagacggcttccagctgagcctgggcaacgccctgttcaccgacctggtggtggacctgcaggacacctag

SEQ ID NO: 13885 - DNA, 75 bp, Artificial Sequence
  derived and/or modified sequence
atgcagctgttcctgctgctgtgcctggtgctgctgagcccccagggcgccagcctgcacagacaccacccctag

SEQ ID NO: 13886 - DNA, 696 bp, Artificial Sequence
  derived and/or modified sequence
atgcagctgttcctgctgctgtgcctggtgctgctgagcccccagggcgccagcctgcacagacaccaccccagagagatgaagaagagagtggaggacctgcacgtgggcgccaccgtggcccccagcagcagaagagacttcaccttcgacctgtacagagccctggccagcgccgcccccagccagagcatcttcttcagccccgtgagcatcagcatgagcctggccatgctgagcctgggcgccggcagcagcaccaagatgcagatcctggagggcctgggcctgaacctgcagaagagcagcgagaaggagctgcacagaggcttccagcagctgctgcaggagctgaaccagcccagagacggcttccagctgagcctgggcaacgccctgttcaccgacctggtggtggacctgcaggacaccttcgtgagcgccatgaagaccctgtacctggccgacaccttccccaccaacttcagagacagcgccggcgccatgaagcagatcaacgactacgtggccaagcagaccaagggcaagatcgtggacctgctgaagaacctggacagcaacgccgtggtgatcatggtgaactacatcttcttcaaggccaagtgggagaccagcttcaaccacaagggcacccaggagcaggacttctacgtgaccagcgagaccgtggtgtag

SEQ ID NO: 13887 - DNA, 474 bp, Artificial Sequence
  derived and/or modified sequence
atgcagctgttcctgctgctgtgcctggtgctgctgagcccccagggcgccagcctgcacagacaccaccccagagagatgaagaagagagtggaggacctgcacgtgggcgccaccgtggcccccagcagcagaagagacttcaccttcgacctgtacagagccctggccagcgccgcccccagccagagcatcttcttcagccccgtgagcatcagcatgagcctggccatgctgagcctgggcgccggcagcagcaccaagatgcagatcctggagggcctgggcctgaacctgcagaagagcagcgagaaggagctgcacagaggcttccagcagctgctgcaggagctgaaccagcccagagacggcttccagctgagcctgggcaacgccctgttcaccgacctggtggtggacctgcaggacaccttcgtgagcgccatgaagaccctgtacctggccgacacctag

SEQ ID NO: 13888 - DNA, 1221 bp, Artificial Sequence
  derived and/or modified sequence
atgcagctgttcctcctgctttgtttagtgctgttaagcccacagggagcctctctgcacaggcaccatccccgagaaatgaaaaaacgtgtggaggatctgcatgtgggtgctacagtggcccccagcagcagaagagactttacattcgatctctatagggccctagcctctgccgccccgtctcagtccatcttcttctctccggtttccatttccatgtccctggccatgctgtctctgggagcagggtctagcaccaagatgcagatactggagggcctgggcctgaatctccagaagagtagtgagaaagagctacacaggggtttccaacaactgcttcaggaactcaaccagcccagagatggttttcagctgtctttgggcaatgccctttttacagacttagttgtcgacctgcaggatacgttcgtttcggcgatgaagacgctgtacctcgctgatacctttccaactaatttccgcgactcagcaggagccatgaaacagattaacgactatgttgcaaaacaaactaagggaaaaatcgtggacctcttgaaaaacttagactcgaacgcggtggtgatcatggtaaactacatattcttcaaagccaagtgggagacaagcttcaaccataagggtactcaggagcaagacttctacgttacctccgagaccgtggtccgggtacctatgatgtctagggaagatcaataccactatctactggacagaaacctctcctgtcgggttgtgggggtgccctatcagggcaatgccacagcactattcattctaccttcggaaggcaagatgcagcaggtggaaaatggactgtcggagaagacgttgcgcaagtggctgaaaatgtttaagaaacgacaactcgagttgtatttgccaaagttttctattgagggctcttaccagcttgagaaggtcctgccctcactcgggatctcaaatgtctttaccagtcatgctgacctcagcgggatctcgaaccacagtaacattcaagtatccgagatggtgcataaggcagtcgttgaggtagatgaatctggaactcgcgcagccgcagcaacgggtactattttcacgtttcgctccgctaggttgaattcacagcgactcgtgtttaatcgacctttcctgatgttcatcgtggacaataacatactcttcctcggaaaagtaaacagaccatag

SEQ ID NO: 13889 - DNA, 993 bp, Artificial Sequence
  derived and/or modified sequence
atgcagctgtttctcttgctgtgccttgtcttgctgtccccacagggggccagcctccaccgtcaccaccccagagagatgaaaaagcgagtagaggacctccacgttggggcaaccgtggccccgtccagccgaagagactttacttttgatctgctaggcaatgctctgttcacggatctagttgtggacttacaggatacgtttgtctctgccatgaaaaccttgtacctggcagatactttccctacaaatttcagggatagcgcaggcgcaatgaaacagataaacgactacgtagcgaaacagacgaaggggaaaatagtggacctcctgaagaatttagactctaatgcggttgtcatcatggtgaactatatcttttttaaagctaaatgggaaactagcttcaaccacaagggtacccaggagcaagatttctatgttacgagcgagacagtggtccgcgttcctatgatgtctagagaggatcagtaccactacttactggataggaacttgtcatgcagagttgttggcgtgccataccaggggaatgctactgccctctttattctcccctccgagggaaaaatgcaacaagtggagaacggcctttccgagaagacactaaggaagtggcttaagatgtttaaaaaacgtcagctggaactttacctgcctaaatttagcatagagggatcctaccagctggagaaggtgctaccctcgttaggtattagcaacgtcttcacctcacacgccgatttgtccggcatctctaaccactctaatattcaggttagcgaaatggtccacaaagctgttgttgaggttgatgagtctgggacacgcgccgccgcagcaaccggaacgattttcaccttcaggagtgctcgactgaatagtcagcggctggtctttaataggccgtttctgatgtttattgtcgataataacatcctgtttttggggaaggttaatcggccctag

SEQ ID NO: 13890 - DNA, 777 bp, Artificial Sequence
  derived and/or modified sequence
atgaagaccttgtacctagctgacacgttccccacaaatttcagggattctgcgggcgccatgaagcagatcaatgactacgtggcaaaacaaactaagggcaagatcgttgacctgttgaagaacctggatagtaacgccgtagtaatcatggtaaactacatcttcttcaaggccaagtgggagacctcctttaatcataagggcacgcaggaacaggacttctacgtgacgtcggaaacggttgtgcgggtacccatgatgagtcgggaggaccaataccactatttactggatcgcaatctctcatgccgggtagtcggcgtgccatatcagggcaatgccaccgccctgttcatcttgccctcagaggggaaaatgcaacaggtggaaaacgggctgagcgaaaaaacgctgcgcaaatggctcaaaatgtttaaaaagcgccagctcgaattatatctccccaagttcagcattgagggaagctaccaactggagaaggtgctcccttccctcggcattagcaatgtgtttacaagtcatgccgatctgagcggcataagcaatcactccaacattcaagtcagcgagatggtgcacaaagcggtggtggaagtcgacgagtcagggactagagccgcagccgccactggaacaatcttcacattcaggagtgcaagactcaattcccagaggttggtttttaatagaccttttttgatgtttattgtcgacaataacattctctttttggggaaggtcaaccggccatag

SEQ ID NO: 13891 - DNA, 273 bp, Artificial Sequence
  derived and/or modified sequence
atgcagttgttcctacttctgtgcttggttctgttgtctccgcagggggcttcattacacaggcaccatccaagggagatgaagaaaagagtggaagacttgcacgtgggggctacagtggcaccatcttctcgaagggattttacgttcgacctgtacagagctctggcatcagccgccccttcccaaagtatatttttttcccccgtatcaatttcaatgtctctggcaatgctgtctctgggtgctggctctagcacaaagatgcaatag

SEQ ID NO: 13892 - DNA, 1221 bp, Artificial Sequence
  derived and/or modified sequence
atgcagctcttccttttgctgtgcctcgttctcctgagcccccagggtgccagcttgcatcgccatcacccacgggaaatgaagaagcgagtggaagacctgcacgtgggtgctacagtggccccgtcaagccgacgtgattttactttcgatctgtaccgagcacttgcaagcgctgcaccatcgcagtcgattttcttcagccccgtgagcattagtatgagcctggctatgctgtctctgggtgctggttcttccacaaaaatgcaaatccttgaaggtctgggcttaaatttgcagaaaagtagtgaaaaagagctgcaccggggctttcagcagctattgcaggaactcaatcagcctcgcgatggctttcagctctcactgggcaacgccctgtttaccgacctggtggtagatctgcaggacaccttcgtatcagccatgaaaaccctttatctggccgacaccttcccaacaaactttcgtgactccgctggggccatgaagcagatcaatgattatgtggctaaacagacaaaagggaagattgtggatctgctgaagaaccttgacagtaacgccgtggtgatcatggtcaactatattttctttaaggcgaagtgggagactagcttcaaccataaaggcacccaagagcaggatttttatgtgactagcgagacagtggtcagggtacccatgatgagcagagaggatcagtaccactacctattggacagaaatctgagctgtcgggtagtgggcgtgccatatcaaggtaatgctacagccctcttcatcctgccgtcagagggcaaaatgcaacaggtggagaacggactgtctgagaaaacactgagaaagtggttgaagatgttcaagaagcggcagcttgagctttacttgcctaagttctcaatcgagggatcttaccaattggaaaaggttctcccctctctaggaatcagcaacgtgtttacttcccacgccgatttgagtgggataagcaaccacagtaacatccaagtctcagaaatggttcataaggccgtcgtggaggtggatgagagcggaactcgcgctgccgcagctacaggcactatcttcaccttccggagcgcccgccttaatagccagcgcttggtcttcaacaggccctttttaatgttcattgtagacaacaacattctatttcttggaaaagtcaataggccatag

SEQ ID NO: 13893 - DNA, 519 bp, Artificial Sequence
  derived and/or modified sequence
atgcagctctttttgctgctctgtctagtccttctgtcaccccaaggagcttctcttcatcgtcatcatcctcgcgaaatgaaaaaaagagtggaagacctgcatgtaggcgccactgtggccccctctagtcgtcgggattttacttttgatttatatagggccctggccagcgccgctcctagccagagcatcttcttttcgcccgtgtcaatatccatgtccctggcaatgctatccctgggcgcagggagctctacaaagatgcagatcttggaaggactggggctaaacttgcagaagtcgtcagagaaagagctccatagagggttccagcaattgctccaagagcttaaccagccgcgtgatggctttcagctaagcctcggcaacgccttgtttactgacttggtggtggatctgcaggacaccttcgtgagcgcgatgaagaccttataccttgcggatacctttccaacaaacttccgcgacagtgccggagcaatgaaacaaatatag

SEQ ID NO: 13894 - DNA, 1221 bp, Artificial Sequence
  derived and/or modified sequence
atgcagctgtttctgctcttatgtctggtactgctgtcgccccaaggcgcttctctccatagacaccatccccgggaaatgaagaaacgcgtcgaagacctccacgttggggccacagttgcaccttcatcgcggagggatttcactttcgatctctaccgggctcttgcaagtgctgctcccagccagtctatttttttctcccccgtgtccataagcatgtctcttgcaatgttatctctgggcgccggcagttccacgaagatgcagatactggaaggactggggctaaatctgcaaaagtcgtccgaaaaggagctacaccgcggatttcaacagttgttacaggagctgaatcaaccgcgagatggctttcagcttagcctaggaaatgccctgttcaccgatctggtagtggacttgcaggacacatttgtgagcgccatgaagactctttaccttgctgacacttttcctactaatttccgggattcagctggggccatgaaacaaattaatgattatgtggccaaacagactaaaggcaagattgtggaccttctgaaaaatctagactcaaacgcagtagtcattatggtcaactatatcttctttaaggcaaagtgggagacctcctttaaccacaaggggacccaagagcaggatttttacgtcacctccgagaccgtggtgcgggtaccgatgatgagccgtgaggaccagtaccactacctgctggacagaaacctgtcatgtagggtggtgggagtgccttaccaagggaacgctacagcactgtttattctgcccagtgaagggaagatgcagcaggtggaaaacggattgtccgagaagactctccgcaagtggctcaagatgttcaaaaagagacagctcgaactgtacctgcccaagttcagtatagaaggctcttaccagctggaaaaggtgcttcccagcctgggaatttccaatgtctttacatcccatgctgatctctctggcatcagcaatcacagtaatattcaggtctcagaaatggtacataaggccgttgtggaagtggacgagtctgggacgcgtgccgccgccgctactggtactatattcacctttaggagcgcccgattaaacagccagcggctagtcttcaacagacctttcctgatgttcattgtcgataacaatatcctctttctaggtaaagttaacagaccttag

SEQ ID NO: 13895 - DNA, 261 bp, Artificial Sequence
  derived and/or modified sequence
atgcaacttttcctgctcctgtgcctggtcttactgtcacctcagggagcctccctgcacaggcaccacccacgcgaaatgaagaagagggtggaggatctccacgtgggggccaccgtagctccaagtagccggagagatttcacttttgacctgtacagggcccttgcatcagcggcaccctcacagtcaattttttttagtcccgtgagcataagtatgtccctagccatgctgagccttggggccgggagctcttag

SEQ ID NO: 13896 - DNA, 906 bp, Artificial Sequence
  derived and/or modified sequence
atgcagctgtttcttctgctgtgcctggtactgttgtcccctcagggcgctagcctgcataggcatcaccctagagagatgaagaagcgcgttgaggacctgcacgtaggggcaacagttgcgcccagttctcggagggatttcacttttgacttatatcgcgctctcgcttccgcagccccatcccagtctatcttctttagccccgtctcaattagcatgtcactggccatgctctcgctgggcgcaggaagtagcaccaagatgcagatcttagaaggactgggcttgaatctgcaaaagtcttctgagaaggagttacatcgcggctttcagcagctgctgcaggagctgaaccagccccgcgatggctttcaattatccctggggaatgcactgttcaccgacctggtggtggatctgcaagatactttcgttagtgcaatgaaaacgttatatctggctgacacttttcccactaattttagggattcagcaggggccatgaaacaaatcaacgactacgtagccaaacaaaccaaggggaaaatcgtggacttgcttaaaaatctggactccaatgccgtggtgatcatggtgaactacatcttcttcaaggccaaatgggagacaagtttcaatcacaaaggcactcaggaacaggatttctacgtgacaagcgaaacggtagtgagagtgcctatgatgtctcgggaggaccagtatcactacttgctggatcgcaacctaagctgcagagtcgtcggggtgccataccagggtaatgccaccgcactgtttatcctgcctagcgaaggtaaaatgcagcaggttgagaatggcctgtccgagaagaccttgcgtaagtggctgaagatgttcaaaaagcgatactttcagacttag

SEQ ID NO: 13897 - DNA, 1221 bp, Artificial Sequence
  derived and/or modified sequence
atgcaactgttccttcttctatgcctggtgctccttagtccccagggtgccagtttgcaccgccatcatcctagggagatgaagaagcgcgtggaagacttgcatgtgggcgctacagtcgctcctagctccagacgggattttacattcgacttatacagggctcttgcatctgcagctccaagccagtcaatctttttcagccccgtctccattagtatgagccttgcaatgctttccctgggtgccggttctagtacaaagatgcagattcttgagggactcggcctgaacctccagaaaagctccgagaaggagctccaccgggggttccagcaactacttcaggagcttaatcagccgcgagatggatttcaactctcactgggcaacgctttatttaccgacctcgtcgttgacttgcaggacacttttgtgagcgcaatgaagactctgtaccttgctgatacattcccaaccaatttcagagacagtgccggggccatgaaacaaattaatgattatgtggccaaacagacaaaaggcaaaatcgtcgacctgctgaaaaatttagactccaatgctgtcgtgatcatggtaaattatatattcttcaaagccaaatgggaaaccagcttcaaccataaagggacccaggagcaggacttctacgtgacgagtgagactgttgtcagagtgccaatgatgtctcgcgaggatcagtaccattacctgctggaccgaaatctctcctgccgggttgtgggtgtaccctatcaaggaaatgccacagccctgttcatcttgccaagcgaggggaagatgcaacaggttgagaacggactgtctgagaagacgctgcggaaatggttaaagatgttcaagaaacggcaactggagttgtatctgccaaaattctctatagagggcagctatcaacttgagaaggtcctgccaagtctcggcatctctaacgtcttcacctcccatgctgaccttagtggaatatcaaaccacagtaacatccaagtgtcagagatggttcacaaagcagtcgtggaggtcgatgaaagtggcactagagcagccgccgcaacaggcacaatctttacatttcgcagcgctagattgaactcacagcgtctggtatttaacaggcctttccttatgtttatcgtggataacaatattctgttcctggggaaagtcaaccgtccatag

SEQ ID NO: 13898 - DNA, 435 bp, Artificial Sequence
  derived and/or modified sequence
atgcagctgttccttttgctatgtttagtactcctctcgccccagggagcttctctccacagacatcacccgcgcgagatgaaaaagcgagtcgaggatctgcacgtgggggccacagtggctccatcttcacggcgcgattttacattcgacctgtaccgagccctggccagtgcagcccctagtcagagtatattcttttcacctgtgtcaatcagcatgtcactagccatgttgagtctgggggcagggagcagcaccaagatgcagatactggaggggttgggcctcaatctccagaagtctagtgagaaggagttgcatcggggttttcagcagttgcttcaggagctgaaccagccccgggacgggtttcaactttccctagggaacgccctgttcaccgacctcgtggtggatcttcaagacacttag

SEQ ID NO: 13899 - DNA, 75 bp, Artificial Sequence
  derived and/or modified sequence
atgcagctctttctgttattatgtcttgtcctgctaagtccccagggcgcctccctgcaccgtcaccatccctag

SEQ ID NO: 13900 - DNA, 696 bp, Artificial Sequence
  derived and/or modified sequence
atgcaactctttctgctactttgtctggtcctgttgtcccctcagggggccagtctacatcgccatcacccacgcgaaatgaagaagcgcgttgaggacttgcacgtgggcgctactgtcgctccgagttcaaggcgtgatttcaccttcgatctgtaccgggccttggcttctgccgcccccagccagagcatcttttttagtcccgtctctataagcatgtccctcgccatgctttctttgggcgctgggtcctccaccaagatgcagatccttgaagggctaggcctaaatctgcagaagtcatctgagaaggagctccatcgcggatttcagcaattacttcaggaactgaaccagccccgggatggatttcagctctcactcgggaacgcattgttcacagacctggtcgtggacttgcaggatacattcgtgagcgcgatgaagactctttatcttgcagacacttttccgaccaatttcagggattccgccggtgcaatgaaacagattaacgattacgtggccaaacaaacgaaggggaagatcgtggacctgctaaagaatctggacagcaacgccgtggttattatggtcaactacatattttttaaggctaaatgggaaactagcttcaaccacaagggcacccaggagcaagacttttacgtgactagcgagaccgttgtgtag

SEQ ID NO: 13901 - DNA, 474 bp, Artificial Sequence
  derived and/or modified sequence
atgcagctttttctacttctctgccttgtacttctcagcccccagggggcgtccttgcatcgacaccacccgcgcgagatgaagaaacgtgtggaagacctacatgtgggcgcaactgttgccccttcctcaaggcgtgattttacattcgatctgtacagagcgctagccagcgctgcgcctagccagtcaatttttttttctccggtgtccatctcaatgtccctggccatgttaagcttaggcgccgggagttctacgaaaatgcaaatcctggagggtctcgggctaaatttgcaaaagagttccgagaaagaactccacagggggtttcagcagctgctgcaagagctaaatcaaccacgggatggtttccagctctcacttgggaatgcactcttcaccgacctggttgtggatctccaggataccttcgtttctgcaatgaagaccctttacctggccgacacttag

SEQ ID NO: 13902 - DNA, 1221 bp, Artificial Sequence
  derived and/or modified sequence
atgcagctgttcctgctgctgtgcctggtgctgctgagcccccagggcgccagcctgcaccgccaccacccccgggagatgaagaagagggtggaggacctgcacgtgggcgccaccgtggcccccagcagcagaagagacttcacctttgacctgtaccgggccctggccagcgctgcccccagccagagcatcttcttcagccctgtgtccatctccatgagcctggccatgctgagcctgggcgccggcagcagcaccaagatgcagatcctggagggcctgggcctgaacctgcagaagagcagcgagaaggagctgcaccggggcttccagcagctgctgcaggagctgaaccagcccagagatggcttccagctgagcctgggcaatgccctcttcacagacctggtggtggacctgcaggacacctttgtgtctgccatgaagaccctgtacctggccgacaccttccccaccaacttccgggacagcgctggggccatgaagcagatcaatgactatgtggccaagcagaccaagggcaagatcgtggacctgctgaagaacctggacagcaatgctgtggtgatcatggtgaactacatcttcttcaaggccaagtgggagaccagcttcaaccacaagggcacccaggagcaggacttctacgtgaccagcgagaccgtggtgcgggtgcccatgatgagccgggaggaccagtaccactacctgctggacaggaacctgagctgccgggtggtgggcgtgccctaccagggcaatgccacagccctcttcatcctgcccagcgagggcaagatgcagcaggtggagaatggcctgtctgagaagaccctgaggaagtggctgaagatgttcaagaagaggcagctggagctgtacctgcccaagttcagcattgagggcagctaccagctggagaaggtgctgcccagcctgggcatcagcaatgtgttcaccagccatgctgacctgagcggcatcagcaaccacagcaacatccaggtgtctgagatggtgcacaaggctgtggtggaggtggatgagagcggcaccagggctgctgctgccaccggcaccatcttcaccttccgcagcgcccggctgaacagccagaggctggtgttcaaccggcccttcctgatgttcatcgtggacaacaacatcctcttcctgggcaaggtgaaccggccctag

SEQ ID NO: 13903 - DNA, 993 bp, Artificial Sequence
  derived and/or modified sequence
atgcagctgttcctgctgctgtgcctggtgctgctgagcccccagggcgccagcctgcaccgccaccacccccgggagatgaagaagagggtggaggacctgcacgtgggcgccaccgtggcccccagcagcagaagagacttcacctttgacctgctgggcaatgccctcttcacagacctggtggtggacctgcaggacacctttgtgtctgccatgaagaccctgtacctggccgacaccttccccaccaacttccgggacagcgctggggccatgaagcagatcaatgactatgtggccaagcagaccaagggcaagatcgtggacctgctgaagaacctggacagcaatgctgtggtgatcatggtgaactacatcttcttcaaggccaagtgggagaccagcttcaaccacaagggcacccaggagcaggacttctacgtgaccagcgagaccgtggtgcgggtgcccatgatgagccgggaggaccagtaccactacctgctggacaggaacctgagctgccgggtggtgggcgtgccctaccagggcaatgccacagccctcttcatcctgcccagcgagggcaagatgcagcaggtggagaatggcctgtctgagaagaccctgaggaagtggctgaagatgttcaagaagaggcagctggagctgtacctgcccaagttcagcattgagggcagctaccagctggagaaggtgctgcccagcctgggcatcagcaatgtgttcaccagccatgctgacctgagcggcatcagcaaccacagcaacatccaggtgtctgagatggtgcacaaggctgtggtggaggtggatgagagcggcaccagggctgctgctgccaccggcaccatcttcaccttccgcagcgcccggctgaacagccagaggctggtgttcaaccggcccttcctgatgttcatcgtggacaacaacatcctcttcctgggcaaggtgaaccggccctag

SEQ ID NO: 13904 - DNA, 777 bp, Artificial Sequence
  derived and/or modified sequence
atgaagaccctgtacctggccgacaccttccccaccaacttccgggacagcgctggggccatgaagcagatcaatgactatgtggccaagcagaccaagggcaagatcgtggacctgctgaagaacctggacagcaatgctgtggtgatcatggtgaactacatcttcttcaaggccaagtgggagaccagcttcaaccacaagggcacccaggagcaggacttctacgtgaccagcgagaccgtggtgcgggtgcccatgatgagccgggaggaccagtaccactacctgctggacaggaacctgagctgccgggtggtgggcgtgccctaccagggcaatgccacagccctcttcatcctgcccagcgagggcaagatgcagcaggtggagaatggcctgtctgagaagaccctgaggaagtggctgaagatgttcaagaagaggcagctggagctgtacctgcccaagttcagcattgagggcagctaccagctggagaaggtgctgcccagcctgggcatcagcaatgtgttcaccagccatgctgacctgagcggcatcagcaaccacagcaacatccaggtgtctgagatggtgcacaaggctgtggtggaggtggatgagagcggcaccagggctgctgctgccaccggcaccatcttcaccttccgcagcgcccggctgaacagccagaggctggtgttcaaccggcccttcctgatgttcatcgtggacaacaacatcctcttcctgggcaaggtgaaccggccctag

SEQ ID NO: 13905 - DNA, 273 bp, Artificial Sequence
  derived and/or modified sequence
atgcagctgttcctgctgctgtgcctggtgctgctgagcccccagggcgccagcctgcaccgccaccacccccgggagatgaagaagagggtggaggacctgcacgtgggcgccaccgtggcccccagcagcagaagagacttcacctttgacctgtaccgggccctggccagcgctgcccccagccagagcatcttcttcagccctgtgtccatctccatgagcctggccatgctgagcctgggcgccggcagcagcaccaagatgcagtag

SEQ ID NO: 13906 - DNA, 519 bp, Artificial Sequence
  derived and/or modified sequence
atgcagctgttcctgctgctgtgcctggtgctgctgagcccccagggcgccagcctgcaccgccaccacccccgggagatgaagaagagggtggaggacctgcacgtgggcgccaccgtggcccccagcagcagaagagacttcacctttgacctgtaccgggccctggccagcgctgcccccagccagagcatcttcttcagccctgtgtccatctccatgagcctggccatgctgagcctgggcgccggcagcagcaccaagatgcagatcctggagggcctgggcctgaacctgcagaagagcagcgagaaggagctgcaccggggcttccagcagctgctgcaggagctgaaccagcccagagatggcttccagctgagcctgggcaatgccctcttcacagacctggtggtggacctgcaggacacctttgtgtctgccatgaagaccctgtacctggccgacaccttccccaccaacttccgggacagcgctggggccatgaagcagatctag

SEQ ID NO: 13907 - DNA, 261 bp, Artificial Sequence
  derived and/or modified sequence
atgcagctgttcctgctgctgtgcctggtgctgctgagcccccagggcgccagcctgcaccgccaccacccccgggagatgaagaagagggtggaggacctgcacgtgggcgccaccgtggcccccagcagcagaagagacttcacctttgacctgtaccgggccctggccagcgctgcccccagccagagcatcttcttcagccctgtgtccatctccatgagcctggccatgctgagcctgggcgccggcagcagctag

SEQ ID NO: 13908 - DNA, 906 bp, Artificial Sequence
  derived and/or modified sequence
atgcagctgttcctgctgctgtgcctggtgctgctgagcccccagggcgccagcctgcaccgccaccacccccgggagatgaagaagagggtggaggacctgcacgtgggcgccaccgtggcccccagcagcagaagagacttcacctttgacctgtaccgggccctggccagcgctgcccccagccagagcatcttcttcagccctgtgtccatctccatgagcctggccatgctgagcctgggcgccggcagcagcaccaagatgcagatcctggagggcctgggcctgaacctgcagaagagcagcgagaaggagctgcaccggggcttccagcagctgctgcaggagctgaaccagcccagagatggcttccagctgagcctgggcaatgccctcttcacagacctggtggtggacctgcaggacacctttgtgtctgccatgaagaccctgtacctggccgacaccttccccaccaacttccgggacagcgctggggccatgaagcagatcaatgactatgtggccaagcagaccaagggcaagatcgtggacctgctgaagaacctggacagcaatgctgtggtgatcatggtgaactacatcttcttcaaggccaagtgggagaccagcttcaaccacaagggcacccaggagcaggacttctacgtgaccagcgagaccgtggtgcgggtgcccatgatgagccgggaggaccagtaccactacctgctggacaggaacctgagctgccgggtggtgggcgtgccctaccagggcaatgccacagccctcttcatcctgcccagcgagggcaagatgcagcaggtggagaatggcctgtctgagaagaccctgaggaagtggctgaagatgttcaagaagcgctacttccagacctag

SEQ ID NO: 13909 - DNA, 435 bp, Artificial Sequence
  derived and/or modified sequence
atgcagctgttcctgctgctgtgcctggtgctgctgagcccccagggcgccagcctgcaccgccaccacccccgggagatgaagaagagggtggaggacctgcacgtgggcgccaccgtggcccccagcagcagaagagacttcacctttgacctgtaccgggccctggccagcgctgcccccagccagagcatcttcttcagccctgtgtccatctccatgagcctggccatgctgagcctgggcgccggcagcagcaccaagatgcagatcctggagggcctgggcctgaacctgcagaagagcagcgagaaggagctgcaccggggcttccagcagctgctgcaggagctgaaccagcccagagatggcttccagctgagcctgggcaatgccctcttcacagacctggtggtggacctgcaggacacctag

SEQ ID NO: 13910 - DNA, 75 bp, Artificial Sequence
  derived and/or modified sequence
atgcagctgttcctgctgctgtgcctggtgctgctgagcccccagggcgccagcctgcaccgccaccacccctag

SEQ ID NO: 13911 - DNA, 696 bp, Artificial Sequence
  derived and/or modified sequence
atgcagctgttcctgctgctgtgcctggtgctgctgagcccccagggcgccagcctgcaccgccaccacccccgggagatgaagaagagggtggaggacctgcacgtgggcgccaccgtggcccccagcagcagaagagacttcacctttgacctgtaccgggccctggccagcgctgcccccagccagagcatcttcttcagccctgtgtccatctccatgagcctggccatgctgagcctgggcgccggcagcagcaccaagatgcagatcctggagggcctgggcctgaacctgcagaagagcagcgagaaggagctgcaccggggcttccagcagctgctgcaggagctgaaccagcccagagatggcttccagctgagcctgggcaatgccctcttcacagacctggtggtggacctgcaggacacctttgtgtctgccatgaagaccctgtacctggccgacaccttccccaccaacttccgggacagcgctggggccatgaagcagatcaatgactatgtggccaagcagaccaagggcaagatcgtggacctgctgaagaacctggacagcaatgctgtggtgatcatggtgaactacatcttcttcaaggccaagtgggagaccagcttcaaccacaagggcacccaggagcaggacttctacgtgaccagcgagaccgtggtgtag

SEQ ID NO: 13912 - DNA, 474 bp, Artificial Sequence
  derived and/or modified sequence
atgcagctgttcctgctgctgtgcctggtgctgctgagcccccagggcgccagcctgcaccgccaccacccccgggagatgaagaagagggtggaggacctgcacgtgggcgccaccgtggcccccagcagcagaagagacttcacctttgacctgtaccgggccctggccagcgctgcccccagccagagcatcttcttcagccctgtgtccatctccatgagcctggccatgctgagcctgggcgccggcagcagcaccaagatgcagatcctggagggcctgggcctgaacctgcagaagagcagcgagaaggagctgcaccggggcttccagcagctgctgcaggagctgaaccagcccagagatggcttccagctgagcctgggcaatgccctcttcacagacctggtggtggacctgcaggacacctttgtgtctgccatgaagaccctgtacctggccgacacctag

SEQ ID NO: 13913 - DNA, 1221 bp, Artificial Sequence
  derived and/or modified sequence
atgcagctgttcctgctgctgtgcctggtgctgctgagcccccagggggcttctctgcatcgccaccacccccgtgagatgaagaagcgcgttgaggatttacatgttggcgctacagtggctccatcctcgaggcgggattttacattcgacctttatcgggctctggcgagcgcagccccttctcagagcatatttttttctcccgtgtctatctctatgagcctggcaatgctgtctttgggcgccggtagctccacaaaaatgcagatccttgagggacttggactcaacctgcagaagagctctgagaaggaactccatcggggattccagcagctgctgcaggagttaaatcagccccgtgatggcttccagttgtcgctaggtaatgcactgttcacagatctggtggtggacctccaagacacatttgtgtcagccatgaaaactctgtacctcgccgacacattccccactaacttcagggacagtgcaggtgcgatgaagcagattaatgattatgtggcaaagcagactaagggcaaaatcgtcgacctcctgaagaacttggacagcaatgccgtcgtaattatggtcaattatatattctttaaggccaagtgggagacatcgtttaatcacaaagggactcaggaacaggatttttacgtgacgagtgaaaccgtggtccgagtgccaatgatgtcgcgagaagatcagtaccactacctgctcgacaggaacctctcttgtagagtggtgggcgtgccatatcagggaaacgcgaccgctctctttatcttgcctagcgagggaaaaatgcagcaggtggaaaatggcctgtccgaaaagacgctgcgcaagtggttgaaaatgtttaaaaagagacagcttgagctgtatctgcctaaattcagcatcgaggggtcttaccagctggaaaaggtgctaccgtcacttgggattagtaatgtgtttaccagtcatgccgacctttcaggaattagcaatcacagcaacatacaggtgtctgagatggttcataaagccgtggttgaggttgatgaatctggcaccagagccgcagccgcgacgggcacaatttttaccttcagaagtgctaggctgaatagtcaacgtttagtgttcaacagaccctttctgatgttcatcgtggataacaacatcctgttccttggcaaagtaaatcgtccctag

SEQ ID NO: 13914 - DNA, 993 bp, Artificial Sequence
  derived and/or modified sequence
atgcagctgttcctgctgctgtgcctggtgctgctgagcccccagggggcttctctgcatagacaccacccccgcgagatgaagaaaagagtggaagacctacacgtcggcgcgactgttgctccctcaagccggcgcgattttaccttcgatctgctgggaaacgcactgtttactgatcttgttgtggatttacaggacacttttgtgtccgctatgaaaacactgtatctggccgacacattccctactaattttcgagattccgcaggagctatgaaacaaatcaatgactacgtggctaaacagacaaaagggaagattgtggacctcctcaagaatctcgatagcaacgccgttgtcatcatggttaattacattttttttaaagcaaaatgggaaaccagctttaaccacaaagggacccaggagcaggatttttatgtcacgagcgagacagtcgtcagagtgcccatgatgtccagagaggatcagtatcattatctgctagacagaaacctcagctgtcgcgtcgtgggcgtgccctaccagggcaatgcaaccgccctcttcatcctgccaagcgaaggaaagatgcaacaagtcgagaatggtctgagcgaaaagacactccggaagtggcttaaaatgtttaaaaagcggcagctagagctataccttccaaaattcagcatagagggaagctaccagcttgagaaagtactcccgtctctggggatcagcaacgtgttcaccagccatgccgacctatcaggtatctccaaccactctaacatccaggtcagcgagatggttcacaaggccgtggtggaggttgatgagtccggcacccgcgcggccgccgctactggcaccatctttaccttcagatccgctcggctcaacagccagagactggtcttcaacagaccattcttgatgttcattgttgataataatattctctttctggggaaagttaatcggccatag

SEQ ID NO: 13915 - DNA, 777 bp, Artificial Sequence
  derived and/or modified sequence
atgaagaccctgtacctggccgacaccttccccaccaacttccgggacagcgctggagccatgaagcagataaacgattacgtggccaagcagaccaagggcaagattgttgatctgttaaagaacctggatagcaacgccgtagtgataatggtgaattatatatttttcaaggctaaatgggagacttctttcaaccataagggcacccaggagcaggacttctacgtcacatctgaaactgttgttagagtccccatgatgagcagggaggatcaataccactacctgctggacagaaacctctcctgtagggtggtgggtgtcccttaccagggtaatgcaactgcgctcttcatcctacccagcgagggcaagatgcaacaggtggagaatggcctctccgagaaaactttgaggaagtggttaaaaatgtttaaaaagagacagcttgagctgtatctacctaagttttcaatagaaggctcttatcagcttgaaaaagtgctgccaagcctgggaatttcaaacgtgttcacatcccatgctgacttgagtggcatttccaatcattccaacatccaggtgtccgaaatggtgcacaaggccgtagtggaggtggacgaatccggaacccgggcagcggcagctaccgggaccatttttacctttaggtctgccagactgaactcccaacggctggtatttaataggccattcctgatgttcattgtcgataataatatactatttctggggaaggtgaatcgcccctag

SEQ ID NO: 13916 - RNA, 1221 nt, Artificial Sequence
  derived and/or modified sequence
augcagcuuuuucugcuacuuugcuugguacugcugagcccccagggcgccuccuugcacaggcaccacccacgcgagaugaagaagcgggucgaagaccuacacgucggagccacagucgccccaucuaguaggcgcgacuuuacuuuugaccuguauagagcccucgccucugcagcccccucccagucaauuuuuuucuccccaguaaguaucagcaugucccuagcuaugcucucccugggugcggguucauccacuaaaaugcagauccuggaaggauuaggccugaaucuucaaaaaucgucugagaaagagcuucaccgggguuuucaacagcugcuccaggagcucaaucagccuagagauggguuucagcugagucugggcaacgcacucuucacugaccuugugguggaccuacaagauaccuucgugagcgccaugaaaacucuauaucuugcugauacauuucccaccaauuuucgcgacagugcaggcgcaaugaaacaaaucaaugauuacguggcaaagcagacgaaagggaaaauuguggauuugcugaagaaucuggauagcaaugcagucgucauuauggugaacuacaucuuuuuuaaggcgaagugggagacaagcuuuaaccauaaaggaacccaggagcaggacuucuaugucacaagcgagaccguuguuagaguccccaugaugagucgugaagaccaguaucacuaucuucuggacagaaaucuguccugcagagugguuggcgugccauaccaggguaacgcaacggcacuuuuuauccuuccgucugaaggcaaaaugcagcagguagagaacgggcugucggagaaaacacugaggaaauggcucaaaauguucaagaaacgccaacucgaacuguauuuaccuaaguucucuauugagggguccuaccagcuggaaaagguccugcccucccuaggaauuucaaaugucuucacuucccaugccgaccugucuggcauuaguaaucauucuaacauccaagucucagagaugguucauaaagcaguuguggagguugaugagagcggaacacgcgcugcugcugccaccgggacuauuuucacuuucagaucagcucgccugaauagccaacgucucguuuuuaacaggcccuuuuugauguucaucgucgauaauaauauucuauuucuuggaaaaguuaacaggcccuag

SEQ ID NO: 13917 - RNA, 993 nt, Artificial Sequence
  derived and/or modified sequence
augcagcuauuuuuguuacucugucugguacuccugagcccucagggugcuucccugcaccgccaucaccccagggaaaugaagaaacgcguugaagaucuucacgucggagcaaccguggcuccuucauccagacgcgacuucaccuuugaucuacuggguaaugcacuguucaccgaccucguuguggaccuucaggacaccuucgucagcgccaugaagaccuuauaucucgcagacaccuuccccacgaauuuuagagauucugcaggcgcuaugaaacaaaucaacgacuacguggcuaagcaaacaaagggaaagaucguagaucuguuaaagaaccuggacuccaaugcgguaguuaucauggucaauuauaucuuuuuuaaggcuaagugggagacgucauucaaccacaaagguacccaagagcaggauuucuaugucacuucagagacaguggugcgagucccaaugaugagccgcgaagaccaauaucacuaccuauuagaucgcaaucuaucguguagaguuguagggguuccauaucaagggaacgcuaccgcacuauuuauacugccgagcgaaggaaagaugcagcaagucgagaacgguuugagcgaaaagacacuacguaaauggcugaaaauguuuaagaagcgccagcucgaacuguaucucccaaaauuuagcaucgaaggaucauaucaguuggaaaagguccuucccucccuggggauuagcaauguguucaccucacaugcggaccugagcggcauuagcaaccacucaaauauccaggucagcgaaaugguccacaaagcugugguggaggucgaugagagugguacuagggccgcagccgcaacagggacaauuuucaccuuucggucugcucggcugaacucgcagaggcuggucuucaaucgaccauuccugauguuuaucguggacaauaauauccuuuuccucgguaaggucaaucggccauag

SEQ ID NO: 13918 - RNA, 777 nt, Artificial Sequence
  derived and/or modified sequence
augaaaacguuguacuuggcugacacuuucccuacaaacuuucgagacuccgccggagcuaugaaacagaucaaugauuacguggccaagcagaccaaaggaaagauugucgaucuucucaagaaucuagauucuaacgcugucgucauuaugguaaauuacaucuucuuuaaagccaaaugggagacaucauucaaucauaaaggcacacaggagcaggacuuuuacguuacuucugaaacaguuguccgggugccaaugaugaguagggaggaccaauaucacuaucuccuagacaggaaucugucuugucgggucgugggcgucccuuaucagggcaacgcuacugccuuauuuauccugcccucagaaggcaagaugcagcagguggagaacgggcuaagcgaaaaaacacuacguaaauggcucaaaauguucaagaagcggcaguuggagcuguacuuacccaaguuuucuaucgaagguagcuaccagcucgaaaaagugcucccaucccucggcauuucaaauguguuuacaagccaugcagaucugucuggcauuuccaaucacuccaauauucaggucagcgagauggugcauaaagcgguaguagagguagaugagucaggaacucgugcugcagcggccaccggcacaauuuucacguuuaggagcgccaggcugaacucucaacggcuaguuuuuaauagaccuuuccuaauguucauaguagacaauaauauccuuuuccucggaaaggugaaccggccauag

SEQ ID NO: 13919 - RNA, 273 nt, Artificial Sequence
  derived and/or modified sequence
augcagcuuuucuuacuccuaugucucgugcuguugagcccacagggagcgucucugcacagacaucauccccgagaaaugaagaagaggguugaagaucuccauguuggagcaacugucgccccaagcucaagacgagauuucaccuuugaucuauaucgcgcucucgcaucugcugcccccucccagucuauauuuuucucccccguauccaucucuaugucccuggccaugcucucccugggagccgggagcucuacaaagaugcaguag

SEQ ID NO: 13920 - RNA, 1221 nt, Artificial Sequence
  derived and/or modified sequence
augcagcuguuucuguugcugugccuuguccuccuaaguccccaaggggcuucgcuccaucgacaucacccucgagaaaugaagaaacguguugaagaccuccaugugggcgcuacugucgcuccgaguuccaggagggacuucaccuucgaucucuaccgcgcgcucgcauccgcagcacccagucaaaguauuuucuucucucccgugucaaucucgaugucgcuagccauguugagccuuggcgccgguucgaguaccaagaugcagauacuggagggauugggccucaaucuucagaagucuuccgagaaggagcugcacagaggcuuccagcaacugcuucaggaauugaaucagcccagggauggcuuucagcucagucugggcaaugccuuauuuaccgaucuggucguggacuugcaggauacuuuugugagcgcgaugaagacacuauaccucgcagacacauucccgacaaacuucagagacuccgccggagccaugaaacaaaucaacgauuacgucgccaagcagacuaaaggaaagaucgucgaucugcugaagaaucuggacuccaacgcaguugugauuaugguuaacuauauuuucuucaaggcuaaaugggagaccucauuuaaccacaagggcacucaggaacaggauuuuuaugugaccuccgaaacugugguuaggguuccaaugauguccagggaggaucaguaccauuaccuccucgaucguaaucugagcuguaggguuguggguguuccguaucagggcaacgcgacugcccuuuucauucuuccaagcgaaggaaagaugcagcaaguugagaauggccugagcgaaaagacauuaagaaaguggcugaagauguucaagaagcgacaguuagaguuguaucuccccaaguuuuccaucgagggauccuaucagcucgagaaggugcucccuucccucggcauaagcaauguuuucacaucucacgcugaccucucggggauuucuaaccauagcaacauccaggugucugaaaugguacauaaggccguggucgagguugaugagagcgggacacgagcggccgccgcuaccgggacgauuuuuaccuucaggucagcuaggcugaacucacaaagacucguuuuuaacagacccuuucugauguucauaguagacaauaacaucuuauuccugggcaagguaaauagacccuag

SEQ ID NO: 13921 - RNA, 519 nt, Artificial Sequence
  derived and/or modified sequence
augcagcuauuuuuacuacuuugccuuguacuucucucuccucagggugccagccuucaucgccaucaccccagggaaaugaagaagcgugucgaagaucuccaugucggggccacaguugcgcccaguucaaggagggacuuuaccuucgaccuguauagagcucuagccuccgcagcaccaucucaaucgauuuuuuuuucuccugugaguaucucuaugaguuuggcaaugcugagccugggggcuggcagcagcacuaagaugcagauucuggaaggguuagggcugaauuuacaaaagucaagugagaaagagcuucacaggggcuuucaacagcuucugcaagagcugaaucaaccccgcgaugguuuccagcugagccuuggaaaugcacuuuucacggaccuggugguugauuugcaagacacguucguuucugcgaugaaaacucucuaccucgccgacacguucccaacuaacuuucgggacagcgccggugcuaugaaacagaucuag

SEQ ID NO: 13922 - RNA, 1221 nt, Artificial Sequence
  derived and/or modified sequence
augcagcucuuuuugcuucugugucuggugcuucucucaccccagggugcaucucuacaccgucaucauccgcgugagaugaagaaacgcgucgaggauuugcauguuggggcgacaguggccccuuccucgagaagggacuucacauucgaccuauacagggcgcuugccagcgcugccccgagucaauccauuuucuuuuccccagucuccaucuccaugagccucgcaaugcugucucuuggcgcaggaucuuccacaaagaugcaaauucuagaaggucuuggacuaaaccugcagaaaaguagcgaaaaagaacuacacaggggauuucaacaacugcugcaggaacugaaccagccacgggauggauuucagcucucauuaggaaaugcauuauucaccgaccuuguuguggaccugcaggacacauuugucagcgccaugaaaacuuuguaccuggcggauaccuuccccaccaacuucagggacagugccggagcaaugaaacagauuaaugacuaugucgccaaacaaacuaaggguaaaauuguagaucuacugaagaaucuagauuccaaugcuguuguuauuaugguuaauuauaucuucuucaaggcuaaaugggaaacgucauuuaaccacaaaggcacccaggagcaggauuucuacgucacuucagagacaguagugcgcguccccaugaugucccgagaggaccaguaccacuaucugcuggaccggaauuugucaugccgaguaguaggcgugccauaccagggcaaugcuacagcacuguucauucugcccagugagggaaagaugcagcagguggaaaaugggcucagcgagaagacauuacguaaguggcugaaaauguuuaagaagagacagcuggaacuauaccuuccgaaguucagcauugagggaagcuaccagcuagagaagguucucccuucgcuggggauuagcaacguuuuuaccagccacgcugaucuuucuggcauuaguaaccacuccaauauccagguauccgaaauggugcacaaagcugucguugaaguggaugagagugguacaagggcggccgcggccacaggaacuauuuuuacuuuccggucugcucguuugaauucccagagguuaguauucaaucggccauuccugauguuuaucgucgacaauaacauccuguuucuaggcaaggugaaccgccccuag

SEQ ID NO: 13923 - RNA, 261 nt, Artificial Sequence
  derived and/or modified sequence
augcaacuguuccuccuacugugucucgugcuguugagcccacaaggugcaucuuugcacaggcaucauccccgcgaaaugaagaagcgcguggaagaucugcaugucggcgccaccguagcccccucaucuaggcgcgauuuuaccuucgaccuuuaccgagcucucgcuagcgccgcaccgagucagaguauuuucuuuaguccaguaucuauuuccaugagccucgcaaugcuuagucucggcgccgguagcucauag

SEQ ID NO: 13924 - RNA, 906 nt, Artificial Sequence
  derived and/or modified sequence
augcaacuguuccuccuguugugccuagugcugcucucaccgcagggggccucucuccacagacaccauccaagagagaugaagaagcgaguugaagaccugcaugucggagccacagucgccccaucaucuagaagagauuuuacauuugaccucuaccgcgcauuagcuagcgcugcgcccagccaauccaucuucuuuagcccugucucuauuagcaugagcuuggcgaugcucaguuugggcgccggguccuccaccaagaugcagauuuuagagggccuggguuuaaauuugcagaaaagcucugaaaaagaacugcaccgagguuuucaacagcuccuucaagagcucaaccagcccagggauggguuucaguugucuuuaggaaacgcacuauuuacggauuuggucguggaucuucaggauacauucgucagcgcgaugaaaacccucuaccucgccgacaccuucccaaccaacuucagagauuccgccggagcuaugaagcagauuaacgacuauguggcuaagcaaacaaagggcaagauuguggaucugcucaagaaccuugacuccaacgcggucgucaucauggucaacuacauauucuuuaaagccaagugggaaacuucuuucaaccauaaagguacucaggagcaggacuuuuacgugaccucagagacaguuguucggguuccuaugaugucuagagaagaucaguaccacuauuugcuggauagaaaucuaagcugcaggguggucgguguaccauaucaggguaaugccacagcccuuuuuauuuugccuucugaaggaaagaugcagcagguugaaaacgggcucuccgaaaaaacacucagaaaguggcuaaagauguucaaaaaacgguacuuccaaacuuag

SEQ ID NO: 13925 - RNA, 1221 nt, Artificial Sequence
  derived and/or modified sequence
augcaacuauuccugcuguuauguuugguccucuugagcccccaaggcgccucccuccaucgacaccacccacgcgaaaugaagaaaagaguugaagauuugcacgugggcgccacagucgcucccucaucuaggagggauuucaccuuugaccuguaucgcgcgcuggcuagugccgccccuagccagucaaucuuuuuuagcccagugucgaucucgaugucucuugccaugcugucucuaggggcuggaucuucaacuaagaugcagauacuggagggccugggucucaaccuccagaagaguucugagaaggagcugcauaggggcuuucagcagcugcugcaagagcuuaaucagccaagagauggguuucagcucagucucgguaaugcacuguucaccgaccucgucguggaucuucaggauaccuucguguccgccaugaaaacucuguaccuggccgauacauuccccacuaacuuuagggacagugccggugcuaugaagcagaucaaugauuacguggcuaaacagacgaaagguaaaauugucgaccuguugaaaaaucuggauucuaacgccguugugauuauggugaacuauauauuuuucaaagccaagugggagaccuccuuuaaccacaagggaacccaggagcaagacuucuaugugacaucugaaaccguugugaggguaccgaugaugagccgggaagaccaguaucauuaucugcuugauagaaaucugagcugccgggugguuggcguccccuaucagggcaaugcaaccgccuuguucauacuccccagugaagguaagaugcaacagguagagaaugguuugucagaaaaaacacugcggaaauggcugaaaauguuuaaaaagagacagcuugaacucuaccucccuaaauucaguaucgaaggguccuaucaacuggagaaaguccucccgagcuuggggauuagcaauguauuuacaagucacgccgaccuguccgguaucucuaaccacagcaauauacaagugagcgaaaugguacauaaggccgucguggagguugaugaauccgggacacgggcugcugcagcaacuggcacaaucuuuacuuuucgaucggcucggcucaacucccaacggcuuguauucaaccggccuuuucugauguuuaucgucgauaacaacauccuguuucugggcaaagucaaccgcccuuag

SEQ ID NO: 13926 - RNA, 435 nt, Artificial Sequence
  derived and/or modified sequence
augcagcuguuccugcucuuaugucugguacuucugaguccgcaaggcgccuccuuacacagacaucauccccgugagaugaagaagcggguagaagaucuucacgugggugcaacuguggcccccagcagcaggagggacuucaccuuugaccuguaccgugcauuggccuccgcagcccccucucagucaauuuucuuuucuccgguuagcaucucgaugagcuuggccaugcuuucucuuggagcagggucuuccacuaagaugcagauauuagaaggccuuggauuaaaccuacagaaaucauccgagaaggaauuacaccggggguuccagcagcuacuucaggaacugaaccagccucgcgaugguuuccagcuaagccuuggaaaugcauuauucacugaccuugucguagacuugcaggacacauag

SEQ ID NO: 13927 - RNA, 75 nt, Artificial Sequence
  derived and/or modified sequence
augcagcuguuccuuuuacuuugcuugguacugcucucuccacaaggcgccucacuacaccgccaccacccuuag

SEQ ID NO: 13928 - RNA, 696 nt, Artificial Sequence
  derived and/or modified sequence
augcaguuguuuuuacucuuaugucucgugcuuuugucaccucagggcgcgucacugcacaggcaccacccaagagaaaugaagaagagggucgaagaucugcacgugggcgcuaccguugcuccuucaagucgccgugacuucacuuuugaccucuaccgcgccuuagcaucagccgcucccucucagagcauauuuuucuccccagugagcauuuccaugucacucgcaaugcucagccugggugcaggcucuucuaccaaaaugcagauucucgagggccucggccugaaucugcagaaauccuccgaaaaagaguuacaccgcggcuuucagcagcuacuucaggaacucaaccagccaagagacggcuuucaacugucccuggguaacgcacuguucacagaccuggucgucgauuugcaggauacuuuugugagugccaugaagacucuguaucucgcagauaccuuccccacaaauuucagagacagugcaggggcuaugaaacagauuaacgacuacgucgcaaaacagacaaaagggaagauuguggacuuacugaaaaaccuggauagcaacgcugugguaaucauggugaacuacauauucuuuaaggcgaaaugggaaacaagcuuuaaucacaaaggcacacaggaacaagauuuuuaugugacaagcgagaccgucguuuag

SEQ ID NO: 13929 - RNA, 474 nt, Artificial Sequence
  derived and/or modified sequence
augcagcuguuucuucucuugugcuuaguccuccuaucaccccaaggggccucccugcaccgccaccaucccagggagaugaagaaaagaguggaggaucuucauguuggagcgacuguggcuccgagcagcagacgagauuuuacuuuugaccuguauagggcccuugcauccgcugcucccucucagucgaucuucuuuucuccugugucaauaucuaugucccuggcgaugcucuccuuaggcgccggaucuucaacuaagaugcagauucuggaaggccuuggucugaaccugcaaaaguccuccgagaaagaguuacaucgaggcuuucagcaauuacugcaagaauugaaucagccgagagacggauuucagcuuucacuggguaaugcccuguuuaccgauuuaguuguagauuugcaggacacuuuugucuccgcaaugaaaacguuguaccuggccgacaccuag

SEQ ID NO: 13930 - RNA, 1221 nt, Artificial Sequence
  derived and/or modified sequence
augcaacuguuucuccuccugugccuggugcuccugaguccacagggagcuagucuccacagacaccauccuagagaaaugaagaaacgcguggaagaccugcacguaggcgcuacugucgcaccgucuagcaggagagauuucaccuucgauuuguaccgcgcccuugcaucugccgcaccaagucaguccauuuucuuuagccccgugucuaucagcaugagccuugccauguuaucuuugggagccgguucgucaacaaaaaugcaaauccucgaaggccucggacucaaccugcaaaaguccucugagaaggaacugcacagaggcuuccagcaacuccuccaagagcugaaucaaccaagagauggauuccaacuuagcuuaggcaaugcucuguuuacagauuuaguuguggaucuccaagauaccuucgugagugcuaugaaaacacuuuaccuagcagauacauuuccaacuaacuuucgggauagcgcaggcgcaaugaaacagaucaaugauuacguggcuaagcagacgaagggaaagaucguugaccuccucaagaaucucgacucaaaugcggucgugaucauggucaacuauauauucuuuaaggcuaagugggagaccucauucaaccacaaaggaacccaggaacaagauuuuuauguaacuuccgagacaguagugaggguaccaaugaugagcagagaagaccaguaccauuauuugcucgaccgaaaccuauccuguagaguggugggagugccauaucaagggaaugccacagcccuguuuauacuuccaagcgagggcaaaaugcagcagguugagaauggacucagugaaaagacucugaggaaauggcugaagauguucaagaagcgacagcucgagcuguauuuaccuaaguucucuauugagggguccuaccagcuggaaaagguccugcccucccuaggaauuucaaaugucuucacuucccaugccgaccugucuggcauuaguaaucauucuaacauccaagucucagagaugguucauaaagcaguuguggagguugaugagagcggaacacgcgcugcugcugccaccgggacuauuuucacuuucagaucagcucgccugaauagccaacgucucguuuuuaacaggcccuuuuugauguucaucgucgauaauaauauucuauuucuuggaaaaguaaacagaccauag

SEQ ID NO: 13931 - RNA, 993 nt, Artificial Sequence
  derived and/or modified sequence
augcagcuguuccuguugcugugucuuguauuacugucuccucaaggggcaagccuccauagacaccauccuagagagaugaaaaagagagucgaggaucuucauguuggggcuacagucgccccuucuagccgccgcgauuucacguucgaccugcucggcaaugcccuguuuacugaucucgucguugacuugcaagacacuuucguuucugccaugaagacccuuuaccuagccgacacuuuccccaccaacuuucgcgauucugcaggagcuaugaagcagauaaaugauuacguugcuaagcaaacaaagggaaagaucguagaucuguuaaagaaccuggacuccaaugcgguaguuaucauggucaauuauaucuuuuuuaaggcuaagugggagacgucauucaaccacaaagguacccaagagcaggauuucuaugucacuucagagacaguggugcgagucccaaugaugagccgcgaagaccaauaucacuaccuauuagaucgcaaucuaucguguagaguuguagggguuccauaucaagggaacgcuaccgcacuauuuauacugccgagcgaaggaaagaugcagcaaguggagaacggucuguccgagaaaacccuccgcaaauggcucaaaauguuuaagaagcgccaacuagaguuauaccugccaaaauuuucuaucgaaggcuccuaccagcuagagaagguucugccuagccuggggauuaguaauguguucacaucacacgccgaccuuagcggcaucuccaaucacagcaacauucaggucagcgaaaugguccauaaagcuguaguugagguugacgagagcgggacaagggccgcggccgcaacaggcaccauauuuacauucagaucggcaaggcuuaacagccaacgacucguguucaauaggccauuucugauguuuauuguggauaauaauaucuuauuucugggaaaagucaaccgaccauag

SEQ ID NO: 13932 - RNA, 777 nt, Artificial Sequence
  derived and/or modified sequence
augaaaacacucuaucucgcugauacuuucccaacuaacuucagggacagugcgggugccaugaaacaaauaaacgauuacguugcuaagcagacaaaaggaaagauuguagauuuguugaaaaaucuggauaguaacgccguggucauaauggugaauuauaucuucuucaaggccaaaugggaaacaaguuucaaucacaaaggaacccaggagcaggauuucuaugugacaagcgaaacaguugugcgagucccuaugaugucacgugaagaucaauaccacuaccuuuuagacagaaaccugucaugcagagugguuggggugcccuaucaaggcaacgcaacugcacuguuuauucucccgagcgaaggcaagaugcagcagguagagaacggacuaucagagaaaacauugcgcaaauggcugaagauguucaaaaagagacaauuagaacuauaccuaccgaaauuuucaauugaggguuccuaccagcucgagaaaguccucccauccuuaggaaucuccaauguguucaccucccacgccgaucucagcggcauuucgaaucacagcaauauucagguuagcgagaugguccauaaggcugugguagaaguagacgaguccgggacgagagccgcagcugccacuggcacaauauuuacuuuucgcuccgcgcgccuuaauucacagagauuaguuuuuaacagacccuuccuuauguuuauaguggauaauaauauuuuguucuuaggaaaagugaaccggccuuag

SEQ ID NO: 13933 - RNA, 1221 nt, Artificial Sequence
  derived and/or modified sequence
augcagcuguuccugcuccugugucuaguccuguuaagcccacagggcgccagucuucauagacaucacccgcgagaaaugaagaagagaguggaagaucugcacgugggagccaccguagcgccgucauccagaagagacuucacuuucgauuuguaucgggcacuugcguccgccgcuccaagccaguccauuuuuuuuucaccugucaguaucucuaugucucuagcuauguuaucacugggcgcuggguccucaacuaaaaugcaaauccuggaaggccugggacugaaucuccagaaguccucagagaaagaacuucacagaggcuuucagcagcuacugcaggaacuuaaccagccuagggacggguuccaacucaguuuagggaacgcucuguuuacagaccuggugguagaccuucaggauacauucgucagcgcuaugaaaacauuguacuuggccgauacuuuuccaacaaauuuccgcgauucugccggggcuaugaaacagauuaaugauuacgucgccaagcaaaccaagggaaaaauagucgaccuucugaaaaaccuugauagcaaugccguugugaucauggugaauuacaucuucuucaaggcaaagugggagacuaguuucaaccauaagggaacgcaagagcaggacuuuuacguaacuucagagacaguugugagagugccuaugaugagcagggaggaccaguaccacuaccuuuuggaccguaaucuaucuuguagggucguuggggugccguaccagggcaacgccacagccuuguuuauucuccccagugaagggaagaugcaacaggucgagaacggacuguccgaaaaaaccuuaaggaaauggcucaaaauguucaagaaacgacaacucgaacuguauuuaccuaaauuuaguauugagggcaguuaccagcuggagaaaguccuuccaucccuugguauuucuaacguauucaccucccacgcugacuuaagcgguauuucaaaccauucuaacauacagguaagcgagaugguacauaaggcaguuguugaaguagaugagucaggcacuagagccgccgcugcuaccggcacaauauuuacauuuagaagcgcaagauuaaacagucagaggcugguguucaauaggccuuuccugauguuuauugucgauaacaauauucuguuccugggcaaagugaauagacccuag

SEQ ID NO: 13934 - RNA, 519 nt, Artificial Sequence
  derived and/or modified sequence
augcagcucuuucuacuccucugccucguguuacuuaguccucagggagcaucacugcauagacaccacccaagggagaugaaaaaaaggguagaggaccuccacguuggggcuacaguggcaccuucaaguaggcgagauuucacuuuugaccucuaccgcgcucuggcuucggccgcuccaucccaaagcauauuuuucaguccugucucuauuagcaugucgcuugcuaugcugagucuuggcgcaggcuccucaaccaaaaugcagauacucgagggccuaggcuugaacuugcagaagucaucggaaaaagaacugcaucgaggauuucagcagcugcugcaggaacuaaaucagccgcgggacggauuucagcuuagucuaggcaaugccuuguuuaccgaccucguugucgacuugcaagacacauucgugagugcaaugaaaacacuuuaucucgcugacacuuuccccaccaauuuucgagauuccgcuggcgccaugaaacaaaucuag

SEQ ID NO: 13935 - RNA, 1221 nt, Artificial Sequence
  derived and/or modified sequence
augcagcuguucuuacugcuaugucucgugcugcucucuccacaaggugccucuuugcacaggcaucacccaagggaaaugaaaaaacgagucgaagacuugcaugucggugcaacuguggccccaagcucucgucgcgauuuuacauucgaccuguaccgcgcucucgcgucagcugcucccucccagaguauauucuucagucccgugucaauaucuaugucgcuggcaaugcucagccugggcgccggauccaguacaaaaaugcagauccucgaaggccucggccuuaaucuccagaaaaguagcgaaaaagaacuacacaggggauuucaacaacugcugcaggaacugaaccagccacgggauggauuucagcucucauuaggaaaugcauuauucaccgaccuuguuguggaccugcaggacacauuugucagcgccaugaaaacuuuguaccuggcggauaccuuccccaccaacuucagggacagugccggagcaaugaaacagauuaaugacuaugucgccaaacaaacuaaggguaaaauuguagaucuacugaagaaucuagauuccaaugcuguuguuauuaugguuaauuauauuuuuuucaaggccaaaugggagaccuccuuuaaccacaaggggacucaggagcaggauuucuaugucacuagcgagaccgucgucagaguacccaugaugagcagagaagaccaauaccacuaucugcuggaccguaaccugucaugucgaguggugggcgugcccuaccaaggcaaugcaacagcccucuuuauuuuaccuuccgaaggaaaaaugcaacaaguggaaaaugggcuguccgagaagacccucaggaaauggcuuaagauguuuaaaaaacggcaacuggagcuguaccucccuaaguucucaauugaggguaguuaucaacuagaaaagguucuccccagcuuagguauuagcaauguuuucacaucacaugcagaucugucaggaauuuccaaucauucgaacauccaggugucagagauggugcacaaagccguagucgagguggacgagagugggacacgggccgcagccgcuacgggaacaaucuuuaccuucagaucagcucgguuaaacagucagcgauuaguguucaaucgaccuuucuuaauguucauuguggauaacaauaucuuauucuuaggaaaaguuaaccggcccuag

SEQ ID NO: 13936 - RNA, 906 nt, Artificial Sequence
  derived and/or modified sequence
augcaguuguuccuacuccuuugccugguccugcucuccccucagggagcuagccuccacagacaucacccccgugagaugaaaaaacggguugaggaucuccauguuggugcuacagucgccccaaguucacgcagagacuucacuuucgacuuguaccgugcccucgcaagugcugccccuucccagagcauuuuuuucagcccugugucuauuucuaugucccuggccaugcugucucucggagcuggcuccuccacuaaaaugcaaauacuggaaggccuuggucugaaccuccaaaaaucuagugaaaaagaacugcaucgcggauuccagcagcugcuucaggaacugaaucaaccgagggacggauuucaguugagucucggcaaugcucuuuuuacugaucugguuguggaucuacaggauaccuuugucuccgcaaugaagacacuauauuuagcagauacguucccuaccaauuuuagggauagcgcuggcgcaaugaaacagaucaacgauuacgucgcuaaacaaacaaaagguaaaauaguggacuugcuuaaaaauuuagauagcaaugcgguuguuauuaugguuaauuacaucuuuuucaaagcuaaaugggagacuucauuuaaccauaaagguacucaggaacaggauuucuaugugacgagugaaaccguugugagaguucccaugauguccagggaagaucaguaccacuacuuguuagaucggaaccuauccugccguguuguuggagugcccuaccaaggcaaugccaccgcucuuuuuauccugccaucugagggcaagaugcagcaaguugaaaauggacucagugagaaaacccuccggaaauggcucaaaauguuuaagaagcguuacuuucagacauag

SEQ ID NO: 13937 - RNA, 1221 nt, Artificial Sequence
  derived and/or modified sequence
augcagcuuuuccuguugcugugucuuguacuucuaagcccccagggggccagucuccaccgucaucauccuagggaaaugaagaaacgaguagaggaccuucacguuggcgcuacuguggcaccaucaagcagacgggacuucaccuucgaccuguacagagcccucgcuuccgcggccccuagccagucuaucuuuuucucccccgugucaauuuccaugucucucgccaugcugucuuuaggagccggauccucuacgaaaaugcagauccuagagggacucggcuugaaucugcaaaagucuagcgaaaaagaacuccauaggggcuuccagcaauuacuucaggaacuaaaucaaccucgcgauggcuuccagcugucccuggguaacgcccuuuuuaccgaucugguuguagaucuacaggauacauucguaucugccaugaaaacguuauaccuggcugacacauuuccaacuaauuuuagagacagcgcaggagcaaugaagcagaucaaugauuauguugccaaacagaccaaagggaaaauuguugaucuacugaagaaucucgacucuaacgcagugguaauuaugguaaauuacaucuuuuucaaggccaagugggagacaagcuuuaaccauaaaggaacacaggaacaggacuucuauguaacauccgagacuguggugaggguuccaaugaugagcagggaggaucaguaccauuaucuccuggaccgaaacuuaagcugccguguggugggagugccauaccaagggaacgcaaccgccuuguuuauucugccaucagaaggaaaaaugcagcaaguggagaacggacuguccgaaaagacccuuagaaaauggcuuaaaauguucaagaagcgccaacuagaacuuuaucuccccaaauucucuaucgaagguuccuaucagcuugagaaagugcugccuucccugggaaucuccaacguguucacaucacacgccgaccugucuggcauaucuaaucacucgaacauccagguaucagagauggugcacaaagcagucguggaggucgacgagagugggacccgagccgcagcagcgaccgggacaauuuuuaccuucagaagcgcccguuuaaacagucagagacugguuuucaacagacccuucuuaauguucauaguagacaacaauauauuguucuugggaaaaguaaauagaccuuag

SEQ ID NO: 13938 - RNA, 435 nt, Artificial Sequence
  derived and/or modified sequence
augcaguuauuccuccuucucugucucguacuccuuuccccucaaggagcuagccugcaucgccaucacccacgagaaaugaagaaacgaguggaagaucugcaugugggagccacaguugcccccagcucuagacgggacuuuaccuucgacuuguaucgcgcccucgccuccgccgccccaucccaguccauauucuuuuccccagugagcauauccaugagccuggccauguugagccuuggggcaggaagcucaacaaagaugcagauucucgaagguuugggccuaaaucugcagaaguccuccgaaaaggaacugcacagaggcuuucaacagcugcugcaagaacugaaccaaccccgcgacggcuuccaacucagccuuggcaacgcucuguuuaccgacuuaguugucgaucuucaggauaccuag

SEQ ID NO: 13939 - RNA, 696 nt, Artificial Sequence
  derived and/or modified sequence
augcagcuguuucugcuccuuugccugguccuucugucaccccaaggggccucgcugcacagacaccauccucgggagaugaaaaagagaguggaagacuugcauguuggcgccacaguagccccgucaagcagaagagacuucacauuugacuuguauagagcccucgcuucggccgcaccuagucagagcauauuuuucucccccguaucuaucucaauguccuuagcaaugcucagucucggagccggcuccucaaccaagaugcagauccuggagggccuuggccugaaucuucaaaaguccagugagaaagaguuacaccggggguuucagcaguugcuacaagagcuuaaucagccacgugacgguuuccaacucucucuggggaaugcccucuuuacugaccucguuguggaccuccaagauaccuucgugagcgcgaugaagacauuauaucuggccgauacauuccccaccaacuucagagauuccgccggcgccaugaaacagaucaacgauuacguagcaaagcagaccaagggcaagaucgucgacuugcuuaaaaaucucgauucgaacgcuguggugauuauggugaacuauauuuuuuuuaaggccaaaugggagacaagcuucaaucauaaaggaacgcaggaacaggacuucuauguuacuucugaaacagucgucuag

SEQ ID NO: 13940 - RNA, 474 nt, Artificial Sequence
  derived and/or modified sequence
augcagcuuuuucugcugcugugucucguauugcucuccccucagggagccucucuccaccggcaccacccacgagagaugaagaaacggguugaggaucuccaugucggcgccacaguggcucccuccucucgccgcgacuuuacuuuugaucucuacagagcucucgcgucugcugcgcccucccaguccaucuucuucucaccaguaucuaucucuaugagucuugccauguuaucccuuggagccgguuccucuacaaaaaugcaaauuuuagagggccugggccugaaccugcagaaaagcuccgagaaggaguuacaucggggauuucagcagcuucugcaggaacucaaucaaccucgggauggcuuccaacuuucacugggcaacgcucuuuuuacugaucucguuguugaucuacaagauacauucguauccgcuaugaagaccuuauaccuggccgauacauag

SEQ ID NO: 13941 - protein, 729 aa, Artificial Sequence
  derived and/or modified sequence
MACPWKFLFKTKFHQYAMNGEKDINNNVEKAPCATSSPVTQDDLQYHNLSKQQNESPQPLVETGKKSPESLVKLDATPLSSPRHVRIKNWGSGMTFQDTLHHKAKGILTCRSKSCLGSIMTPKSLTRGPRDKPTPPDELLPQAIEFVNQYYGSFKEAKIEEHLARVEAVTKEIETTGTYQLTGDELIFATKQAWRNAPRCIGRIQWSNLQVFDARSCSTAREMFEHICRHVRYSTNNGNIRSAITVFPQRSDGKHDFRVWNAQLIRYAGYQMPDGSIRGDPANVEFTQLCIDLGWKPKYGRFDVVPLVLQANGRDPELFEIPPDLVLEVAMEHPKYEWFRELELKWYALPAVANMLLEVGGLEFPGCPFNGWYMGTEIGVRDFCDVQRYNILEEVGRRMGLETHKLASLWKDQAVVEINIAVLHSFQKQNVTIMDHHSAAESFMKYMQNEYRSRGGCPADWIWLVPPMSGSITPVFHQEMLNYVLSPFYYYQVEAWKTHVWQDEKRRPKRREIPLKVLVKAVLFACMLMRKTMASRVRVTILFATETGKSEALAWDLGALFSCAFNPKKLKKSLFMLKELNNKFRYAVFGLGSSMYPRFCAFAHDIDQKLSHLGASQLTPMGEGDELSGQEDAFRSWAVQTFKAACETFDVRGKQHIQIPKLYTSNVTWDPHHYRLVQDSQPLPAASTSPRIPPILASSSGLAQASRPSAVSGSNGSMTPSTRECGEAA

SEQ ID NO: 13942 - protein, 1153 aa, Artificial Sequence
  derived and/or modified sequence
MACPWKFLFKTKFHQYAMNGEKDINNNVEKAPCATSSPVTQDDLQYHNLSKQQNESPQPLVETGKKSPESLVKLDATPLSSPRHVRIKNWGSGMTFQDTLHHKAKGILTCRSKSCLGSIMTPKSLTRGPRDKPTPPDELLPQAIEFVNQYYGSFKEAKIEEHLARVEAVTKEIETTGTYQLTGDELIFATKQAWRNAPRCIGRIQWSNLQVFDARSCSTAREMFEHICRHVRYSTNNGNIRSAITVFPQRSDGKHDFRVWNAQLIRYAGYQMPDGSIRGDPANVEFTQLCIDLGWKPKYGRFDVVPLVLQANGRDPELFEIPPDLVLEVAMEHPKYEWFRELELKWYALPAVANMLLEVGGLEFPGCPFNGWYMGTEIGVRDFCDVQRYNILEEVGRRMGLETHKLASLWKDQAVVEINIAVLHSFQKQNVTIMDHHSAAESFMKYMQNEYRSRGGCPADWIWLVPPMSGSITPVFHQEMLNYVLSPFYYYQVEAWKTHVWQDEKRRPKRREIPLKVLVKAVLFACMLMRKTMASRVRVTILFATETGKSEALAWDLGALFSCAFNPKVVCMDKYRLSCLEEERLLLVVTSTFGNGDCPGNGEKLKKSLFMLKELNNKFRYAVFGLGSSMYPRFCAFAHDIDQKLSHLGASQLTPMGEGDELSGQEDAFRSWAVQTFKAACETFDVRGKQHIQIPKLYTSNVTWDPHHYRLVQDSQPLDLSKALSSMHAKNVFTMRLKSRQNLQSPTSSRATILVELSCEDGQGLNYLPGEHLGVCPGNQPALVQGILERVVDGPTPHQTVRLEALDESGSYWVSDKRLPPCSLSQALTYFLDITTPPTQLLLQKLAQVATEEPERQRLEALCQPSEYSKWKFTNSPTFLEVLEEFPSLRVSAGFLLSQLPILKPRFYSISSSRDHTPTEIHLTVAVVTYHTRDGQGPLHHGVCSTWLNSLKPQDPVPCFVRNASGFHLPEDPSHPCILIGPGTGIAPFRSFWQQRLHDSQHKGVRGGRMTLVFGCRRPDEDHIYQEEMLEMAQKGVLHAVHTAYSRLPGKPKVYVQDILRQQLASEVLRVLHKEPGHLYVCGDVRMARDVAHTLKQLVAAKLKLNEEQVEDYFFQLKSQKRYHEDIFGAVFPYEAKKDRVAVQPSSLEMSAL

SEQ ID NO: 13943 - protein, 1114 aa, Artificial Sequence
  derived and/or modified sequence
MACPWKFLFKTKFHQYAMNGEKDINNNVEKAPCATSSPVTQDDLQYHNLSKQQNESPQPLVETGKKSPESLVKLDATPLSSPRHVRIKNWGSGMTFQDTLHHKAKGILTCRSKSCLGSIMTPKSLTRGPRDKPTPPDELLPQAIEFVNQYYGSFKEAKIEEHLARVEAVTKEIETTGTYQLTGDELIFATKQAWRNAPRCIGRIQWSNLQVFDARSCSTAREMFEHICRHVRYSTNNGNIRSAITVFPQRSDGKHDFRVWNAQLCIDLGWKPNGRDPELFEIPPDLVLEVAMEHPKYEWFRELELKWYALPAVANMLLEVGGLEFPGCPFNGWYMGTEIGVRDFCDVQRYNILEEVGRRMGLETHKLASLWKDQAVVEINIAVLHSFQKQNVTIMDHHSAAESFMKYMQNEYRSRGGCPADWIWLVPPMSGSITPVFHQEMLNYVLSPFYYYQVEAWKTHVWQDEKRRPKRREIPLKVLVKAVLFACMLMRKTMASRVRVTILFATETGKSEALAWDLGALFSCAFNPKVVCMDKYRLSCLEEERLLLVVTSTFGNGDCPGNGEKLKKSLFMLKELNNKFRYAVFGLGSSMYPRFCAFAHDIDQKLSHLGASQLTPMGEGDELSGQEDAFRSWAVQTFKAACETFDVRGKQHIQIPKLYTSNVTWDPHHYRLVQDSQPLDLSKALSSMHAKNVFTMRLKSRQNLQSPTSSRATILVELSCEDGQGLNYLPGEHLGVCPGNQPALVQGILERVVDGPTPHQTVRLEALDESGSYWVSDKRLPPCSLSQALTYFLDITTPPTQLLLQKLAQVATEEPERQRLEALCQPSEYSKWKFTNSPTFLEVLEEFPSLRVSAGFLLSQLPILKPRFYSISSSRDHTPTEIHLTVAVVTYHTRDGQGPLHHGVCSTWLNSLKPQDPVPCFVRNASGFHLPEDPSHPCILIGPGTGIAPFRSFWQQRLHDSQHKGVRGGRMTLVFGCRRPDEDHIYQEEMLEMAQKGVLHAVHTAYSRLPGKPKVYVQDILRQQLASEVLRVLHKEPGHLYVCGDVRMARDVAHTLKQLVAAKLKLNEEQVEDYFFQLKSQKRYHEDIFGAVFPYEAKKDRVAVQPSSLEMSAL

SEQ ID NO: 13944 - DNA, 2190 bp, Artificial Sequence
  derived and/or modified sequence
atggcctgcccttggaaattcctattcaagaccaagttccatcagtatgccatgaacggtgagaaggacatcaacaacaacgttgagaaagcgccttgtgccacatcctcccctgtcacccaggacgaccttcagtaccataacctctcgaaacagcagaacgaatccccccagcctctggtcgagactgggaagaaatctccggaatcattagtaaaactggacgccacccccctgtcctccccaagacatgtgagaatcaaaaattggggcagcggcatgacatttcaggacacgcttcaccacaaagcaaaaggcatcctgacatgcaggtcaaaaagctgtctgggatctattatgaccccaaagagtctcacacggggtccacgcgataagccaacccctcctgacgagctgctgccacaggcgatagagttcgtcaaccagtattatggctccttcaaagaggcaaaaatcgaggaacacttggcccgcgtggaggccgtgaccaaagaaatcgagaccacaggcacgtaccagctcacaggagatgagctcattttcgctaccaagcaggcctggcgtaatgcccccaggtgtatcggtagaatccagtggagcaacctgcaggtattcgacgcccgttcatgctcaactgccagagagatgttcgaacatatctgccgacacgtgagatactccacgaacaatggaaatatccgctctgcaatcacggtgtttccacagaggtccgacgggaagcatgattttagagtctggaatgctcagttgatccgttacgccggatatcagatgccggacgggtctatccggggggatccagcaaatgtcgagtttactcagctgtgtatcgatctggggtggaagcccaaatatggcaggttcgacgtggtgccactcgtattgcaggcaaacgggcgcgaccctgaactctttgagatcccaccggacttggtgctcgaggtggcaatggaacaccctaagtatgaatggtttcgagagcttgaactcaaatggtacgcgctccccgcagtcgccaacatgctgttggaggtgggaggtcttgaattccctggctgcccttttaatggttggtacatgggaactgaaataggtgttcgcgacttctgcgatgtgcaaaggtacaacatcctggaagaggtgggcagacggatggggcttgaaacccacaagctcgctagtctatggaaagaccaggccgtggttgagatcaacatcgcggtgcttcacagcttccagaagcagaacgttaccattatggatcaccattcagccgctgaaagcttcatgaagtatatgcagaatgaataccgcagcagaggcggttgcccagccgattggatctggctggtcccacctatgtccggttctatcactcccgtattccatcaagagatgctcaactatgtgctgtcccccttttactactatcaggtcgaagcatggaaaacccacgtctggcaggatgaaaagaggcgtccaaagcgtagggagattcccctgaaagttctggtgaaggctgtgctattcgcttgtatgttgatgcggaaaaccatggcctctcgagtgcgagtcactatactctttgcaaccgaaaccgggaagtccgaggccctggcatgggatcttggcgcattgttcagttgtgccttcaatccaaagaaactgaaaaagtcactgttcatgttaaaggagcttaataataagttcagatatgccgtctttggtttaggcagcagtatgtacccacgattctgtgcgtttgctcacgacatcgaccagaaactgagtcaccttggagcgtctcagctaacccccatgggagaaggagacgagttgagcggccaggaggacgcttttaggtcctgggccgttcagacattcaaagctgcctgtgaaacattcgacgtgcgaggcaagcaacacatacagatcccaaagttatacacatcaaacgtcacatgggatccccatcactacagactggtccaggacagccagcccctgcccgctgcgtctacctcccccagaattccacctattctagcgagcagttcgggtctcgcccaggcctctagaccaagcgcagttagcgggtctaatggatccatgactccttctacgcgcgaatgcggcgaagccgcctag

SEQ ID NO: 13945 - DNA, 3462 bp, Artificial Sequence
  derived and/or modified sequence
atggcatgtccctggaagtttctgtttaagaccaagttccatcagtacgcgatgaatggcgaaaaagatatcaacaataacgtagagaaggcaccatgtgccaccagctcacccgtcacccaggacgacctgcaatatcacaatctatctaaacaacagaatgagagccctcagcctctcgttgaaaccgggaagaagagccctgaaagcctggtgaaactggatgcaaccccactgtcatcccctaggcacgtccggattaagaactgggggtctggtatgacctttcaagatacactgcatcacaaggcaaagggcatcctaacctgtaggtctaagtcctgtcttggctcaatcatgactcctaaatcattgacccggggcccccgcgataaaccaacccctcccgatgagttgttgcctcaggctattgagttcgttaaccagtattacggatcattcaaagaggccaagattgaggaacatctggcccgagtggaggccgtcacaaaggagattgagaccacagggacttaccagctcacgggggacgagctgattttcgccactaagcaggcctggaggaatgcccctaggtgcatcggcaggatccagtggtccaatctgcaggtgttcgatgccaggtcgtgcagtacagctcgagagatgttcgagcacatctgtcgtcacgtcagatattccacaaataacggaaacatccggtcagccattaccgtattccctcagaggtccgacggaaaacatgactttagagtctggaacgcgcaactcatccgatatgctggctaccaaatgccagacggcagtattcgtggtgacccagccaatgtggagtttacacagctgtgcatcgatctgggctggaagccaaagtacggacgctttgacgtggtcccactagtcttgcaagcgaatggacgcgacccggagctattcgaaatcccacccgatctggtccttgaggttgccatggagcatcccaagtacgaatggtttcgggagctcgagctaaaatggtacgccctcccggccgtggccaatatgctgcttgaggtcggcgggctggagttccccgggtgtcccttcaacggctggtacatggggacagagatcggcgtacgagatttttgcgatgttcaacgctataatatcctggaagaggtggggcgtagaatgggcctggaaacgcacaagctggcctctctttggaaagaccaagcagtcgtggaaatcaacatcgccgtgttacatagcttccagaagcagaatgtgacgataatggaccatcactcagctgcagaatctttcatgaaatatatgcagaacgaatatcgttcaaggggaggttgcccagctgactggatctggctggtgccacccatgtccgggtctatcactcctgtgttccatcaggagatgctgaactacgtactgtcgcccttttattactatcaagtagaggcttggaagacccatgtgtggcaagacgagaaaaggcgacccaagcggcgtgaaatccccctgaaggtgctcgtgaaggctgtcctttttgcctgtatgctgatgcgtaagaccatggcctcacgggttagggtgaccatcctgttcgcgactgaaacagggaagtcggaggccctcgcctgggacttaggggctttattcagctgcgctttcaatcctaaggtggtgtgtatggacaaatatagactttcttgcctcgaggaggagcgtctccttcttgtggtaacaagcacctttgggaacggagactgccctgggaatggcgagaagcttaaaaagtccctatttatgctgaaagagctgaacaacaaattcaggtacgctgtgttcgggttaggttctagcatgtaccctcgcttctgtgcatttgctcatgacattgatcaaaagctgtcacacctaggggccagtcagcttactcccatgggcgaaggggacgagctctctggccaggaagacgcatttcggtcatgggcggtgcaaacgtttaaggcagcttgtgaaactttcgacgtgcggggaaaacaacatatccaaattcccaagctgtacacaagtaatgttacctgggacccccatcactaccggctcgtccaagacagccaaccactagatttaagcaaagccctgagctctatgcacgccaagaatgtttttactatgcggctcaaatctagacagaatctgcagtcccccacttcttcccgcgcaactattctagtcgaattatcatgcgaggacgggcaggggctgaattatctgcctggtgagcatctaggagtatgtcccggtaaccaacccgccctcgtacagggcatcctggaacgggtggtcgacggcccaactccacatcaaaccgtacggttagaagcgctggacgagtccgggagttactgggtctcagataagaggctgcccccatgttcgttgtcccaggccctcacctattttctagacattactacacccccaactcaactcctactgcagaagctcgcacaggtcgccactgaggaacctgagcgacagcgtctagaggccctctgccaaccaagcgaatatagcaaatggaagttcaccaatagccccacttttctcgaagtcttagaagaattcccttctctccgtgtgagtgcaggctttctgttgagccaactacccatcctgaagccacgcttttacagcataagttcaagcagggatcatacacccacggaaatccatctgactgttgcagttgtgacctaccatacaagggacggtcaaggtcccctccaccacggagtttgcagtacttggctgaactccctcaagccccaggaccccgtcccctgcttcgtccggaacgcctcaggatttcatttaccggaggatccaagtcatccttgcatcctcatcggaccggggacaggaatcgcacccttcaggagcttttggcagcaacgcctgcatgattcacagcacaagggggtgcgtggcgggcgaatgacgttggtctttggatgtcgacgccctgatgaggatcacatctatcaggaggaaatgctagagatggcccagaagggcgtgcttcacgcggtccacaccgcgtacagccggctccccgggaagccaaaggtctacgtgcaggacattctgaggcagcagctggcctctgaagtactcagggtgctccacaaagaacctgggcacttgtacgtttgtggagacgttcggatggccagagatgtagcacacaccttgaagcagctcgttgccgctaagctgaagctaaacgaagaacaggttgaagattatttcttccagttgaaaagtcaaaagcggtatcatgaggacatttttggggctgttttcccttatgaggctaaaaaagacagggttgcggtgcagccatccagccttgaaatgagcgcactgtag

SEQ ID NO: 13946 - DNA, 3345 bp, Artificial Sequence
  derived and/or modified sequence
atggcttgtccttggaagttcctctttaaaactaaatttcatcagtacgcgatgaatggcgagaaggacatcaacaacaacgtggagaaagctccttgcgccactagtagccctgtgacacaggacgatctccagtaccacaacctgagtaaacagcagaatgagtctccccagccgctagtcgagacaggaaaaaagagcccggaatctctcgtcaaattggacgccacgcctctgtctagcccaaggcatgtccgcataaagaactgggggagtggtatgacgtttcaggatacattacaccataaagccaagggaatcctgacgtgtcgtagcaaatcttgtctaggttccataatgacacctaaatctctgacacgaggtccccgcgacaagccgacccctccggatgaactccttccccaagccatcgaattcgtcaatcagtactacggcagcttcaaagaggccaaaatcgaagagcacttggcacgtgtggaggctgtaactaaagagatcgagaccaccggcacatatcagttaacaggggatgagcttatcttcgccactaagcaggcctggcgcaatgcgccacgatgcatcggaaggatacagtggtctaacctgcaggtgttcgatgcccgatcatgctccacagccagagagatgttcgaacatatctgccgacatgttcgctattccaccaataacgggaacattagatccgccataacagtcttcccacaaaggtccgacggaaagcacgacttcagggtgtggaacgcccagttatgcatcgacctggggtggaagcctaacggccgggaccccgagttattcgaaatacccccagacctagtcctggaagtagccatggagcaccctaagtacgagtggtttagggaattggagctcaagtggtacgccctccctgccgtcgccaacatgcttctggaggtgggcggactggaatttccaggatgcccgttcaatggatggtacatgggtactgagattggcgtccgggatttctgtgacgtacagcggtacaatatcctggaagaggtgggaaggagaatgggcctggaaacgcataaattggcttccctgtggaaagaccaagccgtggttgaaatcaatatcgcagtgttacactctttccagaaacagaacgtaaccatcatggaccaccacagcgcagcagagtcttttatgaagtacatgcagaacgagtatcgcagccggggtggatgtccggctgattggatttggctagtccccccaatgtcagggtcaatcactcccgtcttccaccaggagatgctcaactacgtgttaagtcctttctattattaccaagtcgaagcatggaaaacgcatgtgtggcaggacgaaaagcggagaccgaagcgccgtgagataccattaaaggtgttagtaaaggcagtgctctttgcgtgtatgctgatgcggaaaactatggcatccagggtgagggtgactattctctttgccacagaaaccggaaagagtgaagctttggcctgggatttgggagccttattttcttgtgccttcaatcctaaggtggtttgcatggacaagtaccgcctgtcctgtctcgaggaagaacgcctcctgcttgtcgtcaccagcacattcggcaatggcgactgtcctgggaacggggagaagctgaaaaaatctctttttatgcttaaagagctgaataacaagttcagatatgccgttttcggcctgggctcctctatgtatcctcgcttctgcgccttcgcacatgacatcgaccagaagcttagtcatctcggggcaagtcagctgacgcccatgggggaaggggacgaactgagcggccaggaagacgctttcagaagttgggccgtccaaacatttaaagcagcttgcgaaacatttgatgtaaggggaaagcaacatattcagatacctaaactctacaccagcaatgtgacatgggacccgcatcactatcgactggtgcaggattcccagcccttggaccttagtaaggctttgagcagcatgcacgccaagaacgtctttaccatgcggttgaaatccaggcagaacttgcagagccccacatccagtcgtgcaacaatcctcgttgagctttcttgcgaagacggtcagggactaaattacttaccaggcgaacatttgggcgtctgcccaggcaatcaacccgcgctggttcaggggatccttgagagggtggtggacggccctacaccccaccagaccgtgcgcctggaggccctcgacgagtcgggctcatattgggtgtcagacaaacgtttaccaccatgctcactgtcacaggcactcacgtacttcctggacatcaccacaccccccactcaactcttgttacagaaattagcacaagtggctacagaggaaccggagcgacagaggctagaggcgctctgccaaccttccgagtatagcaagtggaaattcactaactcccccacatttttagaagtgttggaggaattccccagcttacgcgtctctgctggatttttactctcccagctgcccatactaaaacccagattttacagtatatctagctctcgagaccatacaccgactgaaattcatctaactgtcgctgtggtgacctatcatacaagagacggccagggccccctccaccacggagtctgctcaacctggttaaattccctgaagccacaggacccggttccctgtttcgtgcggaatgctagcggattccacctccccgaggatccctctcacccatgcattctcatcggccctggcacgggtattgcaccttttcgctctttttggcagcaacggttgcacgactcccagcataaaggcgtgcgcggaggaaggatgacactggtgttcggctgccgacggcccgacgaagaccatatctaccaggaggagatgctggagatggctcaaaaaggagtcctgcacgctgtgcacactgcttatagcaggctgcctggcaagcccaaggtctacgtgcaggacattctcagacagcagttagcttccgaagtcctcagagtcttgcacaaggagcctggacacctctacgtgtgcggcgacgtacgtatggcacgtgatgtagcccacacattgaaacagttggtggcggccaagttgaaacttaacgaggagcaggtcgaggactacttttttcaactgaagtcacagaagcggtatcatgaagacatcttcggggccgttttcccatacgaagccaaaaaagatcgagttgcagtccagccttcttccttggagatgtcagcattatag

SEQ ID NO: 13947 - DNA, 2190 bp, Artificial Sequence
  derived and/or modified sequence
atggcctgcccctggaagttcctgttcaagaccaagttccaccagtatgccatgaatggagagaaggacatcaacaacaacgtggagaaggccccctgtgccaccagcagccctgtgacccaggatgacctgcagtaccacaacctgagcaagcagcagaatgaaagcccccagcccctggtggagaccgggaagaagagccctgagagcctggtgaagctggatgccacccccctgagcagccccaggcatgtgcgcatcaagaactggggcagcggcatgaccttccaggacaccctgcaccacaaggccaagggcatcctgacctgccgcagcaagagctgcctgggcagcatcatgacccccaagagcctgacccggggcccccgggacaagcccaccccaccagatgagctgctgccccaggccatcgagtttgtgaaccagtactacggcagcttcaaggaggccaagattgaggagcacctggcccgggtggaggccgtgaccaaggagattgagaccaccggcacctaccagctgactggagatgagctgatctttgccaccaagcaggcctggagaaatgccccccgctgcatcggccgcatccagtggagcaacctgcaggtgtttgatgcccggagctgcagcacagcccgggagatgtttgagcacatctgccgccacgtgcgctacagcaccaacaatggaaacatccgcagcgccatcaccgtcttcccccagaggagtgatggcaagcatgacttccgggtgtggaatgcccagctgatccgctatgccggctaccagatgccagatggcagcatccggggggaccctgccaacgtggagttcacccagctgtgcatcgacctgggctggaagcccaagtatggccgctttgatgtggtgcccctggtgctgcaggccaacggccgggaccctgagctgtttgagatccccccagacctggtgctggaggtggccatggagcaccccaagtatgagtggttccgggagctggagctgaagtggtacgccctgcctgctgtggccaacatgctgctggaggtgggcggcctggagttccctggctgccccttcaacggctggtacatgggcacagaaattggagtgcgggacttctgtgatgtgcagcgctacaacatcctggaggaggtgggccgcaggatgggcctggagacccacaagctggccagcctgtggaaggaccaggccgtggtggagatcaacattgctgtgctgcacagcttccagaagcagaatgtgaccatcatggaccaccacagcgctgctgagagcttcatgaagtacatgcagaatgagtaccgcagcagaggaggctgcccagctgactggatctggctggtgccccccatgagcggcagcatcacccctgtgttccaccaggagatgctgaactacgtgctgagccccttctactactaccaggtggaggcctggaagacccacgtgtggcaggatgagaagaggcggcccaagaggcgggagatccccctgaaggtgctggtgaaggctgtgctgtttgcctgcatgctgatgaggaagaccatggccagccgggtgcgggtgaccatcctgtttgccacagaaacaggcaagtctgaggccctggcctgggacctgggcgccctcttcagctgtgccttcaaccccaagaagctgaagaagagcctcttcatgctgaaggagctgaacaacaagttccgctatgctgtgtttggcctgggcagctccatgtacccccgcttctgtgcctttgcccatgacatcgaccagaagctgagccacctgggcgccagccagctgacccccatgggagaaggagatgagctgagcggccaggaggatgccttccgctcctgggccgtgcagaccttcaaggccgcctgtgagacctttgatgtgcggggcaagcagcacatccagatccccaagctgtacaccagcaatgtgacctgggacccccaccactaccgcctggtgcaggacagccagcccctgcctgctgccagcaccagcccccgcatcccccccatcctggccagcagcagcggcctggcccaggccagccggcccagcgctgtgtctggcagcaatggctccatgacccccagcacccgggagtgtggggaggccgcctag

SEQ ID NO: 13948 - DNA, 3462 bp, Artificial Sequence
  derived and/or modified sequence
atggcctgcccctggaagttcctgttcaagaccaagttccaccagtatgccatgaatggagagaaggacatcaacaacaacgtggagaaggccccctgtgccaccagcagccctgtgacccaggatgacctgcagtaccacaacctgagcaagcagcagaatgaaagcccccagcccctggtggagaccgggaagaagagccctgagagcctggtgaagctggatgccacccccctgagcagccccaggcatgtgcgcatcaagaactggggcagcggcatgaccttccaggacaccctgcaccacaaggccaagggcatcctgacctgccgcagcaagagctgcctgggcagcatcatgacccccaagagcctgacccggggcccccgggacaagcccaccccaccagatgagctgctgccccaggccatcgagtttgtgaaccagtactacggcagcttcaaggaggccaagattgaggagcacctggcccgggtggaggccgtgaccaaggagattgagaccaccggcacctaccagctgactggagatgagctgatctttgccaccaagcaggcctggagaaatgccccccgctgcatcggccgcatccagtggagcaacctgcaggtgtttgatgcccggagctgcagcacagcccgggagatgtttgagcacatctgccgccacgtgcgctacagcaccaacaatggaaacatccgcagcgccatcaccgtcttcccccagaggagtgatggcaagcatgacttccgggtgtggaatgcccagctgatccgctatgccggctaccagatgccagatggcagcatccggggggaccctgccaacgtggagttcacccagctgtgcatcgacctgggctggaagcccaagtatggccgctttgatgtggtgcccctggtgctgcaggccaacggccgggaccctgagctgtttgagatccccccagacctggtgctggaggtggccatggagcaccccaagtatgagtggttccgggagctggagctgaagtggtacgccctgcctgctgtggccaacatgctgctggaggtgggcggcctggagttccctggctgccccttcaacggctggtacatgggcacagaaattggagtgcgggacttctgtgatgtgcagcgctacaacatcctggaggaggtgggccgcaggatgggcctggagacccacaagctggccagcctgtggaaggaccaggccgtggtggagatcaacattgctgtgctgcacagcttccagaagcagaatgtgaccatcatggaccaccacagcgctgctgagagcttcatgaagtacatgcagaatgagtaccgcagcagaggaggctgcccagctgactggatctggctggtgccccccatgagcggcagcatcacccctgtgttccaccaggagatgctgaactacgtgctgagccccttctactactaccaggtggaggcctggaagacccacgtgtggcaggatgagaagaggcggcccaagaggcgggagatccccctgaaggtgctggtgaaggctgtgctgtttgcctgcatgctgatgaggaagaccatggccagccgggtgcgggtgaccatcctgtttgccacagaaacaggcaagtctgaggccctggcctgggacctgggcgccctcttcagctgtgccttcaaccccaaggtggtgtgcatggacaagtaccgcctgagctgcctggaggaggagcggctgctgctggtggtgaccagcacctttggaaatggagactgccctggaaatggagagaagctgaagaagagcctcttcatgctgaaggagctgaacaacaagttccgctatgctgtgtttggcctgggcagctccatgtacccccgcttctgtgcctttgcccatgacatcgaccagaagctgagccacctgggcgccagccagctgacccccatgggagaaggagatgagctgagcggccaggaggatgccttccgctcctgggccgtgcagaccttcaaggccgcctgtgagacctttgatgtgcggggcaagcagcacatccagatccccaagctgtacaccagcaatgtgacctgggacccccaccactaccgcctggtgcaggacagccagcccctggacctgagcaaggccctgagctccatgcacgccaagaatgtgttcaccatgaggctgaagagccggcagaacctgcagagccccaccagcagccgggccaccatcctggtggagctgagctgtgaagatggccagggcctgaactacctgcctggagagcacctgggcgtgtgccccggcaaccagcctgccctggtgcagggcatcctggagcgggtggtggatggccccaccccccaccagacagtgcggctggaggccctggatgaaagtggcagctactgggtgtctgacaagaggctgcccccctgcagcctgagccaggccctgacctacttcctggacatcaccaccccacccacccagctgctgctgcagaagctggcccaggtggccacagaggagcctgagcggcagaggctggaggccctgtgccagcccagcgagtacagcaagtggaagttcaccaacagccccaccttcctggaggtgctggaggagttccccagcctgcgggtgtctgctggcttcctgctgagccagctgcccatcctgaagccccgcttctacagcatcagcagcagccgggaccacacccccacagagatccacctgactgtggccgtggtgacctaccacaccagagatggccagggccccctgcaccacggcgtgtgcagcacctggctgaacagcctgaagccccaggaccctgtgccctgctttgtgagaaatgccagcggcttccacctgcctgaggaccccagccacccctgcatcctgattggccctggcaccggcatcgcccccttccgctccttctggcagcagaggctgcatgacagccagcacaagggcgtgcggggcggccgcatgaccctggtgtttggctgcagaagaccagatgaggaccacatctaccaggaggagatgctggagatggcccagaagggcgtgctgcatgctgtgcacacagcctacagccggctgcccgggaagcccaaggtgtatgtgcaggacatcctgcggcagcagctggccagcgaggtgctgcgggtgctgcacaaggagcccggccacctgtatgtgtgtggagatgtgaggatggccagagatgtggcccacaccctgaagcagctggtggccgccaagctgaagctgaatgaggagcaggtggaggactacttcttccagctgaagagccagaagcgctaccacgaggacatctttggagctgtgttcccctatgaggccaagaaggacagagtggccgtgcagcccagcagcctggagatgtctgccctgtag

SEQ ID NO: 13949 - DNA, 3345 bp, Artificial Sequence
  derived and/or modified sequence
atggcctgcccctggaagttcctgttcaagaccaagttccaccagtatgccatgaatggagagaaggacatcaacaacaacgtggagaaggccccctgtgccaccagcagccctgtgacccaggatgacctgcagtaccacaacctgagcaagcagcagaatgaaagcccccagcccctggtggagaccgggaagaagagccctgagagcctggtgaagctggatgccacccccctgagcagccccaggcatgtgcgcatcaagaactggggcagcggcatgaccttccaggacaccctgcaccacaaggccaagggcatcctgacctgccgcagcaagagctgcctgggcagcatcatgacccccaagagcctgacccggggcccccgggacaagcccaccccaccagatgagctgctgccccaggccatcgagtttgtgaaccagtactacggcagcttcaaggaggccaagattgaggagcacctggcccgggtggaggccgtgaccaaggagattgagaccaccggcacctaccagctgactggagatgagctgatctttgccaccaagcaggcctggagaaatgccccccgctgcatcggccgcatccagtggagcaacctgcaggtgtttgatgcccggagctgcagcacagcccgggagatgtttgagcacatctgccgccacgtgcgctacagcaccaacaatggaaacatccgcagcgccatcaccgtcttcccccagaggagtgatggcaagcatgacttccgggtgtggaatgcccagctgtgcatcgacctgggctggaagcccaacggccgggaccctgagctgtttgagatccccccagacctggtgctggaggtggccatggagcaccccaagtatgagtggttccgggagctggagctgaagtggtacgccctgcctgctgtggccaacatgctgctggaggtgggcggcctggagttccctggctgccccttcaacggctggtacatgggcacagaaattggagtgcgggacttctgtgatgtgcagcgctacaacatcctggaggaggtgggccgcaggatgggcctggagacccacaagctggccagcctgtggaaggaccaggccgtggtggagatcaacattgctgtgctgcacagcttccagaagcagaatgtgaccatcatggaccaccacagcgctgctgagagcttcatgaagtacatgcagaatgagtaccgcagccggggcggctgcccagctgactggatctggctggtgccccccatgagcggcagcatcacccctgtgttccaccaggagatgctgaactacgtgctgagccccttctactactaccaggtggaggcctggaagacccacgtgtggcaggatgagaagagaagacccaagagaagagagatccccctgaaggtgctggtgaaggctgtgctgtttgcctgcatgctgatgaggaagaccatggccagccgggtgcgggtgaccatcctgtttgccacagagaccgggaagtctgaggccctggcctgggacctgggcgccctcttcagctgtgccttcaaccccaaggtggtgtgcatggacaagtaccgcctgagctgcctggaggaggagcggctgctgctggtggtgaccagcacctttggaaatggagactgccctggaaatggagagaagctgaagaagagcctcttcatgctgaaggagctgaacaacaagttccgctatgctgtgtttggcctgggcagctccatgtacccccgcttctgtgcctttgcccatgacatcgaccagaagctgagccacctgggcgccagccagctgacccccatgggagaaggagatgagctgagcggccaggaggatgccttccgctcctgggccgtgcagaccttcaaggccgcctgtgagacctttgatgtgcggggcaagcagcacatccagatccccaagctgtacaccagcaatgtgacctgggacccccaccactaccgcctggtgcaggacagccagcccctggacctgagcaaggccctgagctccatgcacgccaagaatgtgttcaccatgaggctgaagagccggcagaacctgcagagccccaccagcagccgggccaccatcctggtggagctgagctgtgaagatggccagggcctgaactacctgcccggggagcacctgggcgtgtgccccggcaaccagcctgccctggtgcagggcatcctggagcgggtggtggatggccccaccccccaccagacagtgcggctggaggccctggatgagagcggcagctactgggtgtctgacaagaggctgcccccctgcagcctgagccaggccctgacctacttcctggacatcaccaccccacccacccagctgctgctgcagaagctggcccaggtggccacagaggagcctgagcggcagaggctggaggccctgtgccagcccagcgagtacagcaagtggaagttcaccaacagccccaccttcctggaggtgctggaggagttccccagcctgcgggtgtctgctggcttcctgctgagccagctgcccatcctgaagccccgcttctacagcatcagcagcagccgggaccacacccccacagagatccacctgactgtggccgtggtgacctaccacaccagagatggccagggccccctgcaccacggcgtgtgcagcacctggctgaacagcctgaagccccaggaccctgtgccctgctttgtgagaaatgccagcggcttccacctgcctgaggaccccagccacccctgcatcctgattggccctggcactggaattgcccccttccgctccttctggcagcagaggctgcatgacagccagcacaagggcgtgcggggcggccgcatgaccctggtgtttggctgccggcggccagatgaggaccacatctaccaggaggagatgctggagatggcccagaagggcgtgctgcatgctgtgcacacagcctacagccggctgcccgggaagcccaaggtgtatgtgcaggacatcctgcggcagcagctggccagcgaggtgctgcgggtgctgcacaaggagcccggccacctgtatgtgtgtggagatgtgaggatggccagagatgtggcccacaccctgaagcagctggtggccgccaagctgaagctgaatgaggagcaggtggaggactacttcttccagctgaagagccagaagcgctaccacgaggacatctttggagctgtgttcccctatgaggccaagaaggacagagtggccgtgcagcccagcagcctggagatgtctgccctgtag

SEQ ID NO: 13950 - DNA, 2190 bp, Artificial Sequence
  derived and/or modified sequence
atggcctgcccctggaagttcctgttcaagaccaagttccaccagtacgccatgaacggcgagaaagatatcaacaacaacgtggaaaaggccccatgcgccaccagcagccccgtgacccaggatgacttacagtatcataacctcagcaagcaacagaatgaatccccccaacccctcgtggagacaggaaagaaatctcctgaaagtctcgtgaagttagacgcgaccccactatccagtcctcgccatgtgagaattaaaaactggggctccgggatgacatttcaagatacccttcaccataaggccaaaggcatcttgacgtgtagatccaagtcatgcctgggcagtataatgacgccaaagagcttaacccgcgggcccagggataaacctactcctcctgacgagttgctcccccaagctatagagtttgtcaatcagtactatggatcttttaaggaggctaagatcgaggagcatctggccagggtcgaagccgttacgaaggagatcgaaaccacaggtacctatcagctgacgggcgatgagctgatatttgccaccaagcaagcctggcggaacgcccctcgatgtattggacgaatccagtggagtaacctgcaggtatttgatgcccgcagctgttctacagccagagaaatgttcgagcatatctgtcgccacgtccggtactccaccaataacggcaatattcgcagtgctataactgtgttcccccaaagaagtgacggtaagcatgacttccgcgtgtggaatgcccagctgatccggtacgctggctaccagatgcccgatggcagtatacggggtgaccctgctaatgtagagtttacacagttatgtattgatctcgggtggaaacccaagtatggaaggttcgatgttgtgccccttgttctgcaggccaatggcagagaccccgagctgttcgagatcccaccagatttagtcctggaggttgcgatggagcaccctaagtatgagtggtttagggagcttgagctcaagtggtacgccctgcctgcggtagcaaatatgctgctcgaagtgggcggtttggaattccccggatgcccatttaatggctggtatatgggaaccgagataggtgtaagagatttctgcgacgtgcagcgctacaacattctcgaagaggtcggacgacggatgggcctggagactcataagctagccagtttgtggaaggaccaagccgtggtcgaaattaatatcgccgtgctgcattccttccagaagcagaatgtaaccatcatggaccaccatagtgcagcggagtccttcatgaagtatatgcaaaatgagtatcggagcagaggagggtgtccggctgactggatctggctggtccctcccatgtcggggagcatcacacctgtcttccaccaggagatgctgaactatgtgctgagcccattctactactaccaggtcgaggcctggaaaactcacgtgtggcaggatgaaaaaagacggccaaaacggcgggagatccccttgaaagtgctggtgaaagccgtactgttcgcatgtatgcttatgaggaagacaatggcatctagggttcgcgtcaccatactgttcgccaccgagacgggtaagtctgaagcgcttgcgtgggatctaggcgcacttttctcctgtgccttcaaccccaagaaacttaagaaaagcctgtttatgctgaaagaactgaacaataagttccggtacgccgtgtttggtcttggttctagtatgtatcctcgattctgtgcgtttgctcacgatattgaccaaaaactgtcccacctcggagcttcccagcttactcccatgggtgaaggcgatgaactgtcaggccaggaggacgccttcaggagctgggccgtccagaccttcaaggccgcctgcgagacctttgacgtgagaggcaaacagcacatccaaattcctaagctttacacgagcaacgtcacatgggaccctcatcattataggctagtacaggatagtcaaccactgcccgcggcatcgacttccccaaggattccccctatcctggcttcgtcttctggcctggcccaagcttccaggccctcagccgttagtggctctaatggctctatgactccatccacgagggagtgtggcgaggccgcctag

SEQ ID NO: 13951 - DNA, 3462 bp, Artificial Sequence
  derived and/or modified sequence
atggcctgcccctggaagttcctgttcaagaccaagttccaccagtatgcaatgaacggggaaaaggacattaataacaacgttgaaaaggccccatgtgccacatcttcccctgtaacacaggacgacttgcagtaccataacctgagcaaacagcagaatgagtccccacaacccttagtcgaaacaggtaagaagtcacctgagtcacttgttaaactggatgccactccactcagttccccaaggcacgtcaggatcaaaaactggggctctggcatgacttttcaagacacactccaccacaaagcgaagggaatcctcacctgccgctcaaagagctgtctcggctcaatcatgactcctaaaagcctcactagaggtcccagagacaagccaaccccaccagatgaactgctgccccaagcgatcgagtttgtgaatcaatattacgggtctttcaaagaagcgaaaattgaagagcacctggcacgtgtggaggctgtgaccaaagagatcgagaccacagggacctatcagctgacaggtgacgaattgattttcgccaccaaacaagcttggcgcaatgccccccgctgcatcgggcgaatccaatggagcaatctacaagtctttgatgccagatcttgcagcacagcccgggaaatgttcgaacacatttgcagacacgtgcgctacagcaccaataacggaaacatccggagcgccattaccgtgttcccgcagcgcagcgacggaaagcacgattttagggtttggaatgcccagttgattagatatgcaggttaccagatgcctgatggcagcatccgaggcgaccccgccaacgttgaattcacgcagctttgcatcgatctgggctggaagcctaagtacggcaggtttgacgtcgtgcccctagtgctccaggcaaatggtcgagatcctgaactgttcgaaatcccccccgaccttgttctcgaggtggccatggagcatcccaagtatgagtggtttcgagagctggagttaaaatggtacgcactgcctgcagttgccaacatgctgttagaggtggggggcctcgagttccccgggtgtccctttaacggctggtatatgggcacggagataggcgtgagagatttttgtgatgtccagcgctataatatcctggaagaagtcggtcggcgtatgggcctggaaacccacaagcttgctagcctttggaaagatcaggcggttgtagagatcaatattgctgtacttcactccttccagaaacagaatgtgactatcatggatcaccacagcgcggcagagtcctttatgaagtacatgcagaatgaatatcggtcacgtggggggtgcccagccgactggatctggctcgtccctcctatgtccggcagtatcactcctgtcttccaccaggagatgcttaactacgtgctgtccccgttctattactaccaggtggaggcctggaagacacatgtgtggcaagacgaaaagagacgccctaaacgtcgggagattcctctcaaagttcttgtgaaggccgttttgtttgcgtgtatgcttatgagaaagaccatggccagtcgcgtacgcgtcaccatactcttcgctactgagactgggaagtccgaagctctggcgtgggatctgggagcactgttttcttgtgcgttcaatccgaaagtggtctgcatggataagtatagactgtcctgtttggaagaagaacgactactactcgtagttacctcaacatttggaaacggggactgtccgggcaacggcgagaaattgaagaagtccctttttatgcttaaggagctgaataacaagttcaggtatgccgtgttcgggttaggttcctcaatgtacccaagattttgcgcttttgcgcatgacatcgatcagaaattgtcacacctcggggccagtcaactgacccctatgggagaaggagacgagttgtcaggtcaggaggacgcgttcagaagttgggctgtccaaacctttaaggcagcttgcgagacgtttgacgtgcggggcaagcagcatatccagatccccaaactgtatacatcaaatgtgacctgggacccccatcactatagactggttcaagattcccagccactagatctgagcaaggcactgagcagcatgcatgctaaaaatgtgtttacaatgcgactgaagtcccggcaaaatcttcagagtcccaccagctcacgagccaccatcctggtggagttatcctgtgaggacgggcaaggattaaactaccttcccggagagcacctcggtgtctgccccggcaatcagcctgcactggtccagggaatactggaaagagtcgtggacgggcctacacctcaccagaccgtcagactcgaggcactggacgagtctgggagctattgggtgtcagacaagaggctgccaccatgcagcttatcacaagctctaacatacttccttgacatcacaacaccgcctacgcagctgctcctccagaaactggcacaagtagctaccgaggaaccggaaagacagcgtctggaggccctctgccagcccagcgagtattctaagtggaaattcactaatagtcctacatttctggaagttttggaggagttcccaagtctgcgtgtgagcgcagggttcctgctcagccagttgcctatcctgaagcctcgcttttactctatttcctccagccgggatcacactcctaccgaaatccacctgacagtcgccgtcgtcacttatcatacacgagatggccaagggcccctccaccacggcgtgtgttcaacttggctgaattccctgaagccgcaggaccctgtgccgtgcttcgtgcgaaacgcctccggcttccacctgcctgaggaccctagccacccatgcattttaattggacctggtaccggtatcgcgccattccggtccttctggcaacagagactgcatgactcgcagcacaaaggagtccgcggaggcagaatgaccctcgtgttcggatgccgtaggcccgacgaggatcatatataccaggaagaaatgcttgaaatggcgcagaagggggtgttgcatgcagttcatacagcttactctagactgccagggaagcccaaggtctatgtccaagacatcttgcgccagcagttggccagcgaggtccttcgcgtgctacataaagaaccaggccacctgtacgtgtgtggggatgtcaggatggccagagatgttgcgcacactcttaaacagttggttgccgccaaactgaaacttaacgaggagcaggtggaagattattttttccagcttaaaagtcagaaacgatatcatgaggacatttttggtgcagtcttcccttatgaggccaaaaaggatcgcgtggccgtgcagccctcttctctggaaatgagcgcactctag

SEQ ID NO: 13952 - DNA, 3345 bp, Artificial Sequence
  derived and/or modified sequence
atggcctgcccctggaagttcctgttcaagaccaagttccaccagtacgccatgaacggggaaaaggacatcaacaacaacgtggagaaggccccatgcgccacatcctctcccgtcacacaggacgatctgcagtaccacaatttgagcaaacagcagaacgaatccccacaacccttggtggagacaggtaaaaaatctccagagagtcttgtcaagctcgacgctacacctttgagcagtccccgccatgtgcggatcaagaactggggtagtgggatgacatttcaggacactctgcaccacaaggcgaaaggcatcctgacctgtcgcagcaagtcttgcttggggagcattatgactcccaaatccctgacccgaggcccaagagataagcctacccctccggacgaacttcttccacaagcaattgagttcgtcaaccagtattacggtagctttaaagaagcaaagatcgaagaacatcttgccagagtagaggccgtgaccaaggagatcgaaaccacaggcacgtaccagctgacgggggatgaactgatctttgcgactaagcaagcgtggaggaatgcacctcggtgcattggcaggatccagtggagcaacctgcaggtatttgatgcccgaagctgcagtactgcccgggaaatgtttgagcacatctgcagacatgtgaggtacagcacaaataatggcaacattaggagcgctattaccgtattcccgcagagaagcgacggcaagcacgattttcgcgtgtggaatgctcaactttgcatagacttagggtggaaacctaatggaagggacccagaactgttcgagatccctcctgacctggtactggaggtcgcaatggagcatcctaaatatgagtggtttagggagcttgaactgaagtggtacgctttgcccgcggtcgctaacatgctgctcgaagtgggtggcttagaatttcctgggtgtccattcaatggctggtacatgggcacagagataggagttcgggacttttgtgatgtgcaacgatacaatatcctggaagaagtgggacggaggatgggtctagagacacacaagctcgcttcactgtggaaagatcaggcggttgtggaaattaacattgccgttctgcacagctttcaaaaacagaacgtcacaatcatggaccaccacagtgccgctgagtcttttatgaaatacatgcagaacgagtatcgatctcgggggggatgccctgctgactggatatggttagtcccccctatgtccggctcaatcacaccagtgttccaccaagaaatgctcaactatgttctgtcccccttttactactatcaggtggaggcctggaaaacacatgtttggcaggacgagaaacggcgccccaagaggagagagatcccactgaaggtgttagtcaaagctgtgctcttcgcgtgcatgctaatgaggaaaactatggctagtcgcgttcgggtaacaattttatttgccacagaaactggtaaatcagaggcattggcctgggacctcggagctctgttctcgtgtgcctttaatcccaaggttgtctgcatggataagtacagattgtcttgcctcgaggaggaaagactcctgttagttgttacttctaccttcggtaatggggactgtcccgggaacggagagaagctgaaaaagtccttgtttatgctgaaggagctaaacaacaagtttcggtacgcagtgttcggccttggctcttctatgtatcctcggttctgcgcattcgcccacgacatagaccaaaagctgtcccaccttggggccagtcaattaacaccaatgggcgagggcgacgagttaagcggtcaggaagatgctttcaggtcttgggcagtgcaaacctttaaagctgcctgcgagactttcgatgtgagaggtaagcagcatatccaaattcccaagctttacacttcaaacgtgacttgggaccctcatcattaccggctcgtgcaggacagccagccattggacctgagcaaggctctttcctccatgcatgcaaagaacgtgttcacgatgaggctgaaaagtcgacaaaacctccaaagtccaacgagttctagggcaactatccttgtggagctgtcgtgtgaggatgggcaagggcttaattacttacctggagaacatcttggtgtttgcccagggaaccagccggctctggtgcaaggaattttggagcgggtcgtcgatggccccaccccacaccagacggtacgcctggaagccctggatgagagcggaagttactgggtcagtgacaagaggctgccaccatgttctcttagccaagctcttacctatttcctggatatcacaacccccccaacccagctccttcttcaaaaattagcccaggtggccaccgaagaacccgaaagacagaggttggaggcactgtgtcagccttccgaatattctaaatggaaatttaccaactctccaaccttcctcgaagttctggaggagtttccctcgcttagggtgtccgcaggctttctgctatcccagcttcccatactaaagccccggttctattccatttctagcagtcgggatcacactccaactgaaatccaccttacagtagctgtcgtgacatatcacactcgggatgggcaggggcccctgcatcatggcgtgtgttcaacctggctgaattccttaaaacctcaggacccagttccctgtttcgtgaggaacgcctccggcttccacctccccgaagaccctagtcacccttgcattctgatcggcccaggaacgggaattgcaccttttcgttcgttctggcagcagagacttcacgattcccaacataagggggttagagggggtaggatgaccctagtcttcgggtgcaggcgaccagacgaggaccatatataccaggaggagatgcttgaaatggcacaaaaaggagtgttacacgccgtccataccgcttattcccgcttgcctgggaagccaaaagtctatgtccaggacatattacgccagcagctcgccagcgaggtgctcagagtgcttcacaaagaaccggggcacctttacgtttgcggagacgtccgcatggcgcgggatgtcgcccatacactcaagcagctggttgcggcaaaactcaagctcaatgaggagcaggtcgaagattatttcttccagctgaagtctcaaaaaaggtaccacgaggacatttttggggccgttttcccatatgaggctaaaaaagatagagtggcggtgcagccctctagcttggaaatgtcagccttgtag

SEQ ID NO: 13953 - DNA, 2577 bp, Artificial Sequence
  derived and/or modified sequence
aactttgtagcgagtcgaaaactgaggctccggccgcagagaactcagcctcattcctgctttaaaatctctcggccacctttgatgaggggactgggcagttctagacagtcccgaagttctcaaggcacaggtctcttcctggtttgactgtccttaccccggggaggcagtgcagccagctgcaagccccacagtgaagaacatctgagctcaaatccagataagtgacataagtgacctgctttgtaaagccatagagatggcctgtccttggaaatttctgttcaagaccaaattccaccagtatgcaatgaatggggaaaaagacatcaacaacaatgtggagaaagccccctgtgccacctccagtccagtgacacaggatgaccttcagtatcacaacctcagcaagcagcagaatgagtccccgcagcccctcgtggagacgggaaagaagtctccagaatctctggtcaagctggatgcaaccccattgtcctccccacggcatgtgaggatcaaaaactggggcagcgggatgactttccaagacacacttcaccataaggccaaagggattttaacttgcaggtccaaatcttgcctggggtccattatgactcccaaaagtttgaccagaggacccagggacaagcctacccctccagatgagcttctacctcaagctatcgaatttgtcaaccaatattacggctccttcaaagaggcaaaaatagaggaacatctggccagggtggaagcggtaacaaaggagatagaaacaacaggaacctaccaactgacgggagatgagctcatcttcgccaccaagcaggcctggcgcaatgccccacgctgcattgggaggatccagtggtccaacctgcaggtcttcgatgcccgcagctgttccactgcccgggaaatgtttgaacacatctgcagacacgtgcgttactccaccaacaatggcaacatcaggtcggccatcaccgtgttcccccagcggagtgatggcaagcacgacttccgggtgtggaatgctcagctcatccgctatgctggctaccagatgccagatggcagcatcagaggggaccctgccaacgtggaattcactcagctgtgcatcgacctgggctggaagcccaagtacggccgcttcgatgtggtccccctggtcctgcaggccaatggccgtgaccctgagctcttcgaaatcccacctgaccttgtgcttgaggtggccatggaacatcccaaatacgagtggtttcgggaactggagctaaagtggtacgccctgcctgcagtggccaacatgctgcttgaggtgggcggcctggagttcccagggtgccccttcaatggctggtacatgggcacagagatcggagtccgggacttctgtgacgtccagcgctacaacatcctggaggaagtgggcaggagaatgggcctggaaacgcacaagctggcctcgctctggaaagaccaggctgtcgttgagatcaacattgctgtgctccatagtttccagaagcagaatgtgaccatcatggaccaccactcggctgcagaatccttcatgaagtacatgcagaatgaataccggtcccgtgggggctgcccggcagactggatttggctggtccctcccatgtctgggagcatcacccccgtgtttcaccaggagatgctgaactacgtcctgtcccctttctactactatcaggtagaggcctggaaaacccatgtctggcaggacgagaagcggagacccaagagaagagagattccattgaaagtcttggtcaaagctgtgctctttgcctgtatgctgatgcgcaagacaatggcgtcccgagtcagagtcaccatcctctttgcgacagagacaggaaaatcagaggcgctggcctgggacctgggggccttattcagctgtgccttcaaccccaagaaactgaagaaatcgctcttcatgctgaaagagctcaacaacaaattcaggtacgctgtgtttggcctcggctccagcatgtaccctcggttctgcgcctttgctcatgacattgatcagaagctgtcccacctgggggcctctcagctcaccccgatgggagaaggggatgagctcagtgggcaggaggacgccttccgcagctgggccgtgcaaaccttcaaggcagcctgtgagacgtttgatgtccgaggcaaacagcacattcagatccccaagctctacacctccaatgtgacctgggacccgcaccactacaggctcgtgcaggactcacagcctttgccagcggcttccacctccccgaggatccctcccatccttgcatcctcatcgggcctggcacaggcatcgcgcccttccgcagtttctggcagcaacggctccatgactcccagcacaagggagtgcggggaggccgcatgaccttggtgtttgggtgccgccgcccagatgaggaccacatctaccaggaggagatgctggagatggcccagaagggggtgctgcatgcggtgcacacagcctattcccgcctgcctggcaagccc

SEQ ID NO: 13954 - DNA, 4176 bp, Artificial Sequence
  derived and/or modified sequence
tccggccgcagagaactcagcctcattcctgctttaaaatctctcggccacctttgatgaggggactgggcagttctagacagtcccgaagttctcaaggcacaggtctcttcctggtttgactgtccttaccccggggaggcagtgcagccagctgcaagccccacagtgaagaacatctgagctcaaatccagataagtgacataagtgacctgctttgtaaagccatagagatggcctgtccttggaaatttctgttcaagaccaaattccaccagtatgcaatgaatggggaaaaagacatcaacaacaatgtggagaaagccccctgtgccacctccagtccagtgacacaggatgaccttcagtatcacaacctcagcaagcagcagaatgagtccccgcagcccctcgtggagacgggaaagaagtctccagaatctctggtcaagctggatgcaaccccattgtcctccccacggcatgtgaggatcaaaaactggggcagcgggatgactttccaagacacacttcaccataaggccaaagggattttaacttgcaggtccaaatcttgcctggggtccattatgactcccaaaagtttgaccagaggacccagggacaagcctacccctccagatgagcttctacctcaagctatcgaatttgtcaaccaatattacggctccttcaaagaggcaaaaatagaggaacatctggccagggtggaagcggtaacaaaggagatagaaacaacaggaacctaccaactgacgggagatgagctcatcttcgccaccaagcaggcctggcgcaatgccccacgctgcattgggaggatccagtggtccaacctgcaggtcttcgatgcccgcagctgttccactgcccgggaaatgtttgaacacatctgcagacacgtgcgttactccaccaacaatggcaacatcaggtcggccatcaccgtgttcccccagcggagtgatggcaagcacgacttccgggtgtggaatgctcagctcatccgctatgctggctaccagatgccagatggcagcatcagaggggaccctgccaacgtggaattcactcagctgtgcatcgacctgggctggaagcccaagtacggccgcttcgatgtggtccccctggtcctgcaggccaatggccgtgaccctgagctcttcgaaatcccacctgaccttgtgcttgaggtggccatggaacatcccaaatacgagtggtttcgggaactggagctaaagtggtacgccctgcctgcagtggccaacatgctgcttgaggtgggcggcctggagttcccagggtgccccttcaatggctggtacatgggcacagagatcggagtccgggacttctgtgacgtccagcgctacaacatcctggaggaagtgggcaggagaatgggcctggaaacgcacaagctggcctcgctctggaaagaccaggctgtcgttgagatcaacattgctgtgctccatagtttccagaagcagaatgtgaccatcatggaccaccactcggctgcagaatccttcatgaagtacatgcagaatgaataccggtcccgtgggggctgcccggcagactggatttggctggtccctcccatgtctgggagcatcacccccgtgtttcaccaggagatgctgaactacgtcctgtcccctttctactactatcaggtagaggcctggaaaacccatgtctggcaggacgagaagcggagacccaagagaagagagattccattgaaagtcttggtcaaagctgtgctctttgcctgtatgctgatgcgcaagacaatggcgtcccgagtcagagtcaccatcctctttgcgacagagacaggaaaatcagaggcgctggcctgggacctgggggccttattcagctgtgccttcaaccccaaggttgtctgcatggataagtacaggctgagctgcctggaggaggaacggctgctgttggtggtgaccagtacgtttggcaatggagactgccctggcaatggagagaaactgaagaaatcgctcttcatgctgaaagagctcaacaacaaattcaggtacgctgtgtttggcctcggctccagcatgtaccctcggttctgcgcctttgctcatgacattgatcagaagctgtcccacctgggggcctctcagctcaccccgatgggagaaggggatgagctcagtgggcaggaggacgccttccgcagctgggccgtgcaaaccttcaaggcagcctgtgagacgtttgatgtccgaggcaaacagcacattcagatccccaagctctacacctccaatgtgacctgggacccgcaccactacaggctcgtgcaggactcacagcctttggacctcagcaaagccctcagcagcatgcatgccaagaacgtgttcaccatgaggctcaaatctcggcagaatctacaaagtccgacatccagccgtgccaccatcctggtggaactctcctgtgaggatggccaaggcctgaactacctgccgggggagcaccttggggtttgcccaggcaaccagccggccctggtccaaggtatcctggagcgagtggtggatggccccacaccccaccagacagtgcgcctggaggccctggatgagagtggcagctactgggtcagtgacaagaggctgcccccctgctcactcagccaggccctcacctacttcctggacatcaccacacccccaacccagctgctgctccaaaagctggcccaggtggccacagaagagcctgagagacagaggctggaggccctgtgccagccctcagagtacagcaagtggaagttcaccaacagccccacattcctggaggtgctagaggagttcccgtccctgcgggtgtctgctggcttcctgctttcccagctccccattctgaagcccaggttctactccatcagctcctcccgggatcacacgcccacagagatccacctgactgtggccgtggtcacctaccacacccgagatggccagggtcccctgcaccacggcgtctgcagcacatggctcaacagcctgaagccccaagacccagtgccctgctttgtgcggaatgccagcggcttccacctccccgaggatccctcccatccttgcatcctcatcgggcctggcacaggcatcgcgcccttccgcagtttctggcagcaacggctccatgactcccagcacaagggagtgcggggaggccgcatgaccttggtgtttgggtgccgccgcccagatgaggaccacatctaccaggaggagatgctggagatggcccagaagggggtgctgcatgcggtgcacacagcctattcccgcctgcctggcaagcccaaggtctatgttcaggacatcctgcggcagcagctggccagcgaggtgctccgtgtgctccacaaggagccaggccacctctatgtttgcggggatgtgcgcatggcccgggacgtggcccacaccctgaagcagctggtggctgccaagctgaaattgaatgaggagcaggtcgaggactatttctttcagctcaagagccagaagcgctatcacgaagatatctttggtgctgtatttccttacgaggcgaagaaggacagggtggcggtgcagcccagcagcctggagatgtcagcgctctgagggcctacaggaggggttaaagctgccggcacagaacttaaggatggagccagctctgcattatctgaggtcacagggcctggggagatggaggaaagtgatatcccccagcctcaagtcttatttcctcaacgttgctccccatcaagccctttacttgacctcctaacaagtagcaccctggattgatcggagcctcctctctcaaactggggcctccctggtcccttggagacaaaatcttaaatgccaggcctggcaagtgggtgaaagatggaacttgctgctgagtgcaccacttcaagtgaccaccaggaggtgctatcgcaccactgtgtatttaactgccttgtgtacagttatttatgcctctgtatttaaaaaactaacacccagtctgttccccatggccacttgggtcttccctgtatgattccttgatggagatatttacatgaattgcattttactttaatcaca

SEQ ID NO: 13955 - DNA, 4089 bp, Artificial Sequence
  derived and/or modified sequence
ataactttgtagcgagtcgaaaactgaggctccggccgcagagaactcagcctcattcctgctttaaaatctctcggccacctttgatgaggggactgggcagttctagacagtcccgaagttctcaaggcacaggtctcttcctggtttgactgtccttaccccggggaggcagtgcagccagctgcaagccccacagtgaagaacatctgagctcaaatccagataagtgacataagtgacctgctttgtaaagccatagagatggcctgtccttggaaatttctgttcaagaccaaattccaccagtatgcaatgaatggggaaaaagacatcaacaacaatgtggagaaagccccctgtgccacctccagtccagtgacacaggatgaccttcagtatcacaacctcagcaagcagcagaatgagtccccgcagcccctcgtggagacgggaaagaagtctccagaatctctggtcaagctggatgcaaccccattgtcctccccacggcatgtgaggatcaaaaactggggcagcgggatgactttccaagacacacttcaccataaggccaaagggattttaacttgcaggtccaaatcttgcctggggtccattatgactcccaaaagtttgaccagaggacccagggacaagcctacccctccagatgagcttctacctcaagctatcgaatttgtcaaccaatattacggctccttcaaagaggcaaaaatagaggaacatctggccagggtggaagcggtaacaaaggagatagaaacaacaggaacctaccaactgacgggagatgagctcatcttcgccaccaagcaggcctggcgcaatgccccacgctgcattgggaggatccagtggtccaacctgcaggtcttcgatgcccgcagctgttccactgcccgggaaatgtttgaacacatctgcagacacgtgcgttactccaccaacaatggcaacatcaggtcggccatcaccgtgttcccccagcggagtgatggcaagcacgacttccgggtgtggaatgctcagctgtgcatcgacctgggctggaagcccaatggccgtgaccctgagctcttcgaaatcccacctgaccttgtgcttgaggtggccatggaacatcccaaatacgagtggtttcgggaactggagctaaagtggtacgccctgcctgcagtggccaacatgctgcttgaggtgggcggcctggagttcccagggtgccccttcaatggctggtacatgggcacagagatcggagtccgggacttctgtgacgtccagcgctacaacatcctggaggaagtgggcaggagaatgggcctggaaacgcacaagctggcctcgctctggaaagaccaggctgtcgttgagatcaacattgctgtgctccatagtttccagaagcagaatgtgaccatcatggaccaccactcggctgcagaatccttcatgaagtacatgcagaatgaataccggtcccgtgggggctgcccggcagactggatttggctggtccctcccatgtctgggagcatcacccccgtgtttcaccaggagatgctgaactacgtcctgtcccctttctactactatcaggtagaggcctggaaaacccatgtctggcaggacgagaagcggagacccaagagaagagagattccattgaaagtcttggtcaaagctgtgctctttgcctgtatgctgatgcgcaagacaatggcgtcccgagtcagagtcaccatcctctttgcgacagagacaggaaaatcagaggcgctggcctgggacctgggggccttattcagctgtgccttcaaccccaaggttgtctgcatggataagtacaggctgagctgcctggaggaggaacggctgctgttggtggtgaccagtacgtttggcaatggagactgccctggcaatggagagaaactgaagaaatcgctcttcatgctgaaagagctcaacaacaaattcaggtacgctgtgtttggcctcggctccagcatgtaccctcggttctgcgcctttgctcatgacattgatcagaagctgtcccacctgggggcctctcagctcaccccgatgggagaaggggatgagctcagtgggcaggaggacgccttccgcagctgggccgtgcaaaccttcaaggcagcctgtgagacgtttgatgtccgaggcaaacagcacattcagatccccaagctctacacctccaatgtgacctgggacccgcaccactacaggctcgtgcaggactcacagcctttggacctcagcaaagccctcagcagcatgcatgccaagaacgtgttcaccatgaggctcaaatctcggcagaatctacaaagtccgacatccagccgtgccaccatcctggtggaactctcctgtgaggatggccaaggcctgaactacctgccgggggagcaccttggggtttgcccaggcaaccagccggccctggtccaaggtatcctggagcgagtggtggatggccccacaccccaccagacagtgcgcctggaggccctggatgagagtggcagctactgggtcagtgacaagaggctgcccccctgctcactcagccaggccctcacctacttcctggacatcaccacacccccaacccagctgctgctccaaaagctggcccaggtggccacagaagagcctgagagacagaggctggaggccctgtgccagccctcagagtacagcaagtggaagttcaccaacagccccacattcctggaggtgctagaggagttcccgtccctgcgggtgtctgctggcttcctgctttcccagctccccattctgaagcccaggttctactccatcagctcctcccgggatcacacgcccacagagatccacctgactgtggccgtggtcacctaccacacccgagatggccagggtcccctgcaccacggcgtctgcagcacatggctcaacagcctgaagccccaagacccagtgccctgctttgtgcggaatgccagcggcttccacctccccgaggatccctcccatccttgcatcctcatcgggcctggcacaggcatcgcgcccttccgcagtttctggcagcaacggctccatgactcccagcacaagggagtgcggggaggccgcatgaccttggtgtttgggtgccgccgcccagatgaggaccacatctaccaggaggagatgctggagatggcccagaagggggtgctgcatgcggtgcacacagcctattcccgcctgcctggcaagcccaaggtctatgttcaggacatcctgcggcagcagctggccagcgaggtgctccgtgtgctccacaaggagccaggccacctctatgtttgcggggatgtgcgcatggcccgggacgtggcccacaccctgaagcagctggtggctgccaagctgaaattgaatgaggagcaggtcgaggactatttctttcagctcaagagccagaagcgctatcacgaagatatctttggtgctgtatttccttacgaggcgaagaaggacagggtggcggtgcagcccagcagcctggagatgtcagcgctctgagggcctacaggaggggttaaagctgccggcacagaacttaaggatggagccagctctgcattatctgaggtcacagggcctggggagatggaggaaagtgatatcccccagcctcaagtcttatttcctcaacgttgctccccatcaagccctttacttgacctcctaacaagtagcaccctggattgatcggagcctcctctctcaaactggggcctccctggtcccttggagacaaaatcttaaatgccaggcctggcaagtgggtgaaagatggaacttgctgctgagtgcaccacttcaagtgaccaccaggaggtgctatcgcaccactgtgtatttaactgccttgtgtacagttatttatgcctctgtatttaaaaaactaacacccagtctgttccccatggccacttgggtcttccctgtatgattccttgatggagatatttacatgaattgcattttactttaatcaca

SEQ ID NO: 13956 - DNA, 2190 bp, Artificial Sequence
  derived and/or modified sequence
atggcctgcccctggaagttcttgttcaagaccaagttccaccagtacgcaatgaatggcgagaaggatatcaataataacgtggagaaggcgccatgcgccaccagttcacctgtgacgcaggatgatctacagtaccacaacctgagtaagcagcaaaacgagagtccccaacctctcgtggagacaggaaaaaaaagccccgagtctctcgtgaaactcgacgctacccctctctccagtcctcgccacgttcgcattaaaaactgggggtcagggatgacattccaagacactctccaccataaagcaaaaggtattctgacttgccgtagtaagtcttgtctggggagcatcatgactcccaagagcttgacacgcggacccagggacaagcccacacctcccgatgaactgctccctcaggccatcgaatttgtaaaccagtactacggctctttcaaagaagccaaaatcgaggagcatctggctagggtagaagccgtgacaaaggaaattgagacaactggcacgtaccagctgacgggggacgaactgatttttgccacaaagcaagcatggcgcaacgctccccgatgcatcggccgaattcagtggagcaacctacaggtattcgatgctcggtcttgtagcacagctagagagatgtttgagcacatttgccgacacgtgaggtactccactaacaacggaaatattcgtagcgctatcaccgtattcccacagcgaagcgatggaaagcatgactttagagtttggaatgcacagttgattcggtatgcgggatatcagatgcccgatggctctattagaggagatccagctaacgtagagttcacccaactctgtatcgatttgggttggaaacccaagtatggcaggttcgatgtggttccactcgtcctccaggccaacggccgtgatccagagctgttcgagattccacctgaccttgtgttagaggtggctatggagcacccaaaatatgagtggttcagggaactcgaacttaaatggtatgcactgcctgctgtggcgaatatgctattagaagtcggcggattggaatttcccggatgccccttcaatggttggtacatgggtactgagattggcgttcgcgacttttgtgatgtccagagatacaacattttggaggaagtgggcaggcgaatgggactcgagacccacaaactggcctccctctggaaggatcaggcagtcgtggagattaatatcgcagtcctccacagtttccagaaacagaatgtgactattatggaccaccacagcgcagccgaatcattcatgaaatatatgcagaatgagtacaggtctcgcggaggttgccccgctgattggatctggctcgttccccctatgagcggaagtataactccggtgttccaccaggagatgctgaactatgttctcagccctttttattactatcaggtagaggcttggaaaacgcacgtgtggcaggacgaaaagcgacgaccaaaaaggagggagatccctctgaaggtccttgttaaggccgtcctgtttgcctgcatgctaatgaggaagactatggcctctcgtgtgcgcgtgacgattctgtttgctacagagacgggcaagtcagaggccctggcatgggatctgggtgcactgtttagctgtgctttcaatccaaaaaagctgaaaaaatctctttttatgcttaaagagttgaataataagttccggtatgctgtcttcggtttaggctcatctatgtatccgaggttctgtgcattcgcacatgacattgatcaaaagctttcacatcttggcgcatcccagctgacacctatgggggaaggagacgagctaagtgggcaggaagatgcatttcgatcctgggctgtgcagaccttcaaggccgcttgtgagacatttgatgtgcgtggtaaacaacacatccagatacccaagttgtacacctcaaacgtgacatgggaccctcaccactaccggctagtgcaagatagtcagccattgcctgcagcatctactagtcccagaatccccccaatactggcatcttctagcggtctcgcacaggcttccaggcccagtgctgtctctggctcgaatgggagcatgactccgtccacacgggaatgtggtgaagccgcttag

SEQ ID NO: 13957 - DNA, 3462 bp, Artificial Sequence
  derived and/or modified sequence
atggcgtgtccttggaagtttttattcaagacaaaatttcatcagtatgcgatgaacggggagaaggacatcaacaataacgttgaaaaggccccttgcgcaacaagcagcccagtcacccaggatgatctccagtatcacaacctgagcaagcagcagaacgaatcccctcagcccctcgtcgaaactggcaagaagagccccgaatccctcgtcaaactggacgccactccactcagctcacctcgccacgtgagaatcaagaactggggctccggtatgacttttcaggacaccctgcatcataaagcaaagggtatcttaacttgtcgctcgaagagttgtctggggtcaatcatgactcctaaatccctcacacgcggtcctcgggataaaccaacccccccagatgagctccttccccaggcaatcgaattcgtgaatcaatactatgggagtttcaaagaggccaagattgaagaacaccttgctagagtggaagctgttactaaggagatcgagaccaccgggacctaccaactgacaggcgatgaacttatattcgcgaccaaacaagcttggcggaatgccccacgctgcatcggcagaatacagtggagcaacttacaagtgttcgatgcgaggagctgttctacagccagggaaatgtttgagcacatctgccgtcacgttcgctacagtactaacaacggcaatatccgcagcgcaatcaccgtatttccacagcgcagcgatggtaagcatgattttcgagtttggaatgcccagttgattagatacgccggatatcaaatgcccgacggtagcattcgaggagatccagcaaacgtggaatttacacagttatgcatcgatttgggctggaaaccgaaatacggacggtttgacgtggtgcctttggtgctgcaagccaacggcagggatcctgagctcttcgaaatcccaccggatctggtgctcgaagtcgctatggagcaccctaaatatgagtggtttcgggaactggagctgaagtggtacgctcttcctgctgtcgcaaatatgctgctcgaagtgggcggattggaattcccaggctgccccttcaacggctggtacatggggacagaaatcggtgttagggatttttgcgatgtgcagcggtacaacatcttggaggaggtgggaagacgaatgggcttagaaacgcacaaactggcttcactgtggaaggaccaggcagtggtagaaattaacattgcagttctgcattcgtttcaaaaacaaaatgtgacgatcatggaccatcactctgctgccgagtccttcatgaaatacatgcaaaatgaatatcgcagtaggggaggatgcccagccgattggatctggttggttcctcccatgtcaggttccattaccccggtcttccatcaggaaatgctcaattatgttctaagtccgttctactactatcaggtggaggcatggaagacacatgtctggcaagacgaaaaacggcgtccgaagaggcgcgaaatcccgcttaaagttctggtgaaggccgtcctgtttgcttgtatgctgatgcgcaaaacaatggctagccgggtgagggtgaccattctgtttgccaccgagactgggaaaagcgaagccctcgcatgggatctgggagctttgttctcctgtgcgtttaaccctaaagtggtctgtatggacaaataccgcctgtcctgcctcgaagaagagaggttactgctggtggtgacgtcaactttcggcaacggcgactgccctgggaatggcgagaaactgaaaaaaagcctctttatgctgaaggaactaaacaacaagtttcgatacgccgtgttcgggctgggttcttcaatgtaccccaggttttgtgcctttgcccacgacatcgatcagaagttgtcccatctgggcgcttcacagctcaccccaatgggcgaaggcgacgagctgagcgggcaggaggacgcgtttcggtcctgggcagttcagaccttcaaggctgcctgtgaaacatttgatgtgcgagggaagcaacacatccagatcccaaaattgtacacaagcaatgtgacttgggatccgcaccactacagacttgtccaagactctcagcccctcgacttatcaaaggcactgtcatcaatgcatgcaaaaaatgttttcactatgcgcctaaagtcccgacagaatctgcagagtcctacatctagtcgagcaacaatcctcgttgaactgagttgcgaggatggccaggggcttaactatcttcctggagagcatctcggagtgtgcccaggaaaccagcctgcccttgttcaaggcatcctcgagcgggtcgttgacgggccaacaccacaccaaacggttagactggaggcacttgacgagtccggaagctactgggtgagcgataagcgcctgcctccatgctctctgtcccaagcactcacgtactttttggatatcacaacccctcctacccaactgctgctccaaaagctggctcaggttgccaccgaagagcctgagcgtcagaggctggaggccttgtgtcagcccagcgagtacagcaagtggaaatttacaaatagccctactttccttgaagtccttgaggagtttcctagcctgcgagtttcggccggttttcttctctcacaacttccgatacttaagccgagattttacagcatctctagctcccgcgaccacactccaaccgaaattcacctcaccgtcgccgtggtaacctaccacacaagggacgggcaaggtcccctgcatcacggcgtgtgttctacttggttgaactcactgaagccccaggatccagtcccctgttttgtgagaaacgcctctgggtttcatctgcctgaagatccttctcacccatgtatcttgattggtcccggtacaggcatcgcacccttccggagcttttggcaacagcgtctacatgactctcagcataaaggggtcagaggagggcgtatgaccctggtttttggatgcagacgacccgacgaggatcacatttaccaggaggaaatgctcgagatggctcagaagggcgttctccatgccgtccatacagcttacagcagacttcccggaaagccaaaggtctatgtgcaggatattttgcggcagcagctcgcctccgaagtgctccgggtgctccacaaggagcctggtcacctctacgtctgtggagatgtccgaatggccagagacgtggctcataccctaaaacagctggttgctgctaagttaaagctgaatgaggaacaagtcgaagactatttctttcagctgaaatcacagaaacgctaccatgaggatattttcggagcagtgtttccctacgaagctaagaaggatcgagtggcggtgcaaccctcttcgctggagatgtccgccctgtag

SEQ ID NO: 13958 - DNA, 3345 bp, Artificial Sequence
  derived and/or modified sequence
atggcatgtccctggaagttccttttcaaaacgaagttccatcagtatgccatgaacggtgagaaagatattaacaataacgtcgaaaaagctccatgtgccacgtccagcccggtgacccaggacgacctgcagtatcacaaccttagtaagcagcagaatgaaagcccccagccccttgtggagacagggaagaaatcccccgagtccctggtcaagctggacgccacgcctctgtcctcaccaagacacgtcaggataaaaaactggggttcaggaatgacctttcaagacacgctacaccacaaggccaaagggatattgacctgccggtctaaatcctgcctgggcagcatcatgacacccaagagcttgactagaggcccacgcgacaaacctactcctcccgatgagctgctgccccaggctattgagtttgttaatcaatattacggcagctttaaggaggccaagatcgaggagcatttggcccgagttgaggcagtgaccaaagaaattgagaccaccggaacataccagctcaccggtgatgagctgatatttgccactaagcaggcatggcgaaacgctcccaggtgtatcggcaggattcagtggagcaatctacaagtgtttgacgcccgaagctgcagcaccgcgcgtgaaatgtttgagcatatttgtcgccacgtccggtacagtacaaacaacggaaacatccgttcagccatcaccgtgtttccccaacggagtgacggtaagcacgactttcgagtgtggaacgcacaactgtgcatagatttggggtggaagcccaatgggagagaccccgagctgttcgaaatccctccggatctggttctggaggtcgcgatggagcacccaaagtacgaatggtttcgggagttggaacttaaatggtacgctctgcctgccgtggcaaatatgctgttggaagtgggcggactggagtttccgggatgcccatttaatggatggtatatgggcacagagatcggagtgcgagacttttgcgacgttcagagatacaatattttggaggaggtcggtaggcggatgggcttggaaactcataaactcgcgtcactttggaaggatcaggccgtagtggaaattaacattgccgtcctgcactctttccaaaagcaaaacgtcaccataatggaccaccattccgctgccgagagcttcatgaaatacatgcagaatgagtatcgatcccgtggcggatgtcccgcagactggatttggctggtacctccaatgtctggatccatcacccctgtcttccatcaggaaatgcttaattatgtcctttcccctttctactattatcaggtcgaggcatggaagacccacgtctggcaggacgagaaacgcaggccgaagcggcgagaaatccctctcaaggtcctagttaaggctgtgctgtttgcctgtatgttaatgcgcaagacgatggcatcccgggtgagggtgactatactctttgctactgaaactgggaagtctgaagcccttgcatgggatttaggggcactattttcatgtgcgttcaaccctaaagtcgtgtgcatggacaagtaccgactttcctgcctggaggaggagcggctgctactcgtcgtcacatcgacatttgggaacggggactgtccgggaaatggagaaaagctcaagaagagtctgtttatgctaaaagagctgaataataagtttcgttatgcagtgttcggacttggctcttctatgtatccgagattttgtgctttcgcccatgatatcgaccagaaactttctcacttgggtgcctcacaactcaccccaatgggggaaggagacgagctaagcggccaggaggacgcttttaggagctgggccgtgcaaacctttaaagcggcatgtgaaacctttgacgtacgagggaagcagcacattcaaattccgaagttatacactagtaatgttacttgggatccacaccactacagactcgttcaggatagtcagcctttagatctctcgaaggccctaagctccatgcacgcgaaaaacgtctttaccatgcgcctcaaatcccggcagaacctgcaatctcctacgagttctagagcaactatacttgtggaactgagttgtgaggatgggcagggtctgaactacttgcctggagagcatctcggcgtatgtcccggaaaccagcctgcactggttcagggtattctagaacgcgtggttgacggccctaccccccatcagactgtaaggctggaggcgttggacgagtccgggagttactgggtgtccgacaaacgactcccaccttgtagcctttcgcaggcgttaacttatttcctggacataaccacccctcccacccagctgcttttgcagaagttggctcaggtggcaaccgaggaacccgagcgacagagactggaggctctgtgtcaaccgtctgaatatagtaagtggaagttcacaaattctcctacgtttctggaggttttggaagagttccccagtctgagagtcagcgctggtttcttgctgagccagctgcctatcctcaagccccgattctactcaatctcttcttcccgagaccacacgccaaccgaaatccatctgaccgtcgccgtagtgacataccacacgagagatggccaaggccctttgcaccacggagtctgtagtacatggctgaacagccttaaaccccaggaccccgttccttgtttcgtccgcaacgcttcagggtttcatctgccggaagatccctcccacccctgcatcttgattggccctgggaccggtattgccccattccgctctttttggcagcaacggctccatgactcccagcacaagggcgtgcggggtggcaggatgacattggtgttcggctgtagaaggcctgatgaggatcacatctatcaagaggagatgttggagatggcacaaaagggggtgctgcatgccgttcatactgcttacagtagactgccgggtaaaccgaaggtgtacgtccaggacatacttcgccagcagctggcttcagaggtgctccgcgtgttacacaaggagcctgggcacttgtacgtctgcggggacgtgcgcatggcccgtgatgtagcacataccctaaagcagttggtagccgctaaacttaaactcaacgaagaacaagtggaggactatttttttcagctcaagagccagaagagataccatgaggatatttttggcgctgtgtttccttacgaggcaaaaaaggacagagtggcggtacagccaagttcgctggagatgtcagctctttag

SEQ ID NO: 13959 - DNA, 2190 bp, Artificial Sequence
  derived and/or modified sequence
atggcctgcccctggaagttcctgttcaagaccaagttccaccagtacgccatgaacggcgagaaggacatcaacaacaacgtggagaaggccccctgcgccaccagcagccccgtgacccaggacgacctgcagtaccacaacctgagcaagcagcagaacgagagcccccagcccctggtggagaccggcaagaagagccccgagagcctggtgaagctggacgccacccccctgagcagccccagacacgtgagaatcaagaactggggcagcggcatgaccttccaggacaccctgcaccacaaggccaagggcatcctgacctgcagaagcaagagctgcctgggcagcatcatgacccccaagagcctgaccagaggccccagagacaagcccaccccccccgacgagctgctgccccaggccatcgagttcgtgaaccagtactacggcagcttcaaggaggccaagatcgaggagcacctggccagagtggaggccgtgaccaaggagatcgagaccaccggcacctaccagctgaccggcgacgagctgatcttcgccaccaagcaggcctggagaaacgcccccagatgcatcggcagaatccagtggagcaacctgcaggtgttcgacgccagaagctgcagcaccgccagagagatgttcgagcacatctgcagacacgtgagatacagcaccaacaacggcaacatcagaagcgccatcaccgtgttcccccagagaagcgacggcaagcacgacttcagagtgtggaacgcccagctgatcagatacgccggctaccagatgcccgacggcagcatcagaggcgaccccgccaacgtggagttcacccagctgtgcatcgacctgggctggaagcccaagtacggcagattcgacgtggtgcccctggtgctgcaggccaacggcagagaccccgagctgttcgagatcccccccgacctggtgctggaggtggccatggagcaccccaagtacgagtggttcagagagctggagctgaagtggtacgccctgcccgccgtggccaacatgctgctggaggtgggcggcctggagttccccggctgccccttcaacggctggtacatgggcaccgagatcggcgtgagagacttctgcgacgtgcagagatacaacatcctggaggaggtgggcagaagaatgggcctggagacccacaagctggccagcctgtggaaggaccaggccgtggtggagatcaacatcgccgtgctgcacagcttccagaagcagaacgtgaccatcatggaccaccacagcgccgccgagagcttcatgaagtacatgcagaacgagtacagaagcagaggcggctgccccgccgactggatctggctggtgccccccatgagcggcagcatcacccccgtgttccaccaggagatgctgaactacgtgctgagccccttctactactaccaggtggaggcctggaagacccacgtgtggcaggacgagaagagaagacccaagagaagagagatccccctgaaggtgctggtgaaggccgtgctgttcgcctgcatgctgatgagaaagaccatggccagcagagtgagagtgaccatcctgttcgccaccgagaccggcaagagcgaggccctggcctgggacctgggcgccctgttcagctgcgccttcaaccccaagaagctgaagaagagcctgttcatgctgaaggagctgaacaacaagttcagatacgccgtgttcggcctgggcagcagcatgtaccccagattctgcgccttcgcccacgacatcgaccagaagctgagccacctgggcgccagccagctgacccccatgggcgagggcgacgagctgagcggccaggaggacgccttcagaagctgggccgtgcagaccttcaaggccgcctgcgagaccttcgacgtgagaggcaagcagcacatccagatccccaagctgtacaccagcaacgtgacctgggacccccaccactacagactggtgcaggacagccagcccctgcccgccgccagcaccagccccagaatcccccccatcctggccagcagcagcggcctggcccaggccagcagacccagcgccgtgagcggcagcaacggcagcatgacccccagcaccagagagtgcggcgaggccgcctag

SEQ ID NO: 13960 - DNA, 3462 bp, Artificial Sequence
  derived and/or modified sequence
atggcctgcccctggaagttcctgttcaagaccaagttccaccagtacgccatgaacggcgagaaggacatcaacaacaacgtggagaaggccccctgcgccaccagcagccccgtgacccaggacgacctgcagtaccacaacctgagcaagcagcagaacgagagcccccagcccctggtggagaccggcaagaagagccccgagagcctggtgaagctggacgccacccccctgagcagccccagacacgtgagaatcaagaactggggcagcggcatgaccttccaggacaccctgcaccacaaggccaagggcatcctgacctgcagaagcaagagctgcctgggcagcatcatgacccccaagagcctgaccagaggccccagagacaagcccaccccccccgacgagctgctgccccaggccatcgagttcgtgaaccagtactacggcagcttcaaggaggccaagatcgaggagcacctggccagagtggaggccgtgaccaaggagatcgagaccaccggcacctaccagctgaccggcgacgagctgatcttcgccaccaagcaggcctggagaaacgcccccagatgcatcggcagaatccagtggagcaacctgcaggtgttcgacgccagaagctgcagcaccgccagagagatgttcgagcacatctgcagacacgtgagatacagcaccaacaacggcaacatcagaagcgccatcaccgtgttcccccagagaagcgacggcaagcacgacttcagagtgtggaacgcccagctgatcagatacgccggctaccagatgcccgacggcagcatcagaggcgaccccgccaacgtggagttcacccagctgtgcatcgacctgggctggaagcccaagtacggcagattcgacgtggtgcccctggtgctgcaggccaacggcagagaccccgagctgttcgagatcccccccgacctggtgctggaggtggccatggagcaccccaagtacgagtggttcagagagctggagctgaagtggtacgccctgcccgccgtggccaacatgctgctggaggtgggcggcctggagttccccggctgccccttcaacggctggtacatgggcaccgagatcggcgtgagagacttctgcgacgtgcagagatacaacatcctggaggaggtgggcagaagaatgggcctggagacccacaagctggccagcctgtggaaggaccaggccgtggtggagatcaacatcgccgtgctgcacagcttccagaagcagaacgtgaccatcatggaccaccacagcgccgccgagagcttcatgaagtacatgcagaacgagtacagaagcagaggcggctgccccgccgactggatctggctggtgccccccatgagcggcagcatcacccccgtgttccaccaggagatgctgaactacgtgctgagccccttctactactaccaggtggaggcctggaagacccacgtgtggcaggacgagaagagaagacccaagagaagagagatccccctgaaggtgctggtgaaggccgtgctgttcgcctgcatgctgatgagaaagaccatggccagcagagtgagagtgaccatcctgttcgccaccgagaccggcaagagcgaggccctggcctgggacctgggcgccctgttcagctgcgccttcaaccccaaggtggtgtgcatggacaagtacagactgagctgcctggaggaggagagactgctgctggtggtgaccagcaccttcggcaacggcgactgccccggcaacggcgagaagctgaagaagagcctgttcatgctgaaggagctgaacaacaagttcagatacgccgtgttcggcctgggcagcagcatgtaccccagattctgcgccttcgcccacgacatcgaccagaagctgagccacctgggcgccagccagctgacccccatgggcgagggcgacgagctgagcggccaggaggacgccttcagaagctgggccgtgcagaccttcaaggccgcctgcgagaccttcgacgtgagaggcaagcagcacatccagatccccaagctgtacaccagcaacgtgacctgggacccccaccactacagactggtgcaggacagccagcccctggacctgagcaaggccctgagcagcatgcacgccaagaacgtgttcaccatgagactgaagagcagacagaacctgcagagccccaccagcagcagagccaccatcctggtggagctgagctgcgaggacggccagggcctgaactacctgcccggcgagcacctgggcgtgtgccccggcaaccagcccgccctggtgcagggcatcctggagagagtggtggacggccccaccccccaccagaccgtgagactggaggccctggacgagagcggcagctactgggtgagcgacaagagactgcccccctgcagcctgagccaggccctgacctacttcctggacatcaccaccccccccacccagctgctgctgcagaagctggcccaggtggccaccgaggagcccgagagacagagactggaggccctgtgccagcccagcgagtacagcaagtggaagttcaccaacagccccaccttcctggaggtgctggaggagttccccagcctgagagtgagcgccggcttcctgctgagccagctgcccatcctgaagcccagattctacagcatcagcagcagcagagaccacacccccaccgagatccacctgaccgtggccgtggtgacctaccacaccagagacggccagggccccctgcaccacggcgtgtgcagcacctggctgaacagcctgaagccccaggaccccgtgccctgcttcgtgagaaacgccagcggcttccacctgcccgaggaccccagccacccctgcatcctgatcggccccggcaccggcatcgcccccttcagaagcttctggcagcagagactgcacgacagccagcacaagggcgtgagaggcggcagaatgaccctggtgttcggctgcagaagacccgacgaggaccacatctaccaggaggagatgctggagatggcccagaagggcgtgctgcacgccgtgcacaccgcctacagcagactgcccggcaagcccaaggtgtacgtgcaggacatcctgagacagcagctggccagcgaggtgctgagagtgctgcacaaggagcccggccacctgtacgtgtgcggcgacgtgagaatggccagagacgtggcccacaccctgaagcagctggtggccgccaagctgaagctgaacgaggagcaggtggaggactacttcttccagctgaagagccagaagagataccacgaggacatcttcggcgccgtgttcccctacgaggccaagaaggacagagtggccgtgcagcccagcagcctggagatgagcgccctgtag

SEQ ID NO: 13961 - DNA, 3345 bp, Artificial Sequence
  derived and/or modified sequence
atggcctgcccctggaagttcctgttcaagaccaagttccaccagtacgccatgaacggcgagaaggacatcaacaacaacgtggagaaggccccctgcgccaccagcagccccgtgacccaggacgacctgcagtaccacaacctgagcaagcagcagaacgagagcccccagcccctggtggagaccggcaagaagagccccgagagcctggtgaagctggacgccacccccctgagcagccccagacacgtgagaatcaagaactggggcagcggcatgaccttccaggacaccctgcaccacaaggccaagggcatcctgacctgcagaagcaagagctgcctgggcagcatcatgacccccaagagcctgaccagaggccccagagacaagcccaccccccccgacgagctgctgccccaggccatcgagttcgtgaaccagtactacggcagcttcaaggaggccaagatcgaggagcacctggccagagtggaggccgtgaccaaggagatcgagaccaccggcacctaccagctgaccggcgacgagctgatcttcgccaccaagcaggcctggagaaacgcccccagatgcatcggcagaatccagtggagcaacctgcaggtgttcgacgccagaagctgcagcaccgccagagagatgttcgagcacatctgcagacacgtgagatacagcaccaacaacggcaacatcagaagcgccatcaccgtgttcccccagagaagcgacggcaagcacgacttcagagtgtggaacgcccagctgtgcatcgacctgggctggaagcccaacggcagagaccccgagctgttcgagatcccccccgacctggtgctggaggtggccatggagcaccccaagtacgagtggttcagagagctggagctgaagtggtacgccctgcccgccgtggccaacatgctgctggaggtgggcggcctggagttccccggctgccccttcaacggctggtacatgggcaccgagatcggcgtgagagacttctgcgacgtgcagagatacaacatcctggaggaggtgggcagaagaatgggcctggagacccacaagctggccagcctgtggaaggaccaggccgtggtggagatcaacatcgccgtgctgcacagcttccagaagcagaacgtgaccatcatggaccaccacagcgccgccgagagcttcatgaagtacatgcagaacgagtacagaagcagaggcggctgccccgccgactggatctggctggtgccccccatgagcggcagcatcacccccgtgttccaccaggagatgctgaactacgtgctgagccccttctactactaccaggtggaggcctggaagacccacgtgtggcaggacgagaagagaagacccaagagaagagagatccccctgaaggtgctggtgaaggccgtgctgttcgcctgcatgctgatgagaaagaccatggccagcagagtgagagtgaccatcctgttcgccaccgagaccggcaagagcgaggccctggcctgggacctgggcgccctgttcagctgcgccttcaaccccaaggtggtgtgcatggacaagtacagactgagctgcctggaggaggagagactgctgctggtggtgaccagcaccttcggcaacggcgactgccccggcaacggcgagaagctgaagaagagcctgttcatgctgaaggagctgaacaacaagttcagatacgccgtgttcggcctgggcagcagcatgtaccccagattctgcgccttcgcccacgacatcgaccagaagctgagccacctgggcgccagccagctgacccccatgggcgagggcgacgagctgagcggccaggaggacgccttcagaagctgggccgtgcagaccttcaaggccgcctgcgagaccttcgacgtgagaggcaagcagcacatccagatccccaagctgtacaccagcaacgtgacctgggacccccaccactacagactggtgcaggacagccagcccctggacctgagcaaggccctgagcagcatgcacgccaagaacgtgttcaccatgagactgaagagcagacagaacctgcagagccccaccagcagcagagccaccatcctggtggagctgagctgcgaggacggccagggcctgaactacctgcccggcgagcacctgggcgtgtgccccggcaaccagcccgccctggtgcagggcatcctggagagagtggtggacggccccaccccccaccagaccgtgagactggaggccctggacgagagcggcagctactgggtgagcgacaagagactgcccccctgcagcctgagccaggccctgacctacttcctggacatcaccaccccccccacccagctgctgctgcagaagctggcccaggtggccaccgaggagcccgagagacagagactggaggccctgtgccagcccagcgagtacagcaagtggaagttcaccaacagccccaccttcctggaggtgctggaggagttccccagcctgagagtgagcgccggcttcctgctgagccagctgcccatcctgaagcccagattctacagcatcagcagcagcagagaccacacccccaccgagatccacctgaccgtggccgtggtgacctaccacaccagagacggccagggccccctgcaccacggcgtgtgcagcacctggctgaacagcctgaagccccaggaccccgtgccctgcttcgtgagaaacgccagcggcttccacctgcccgaggaccccagccacccctgcatcctgatcggccccggcaccggcatcgcccccttcagaagcttctggcagcagagactgcacgacagccagcacaagggcgtgagaggcggcagaatgaccctggtgttcggctgcagaagacccgacgaggaccacatctaccaggaggagatgctggagatggcccagaagggcgtgctgcacgccgtgcacaccgcctacagcagactgcccggcaagcccaaggtgtacgtgcaggacatcctgagacagcagctggccagcgaggtgctgagagtgctgcacaaggagcccggccacctgtacgtgtgcggcgacgtgagaatggccagagacgtggcccacaccctgaagcagctggtggccgccaagctgaagctgaacgaggagcaggtggaggactacttcttccagctgaagagccagaagagataccacgaggacatcttcggcgccgtgttcccctacgaggccaagaaggacagagtggccgtgcagcccagcagcctggagatgagcgccctgtag

SEQ ID NO: 13962 - DNA, 4206 bp, Artificial Sequence
  derived and/or modified sequence
ataactttgtagcgagtcgaaaactgaggctccggccgcagagaactcagcctcattcctgctttaaaatctctcggccacctttgatgaggggactgggcagttctagacagtcccgaagttctcaaggcacaggtctcttcctggtttgactgtccttaccccggggaggcagtgcagccagctgcaagccccacagtgaagaacatctgagctcaaatccagataagtgacataagtgacctgctttgtaaagccatagagatggcctgtccttggaaatttctgttcaagaccaaattccaccagtatgcaatgaatggggaaaaagacatcaacaacaatgtggagaaagccccctgtgccacctccagtccagtgacacaggatgaccttcagtatcacaacctcagcaagcagcagaatgagtccccgcagcccctcgtggagacgggaaagaagtctccagaatctctggtcaagctggatgcaaccccattgtcctccccacggcatgtgaggatcaaaaactggggcagcgggatgactttccaagacacacttcaccataaggccaaagggattttaacttgcaggtccaaatcttgcctggggtccattatgactcccaaaagtttgaccagaggacccagggacaagcctacccctccagatgagcttctacctcaagctatcgaatttgtcaaccaatattacggctccttcaaagaggcaaaaatagaggaacatctggccagggtggaagcggtaacaaaggagatagaaacaacaggaacctaccaactgacgggagatgagctcatcttcgccaccaagcaggcctggcgcaatgccccacgctgcattgggaggatccagtggtccaacctgcaggtcttcgatgcccgcagctgttccactgcccgggaaatgtttgaacacatctgcagacacgtgcgttactccaccaacaatggcaacatcaggtcggccatcaccgtgttcccccagcggagtgatggcaagcacgacttccgggtgtggaatgctcagctcatccgctatgctggctaccagatgccagatggcagcatcagaggggaccctgccaacgtggaattcactcagctgtgcatcgacctgggctggaagcccaagtacggccgcttcgatgtggtccccctggtcctgcaggccaatggccgtgaccctgagctcttcgaaatcccacctgaccttgtgcttgaggtggccatggaacatcccaaatacgagtggtttcgggaactggagctaaagtggtacgccctgcctgcagtggccaacatgctgcttgaggtgggcggcctggagttcccagggtgccccttcaatggctggtacatgggcacagagatcggagtccgggacttctgtgacgtccagcgctacaacatcctggaggaagtgggcaggagaatgggcctggaaacgcacaagctggcctcgctctggaaagaccaggctgtcgttgagatcaacattgctgtgctccatagtttccagaagcagaatgtgaccatcatggaccaccactcggctgcagaatccttcatgaagtacatgcagaatgaataccggtcccgtgggggctgcccggcagactggatttggctggtccctcccatgtctgggagcatcacccccgtgtttcaccaggagatgctgaactacgtcctgtcccctttctactactatcaggtagaggcctggaaaacccatgtctggcaggacgagaagcggagacccaagagaagagagattccattgaaagtcttggtcaaagctgtgctctttgcctgtatgctgatgcgcaagacaatggcgtcccgagtcagagtcaccatcctctttgcgacagagacaggaaaatcagaggcgctggcctgggacctgggggccttattcagctgtgccttcaaccccaaggttgtctgcatggataagtacaggctgagctgcctggaggaggaacggctgctgttggtggtgaccagtacgtttggcaatggagactgccctggcaatggagagaaactgaagaaatcgctcttcatgctgaaagagctcaacaacaaattcaggtacgctgtgtttggcctcggctccagcatgtaccctcggttctgcgcctttgctcatgacattgatcagaagctgtcccacctgggggcctctcagctcaccccgatgggagaaggggatgagctcagtgggcaggaggacgccttccgcagctgggccgtgcaaaccttcaaggcagcctgtgagacgtttgatgtccgaggcaaacagcacattcagatccccaagctctacacctccaatgtgacctgggacccgcaccactacaggctcgtgcaggactcacagcctttggacctcagcaaagccctcagcagcatgcatgccaagaacgtgttcaccatgaggctcaaatctcggcagaatctacaaagtccgacatccagccgtgccaccatcctggtggaactctcctgtgaggatggccaaggcctgaactacctgccgggggagcaccttggggtttgcccaggcaaccagccggccctggtccaaggtatcctggagcgagtggtggatggccccacaccccaccagacagtgcgcctggaggccctggatgagagtggcagctactgggtcagtgacaagaggctgcccccctgctcactcagccaggccctcacctacttcctggacatcaccacacccccaacccagctgctgctccaaaagctggcccaggtggccacagaagagcctgagagacagaggctggaggccctgtgccagccctcagagtacagcaagtggaagttcaccaacagccccacattcctggaggtgctagaggagttcccgtccctgcgggtgtctgctggcttcctgctttcccagctccccattctgaagcccaggttctactccatcagctcctcccgggatcacacgcccacagagatccacctgactgtggccgtggtcacctaccacacccgagatggccagggtcccctgcaccacggcgtctgcagcacatggctcaacagcctgaagccccaagacccagtgccctgctttgtgcggaatgccagcggcttccacctccccgaggatccctcccatccttgcatcctcatcgggcctggcacaggcatcgcgcccttccgcagtttctggcagcaacggctccatgactcccagcacaagggagtgcggggaggccgcatgaccttggtgtttgggtgccgccgcccagatgaggaccacatctaccaggaggagatgctggagatggcccagaagggggtgctgcatgcggtgcacacagcctattcccgcctgcctggcaagcccaaggtctatgttcaggacatcctgcggcagcagctggccagcgaggtgctccgtgtgctccacaaggagccaggccacctctatgtttgcggggatgtgcgcatggcccgggacgtggcccacaccctgaagcagctggtggctgccaagctgaaattgaatgaggagcaggtcgaggactatttctttcagctcaagagccagaagcgctatcacgaagatatctttggtgctgtatttccttacgaggcgaagaaggacagggtggcggtgcagcccagcagcctggagatgtcagcgctctgagggcctacaggaggggttaaagctgccggcacagaacttaaggatggagccagctctgcattatctgaggtcacagggcctggggagatggaggaaagtgatatcccccagcctcaagtcttatttcctcaacgttgctccccatcaagccctttacttgacctcctaacaagtagcaccctggattgatcggagcctcctctctcaaactggggcctccctggtcccttggagacaaaatcttaaatgccaggcctggcaagtgggtgaaagatggaacttgctgctgagtgcaccacttcaagtgaccaccaggaggtgctatcgcaccactgtgtatttaactgccttgtgtacagttatttatgcctctgtatttaaaaaactaacacccagtctgttccccatggccacttgggtcttccctgtatgattccttgatggagatatttacatgaattgcattttactttaatcaca

SEQ ID NO: 13963 - protein, 229 aa, Artificial Sequence
  derived and/or modified sequence
MARLALSPVPSHWMVALLLLLSAEPVPAARSEDRYRNPKGSACSRIWQSPRFIARKRGFTVKMHCYMNSASGNVSWLWKQEMDENPQQLKLEKGRMEESQNESLATLTIQGIRFEDNGIYFCQQKCNNTSEVYQGCGTELRVMGFSTLAQLKQRNTLKDGIIMIQTLLIILFIIVPIFLLLDKDDSKAGMEEDHTYEGLDIDQTATYEDIVTLRTGEVKWSVGEHPGQE

SEQ ID NO: 13964 - DNA, 690 bp, Artificial Sequence
  derived and/or modified sequence
atggcgaggctggctcttagtcctgtcccgagccattggatggttgctctgttattgctgctctctgccgagcctgtccctgccgcccgttccgaagaccggtatcgcaaccctaaggggtcggcttgctcacgaatttggcagtctcccaggtttatcgctcggaaacgcggttttacagtcaagatgcactgttacatgaacagtgcttccggcaatgtgagctggctgtggaagcaagaaatggacgaaaacccacagcagctaaaactagaaaaaggacggatggaagagtctcaaaacgagtcactcgctactctgacaatccaggggattcggtttgaagataatgggatatatttttgccagcagaaatgtaacaatacgagcgaggtatatcagggttgtggtacagagcttcgcgttatgggcttcagcacccttgcccagctcaaacaaagaaatacactcaaggatggcattattatgatacagactttgcttatcattctgttcatcattgtgccaatcttccttctgcttgataaggacgattctaaggcaggaatggaagaggaccatacttacgagggcctcgacatcgaccaaacagccacttacgaggacattgtaacgttgcgcactggagaagtcaaatggtccgtgggcgaacaccctggccaggagtag

SEQ ID NO: 13965 - DNA, 690 bp, Artificial Sequence
  derived and/or modified sequence
atggcccggctggccctgagccctgtgcccagccactggatggtggccctgctgctgctgctgtctgctgagcctgtgcctgctgcccggtctgaggaccgctacagaaaccccaagggcagcgcctgcagccgcatctggcagagcccccgcttcatcgccaggaagaggggcttcaccgtgaagatgcactgctacatgaacagcgccagcggaaatgtgtcctggctgtggaagcaggagatggatgagaacccccagcagctgaagctggagaagggccgcatggaggagagccagaatgaaagcctggccaccctgaccatccagggcatccgctttgaagataatggcatctacttctgccagcagaagtgcaacaacaccagcgaggtgtaccagggctgcggcacagagctgcgggtgatgggcttcagcaccctggcccagctgaagcagaggaacaccctgaaggatggcatcatcatgatccagaccctgctgatcatcctcttcatcatcgtgcccatcttcctgctgctggacaaggatgacagcaaggccggcatggaggaggaccacacctatgagggcctggacatcgaccagacagccacctatgaggacatcgtgaccctgaggactggagaggtgaagtggagcgtgggggagcaccctggccaggagtag

SEQ ID NO: 13966 - DNA, 690 bp, Artificial Sequence
  derived and/or modified sequence
atggcccggctggccctgagccccgtgcccagccactggatggtggcgcttctcctccttctgtccgccgaacctgtacccgcggcgcgttccgaggaccgttatcggaatcccaaagggagcgcttgtagtagaatctggcaatctccgcgctttatagcccgaaagagagggtttactgttaaaatgcactgttatatgaatagcgcctccggcaatgtaagctggttgtggaagcaagagatggacgagaatccccagcagctgaaactcgaaaaagggcggatggaagagagccagaatgaatccctggcaaccttaactatacaaggaatcaggttcgaggataatggtatttatttctgtcagcagaagtgcaacaacacatctgaagtctatcaaggctgtggcaccgaattgcgcgtgatggggtttagtacactggcccagctgaagcaaagaaacacccttaaggacggaattatcatgattcagaccctgctcatcatcctgtttattattgtccccatctttctccttctcgataaagacgattccaaggccggcatggaggaggaccatacatacgaaggcctggatattgatcagacagctacttacgaagacatcgtgactctccgaaccggcgaagtgaagtggagtgtgggggagcatccaggtcaggagtag

SEQ ID NO: 13967 - DNA, 690 bp, Artificial Sequence
  derived and/or modified sequence
atggcgcgtctcgcattatcacctgtgccctcacactggatggtggcgcttttgctgttactgagcgccgaacccgttcccgcagcgcgatcggaagatcggtaccgcaacccgaaagggagcgcatgctccagaatatggcaatcaccccgtttcatcgctcgtaagaggggattcacagtcaagatgcactgctacatgaatagcgccagtggcaacgtgtcctggctttggaagcaggagatggacgagaatccccaacaactaaagcttgaaaaaggtcgtatggaggaaagccaaaatgagtccctcgccaccctcacaattcagggtattagattcgaggacaatggcatctacttttgccagcagaagtgtaataacacaagtgaagtatatcaaggatgtggcacagagttaagggtgatgggcttcagcactttggcgcagctgaaacaacgcaacacgctgaaagacggtatcatcatgatccagactttgctgatcattctgtttatcatcgtgccgatcttcctgctgctagacaaggacgactccaaagcgggaatggaagaggatcacacctacgagggactggacatcgatcagacagccacctatgaagacatcgtgacactccggacaggagaggtcaaatggtccgttggagagcaccctggtcaggaatag

SEQ ID NO: 13968 - DNA, 690 bp, Artificial Sequence
  derived and/or modified sequence
atggcccgcttggccttgtctccagttccttctcattggatggtggccctgttacttctgttatctgcggaaccagtcccagccgctaggagcgaggaccgataccggaaccccaaaggctccgcctgcagtaggatttggcagtcccctcgcttcatagctcgtaaacgaggttttaccgtcaagatgcactgttacatgaacagcgcaagcggaaatgtgagctggctttggaagcaggagatggatgaaaatccgcagcagttaaagctagagaagggacggatggaggagtctcagaacgagtccctcgcaactcttaccatccaaggtattcggttcgaggacaatggcatttatttttgccaacagaagtgcaataatactagtgaagtgtatcaaggatgtgggaccgaactgagggtaatgggcttttcaacgctggcacagcttaaacagcggaatacacttaaagacggcattatcatgattcagacactgttaatcatcttgttcatcatcgtgcctatcttcttacttcttgacaaggacgactctaaggctgggatggaagaagatcatacatacgagggcctggatattgatcaaacagcaacctatgaagacatagtaacgcttagaacaggagaggtaaaatggagtgtgggggaacatccaggacaggaatag

SEQ ID NO: 13969 - DNA, 690 bp, Artificial Sequence
  derived and/or modified sequence
atggccaggctggctctgtccccagttccatctcactggatggtcgctcttctgctgttgctttcagccgaaccagtgcccgccgcacgctctgaggatagatacaggaaccccaagggcagcgcttgcagccgcatttggcaatcacctagattcattgcgcggaagaggggtttcactgtcaaaatgcattgttacatgaacagcgcgtccggaaacgtttcgtggttatggaaacaggaaatggatgagaatccccaacaactaaaactcgaaaaaggtcgaatggaagagagtcaaaatgaaagcctcgcaacattgacgatacaaggtatacggttcgaagataacggaatctacttttgccagcagaaatgcaataacacatctgaagtttatcaaggatgtggcacagaattacgggtgatgggtttctcaacacttgcacaactgaagcagaggaatacactgaaagacggaatcatcatgattcagaccctgctgatcatactctttatcatcgtgcccattttccttctgctggataaggacgattctaaggctggaatggaggaggaccacacgtacgagggacttgatattgatcaaacagcaacctatgaagacatagtaacgcttagaacaggagaggtaaaatggagtgtgggggaacatccaggacaggaatag

SEQ ID NO: 13970 - DNA, 1269 bp, Artificial Sequence
  derived and/or modified sequence
aggggacaggctgcagccggtgcagttacacgttttcctccaaggagcctcggacgttgtcacgggtttggggtcggggacagagcggtgaccatggccaggctggcgttgtctcctgtgcccagccactggatggtggcgttgctgctgctgctctcagctgagccagtaccagcagccagatcggaggaccggtaccggaatcccaaaggtagtgcttgttcgcggatctggcagagcccacgtttcatagccaggaaacggggcttcacggtgaaaatgcactgctacatgaacagcgcctccggcaatgtgagctggctctggaagcaggagatggacgagaatccccagcagctgaagctggaaaagggccgcatggaagagtcccagaacgaatctctcgccaccctcaccatccaaggcatccggtttgaggacaatggcatctacttctgtcagcagaagtgcaacaacacctcggaggtctaccagggctgcggcacagagctgcgagtcatgggattcagcaccttggcacagctgaagcagaggaacacgctgaaggatggtatcatcatgatccagacgctgctgatcatcctcttcatcatcgtgcctatcttcctgctgctggacaaggatgacagcaaggctggcatggaggaagatcacacctacgagggcctggacattgaccagacagccacctatgaggacatagtgacgctgcggacaggggaagtgaagtggtctgtaggtgagcacccaggccaggagtgagagccaggtcgccccatgacctgggtgcaggctccctggcctcagtgactgcttcggagctgcctggctcatggcccaacccctttcctggaccccccagctggcctctgaagctggcccaccagagctgccatttgtctccagcccctggtccccagctcttgccaaagggcctggagtagaaggacaacagggcagcaacttggagggagttctctggggatggacgggacccagccttctgggggtgctatgaggtgatccgtccccacacatgggatgggggaggcagagactggtccagagcccgcaaatggactcggagccgagggcctcccagcagagcttgggaagggccatggacccaactgggccccagaagagccacaggaacatcattcctctcccgcaaccactcccaccccagggaggccctggcctccagtgccttcccccgtggaataaacggtgtgtcctgagaaacca

SEQ ID NO: 13971 - DNA, 690 bp, Artificial Sequence
  derived and/or modified sequence
atggccagactggccctgagccccgtgcccagccactggatggtggccctgctgctgctgctgagcgccgagcccgtgcccgccgccagaagcgaggacagatacagaaaccccaagggcagcgcctgcagcagaatctggcagagccccagattcatcgccagaaagagaggcttcaccgtgaagatgcactgctacatgaacagcgccagcggcaacgtgagctggctgtggaagcaggagatggacgagaacccccagcagctgaagctggagaagggcagaatggaggagagccagaacgagagcctggccaccctgaccatccagggcatcagattcgaggacaacggcatctacttctgccagcagaagtgcaacaacaccagcgaggtgtaccagggctgcggcaccgagctgagagtgatgggcttcagcaccctggcccagctgaagcagagaaacaccctgaaggacggcatcatcatgatccagaccctgctgatcatcctgttcatcatcgtgcccatcttcctgctgctggacaaggacgacagcaaggccggcatggaggaggaccacacctacgagggcctggacatcgaccagaccgccacctacgaggacatcgtgaccctgagaaccggcgaggtgaagtggagcgtgggcgagcaccccggccaggagtag

SEQ ID NO: 13972 - protein, 1396 aa, Artificial Sequence
  derived and/or modified sequence
MDTKLMCLLFFFSLPPLLVSNHTGRIKVVFTPSICKVTCTKGSCQNSCEKGNTTTLISENGHAADTLTATNFRVVICHLPCMNGGQCSSRDKCQCPPNFTGKLCQIPVHGASVPKLYQHSQQPGKALGTHVIHSTHTLPLTVTSQQGVKVKFPPNIVNIHVKHPPEASVQIHQVSRIDGPTGQKTKEAQPGQSQVSYQGLPVQKTQTIHSTYSHQQVIPHVYPVAAKTQLGRCFQETIGSQCGKALPGLSKQEDCCGTVGTSWGFNKCQKCPKKPSYHGYNQMMECLPGYKRVNNTFCQDINECQLQGVCPNGECLNTMGSYRCTCKIGFGPDPTFSSCVPDPPVISEEKGPCYRLVSSGRQCMHPLSVHLTKQLCCCSVGKAWGPHCEKCPLPGTAAFKEICPGGMGYTVSGVHRRRPIHHHVGKGPVFVKPKNTQPVAKSTHPPPLPAKEEPVEALTFSREHGPGVAEPEVATAPPEKEIPSLDQEKTKLEPGQPQLSPGISTIHLHPQFPGIVIEKTSPPVPVEVAPEASTSSASQVIAPTQVTEINECTVNPDICGAGHCINLPVRYTCICYEGYRFSEQQRKCVDIDECTQVQHLCSQGRCENTEGSFLCICPAGFMASEEGTNCIDVDECLRPDVCGEGHCVNTVGAFRCEYCDSGYRMTQRGRCEDIDECLNPSTCPDEQCVNSPGSYQCVPCTEGFRGWNGQCLDVDECLEPNVCANGDCSNLEGSYMCSCHKGYTRTPDHKHCRDIDECQQGNLCVNGQCKNTEGSFRCTCGQGYQLSAAKDQCEDIDECQHRHLCAHGQCRNTEGSFQCVCDQGYRASGLGDHCEDINECLEDKSVCQRGDCINTAGSYDCTCPDGFQLDDNKTCQDINECEHPGLCGPQGECLNTEGSFHCVCQQGFSISADGRTCEDIDECVNNTVCDSHGFCDNTAGSFRCLCYQGFQAPQDGQGCVDVNECELLSGVCGEAFCENVEGSFLCVCADENQEYSPMTGQCRSRTSTDLDVDVDQPKEEKKECYYNLNDASLCDNVLAPNVTKQECCCTSGVGWGDNCEIFPCPVLGTAEFTEMCPKGKGFVPAGESSSEAGGENYKDADECLLFGQEICKNGFCLNTRPGYECYCKQGTYYDPVKLQCFDMDECQDPSSCIDGQCVNTEGSYNCFCTHPMVLDASEKRCIRPAESNEQIEETDVYQDLCWEHLSDEYVCSRPLVGKQTTYTECCCLYGEAWGMQCALCPLKDSDDYAQLCNIPVTGRRQPYGRDALVDFSEQYTPEADPYFIQDRFLNSFEELQAEECGILNGCENGRCVRVQEGYTCDCFDGYHLDTAKMTCVDVNECDELNNRMSLCKNAKCINTDGSYKCLCLPGYVPSDKPNYCTPLNTALNLEKDSDLE

SEQ ID NO: 13973 - protein, 1395 aa, Artificial Sequence
  derived and/or modified sequence
MDTKLMCLLFFFSLPPLLVSNHTGRIKVVFTPSICKVTCTKGSCQNSCEKGNTTTLISENGHAADTLTATNFRVVICHLPCMNGGQCSSRDKCQCPPNFTGKLCQIPVHGASVPKLYQHSQQPGKALGTHVIHSTHTLPLTVTSQQGVKVKFPPNIVNIHVKHPPEASVQIHQVSRIDGPTGQKTKEAQPGQSQVSYQGLPVQKTQTIHSTYSHQQVIPHVYPVAAKTQLGRCFQETIGSQCGKALPGLSKQEDCCGTVGTSWGFNKCQKCPKKPSYHGYNQMMECLPGYKRVNNTFCQDINECQLQGVCPNGECLNTMGSYRCTCKIGFGPDPTFSSCVPDPPVISEEKGPCYRLVSSGRQCMHPLSVHLTKQLCCCSVGKAWGPHCEKCPLPGTAAFKEICPGGMGYTVSGVHRRRPIHHHVGKGPVFVKPKNTQPVAKSTHPPPLPAKEEPVEALTFSREHGPGVAEPEVATAPPEKEIPSLDQEKTKLEPGQPQLSPGISTIHLHPQFPVVIEKTSPPVPVEVAPEASTSSASQVIAPTQVTEINECTVNPDICGAGHCINLPVRYTCICYEGYRFSEQQRKCVDIDECTQVQHLCSQGRCENTEGSFLCICPAGFMASEEGTNCIDVDECLRPDVCGEGHCVNTVGAFRCEYCDSGYRMTQRGRCEDIDECLNPSTCPDEQCVNSPGSYQCVPCTEGFRGWNGQCLDVDECLEPNVCANGDCSNLEGSYMCSCHKGYTRTPDHKHCRDIDECQQGNLCVNGQCKNTEGSFRCTCGQGYQLSAAKDQCEDIDECQHRHLCAHGQCRNTEGSFQCVCDQGYRASGLGDHCEDINECLEDKSVCQRGDCINTAGSYDCTCPDGFQLDDNKTCQDINECEHPGLCGPQGECLNTEGSFHCVCQQGFSISADGRTCEDIDECVNNTVCDSHGFCDNTAGSFRCLCYQGFQAPQDGQGCVDVNECELLSGVCGEAFCENVEGSFLCVCADENQEYSPMTGQCRSRTSTDLDVDVDQPKEEKKECYYNLNDASLCDNVLAPNVTKQECCCTSGVGWGDNCEIFPCPVLGTAEFTEMCPKGKGFVPAGESSSEAGGENYKDADECLLFGQEICKNGFCLNTRPGYECYCKQGTYYDPVKLQCFDMDECQDPSSCIDGQCVNTEGSYNCFCTHPMVLDASEKRCIRPAESNEQIEETDVYQDLCWEHLSDEYVCSRPLVGKQTTYTECCCLYGEAWGMQCALCPLKDSDDYAQLCNIPVTGRRQPYGRDALVDFSEQYTPEADPYFIQDRFLNSFEELQAEECGILNGCENGRCVRVQEGYTCDCFDGYHLDTAKMTCVDVNECDELNNRMSLCKNAKCINTDGSYKCLCLPGYVPSDKPNYCTPLNTALNLEKDSDLE

SEQ ID NO: 13974 - DNA, 4191 bp, Artificial Sequence
  derived and/or modified sequence
atggacactaaactcatgtgtctgttgttcttttttagcctgccacctctgcttgtgtctaaccacactgggcgtatcaaggtcgtattcactccctctatttgtaaggtgacatgcacaaaggggtcctgccagaactcctgtgaaaaaggcaacactactacgctgattagcgagaatggccatgccgccgatacactgacagcgacaaatttccgtgtggtgatctgccacctcccttgtatgaatggcggccagtgctccagccgcgataagtgtcagtgcccgcctaattttaccggaaagctctgccagattcctgttcatggggcttcagtgcccaaactctaccaacacagtcagcaaccggggaaagccctcggaactcatgtgattcattcaacacacacattgcctcttactgtgacctcacagcagggcgtgaaggtgaagttcccccctaacatagtgaacattcacgtcaagcatccccccgaagcttccgtgcagatccaccaggtgtcgagaatcgacggtccaacaggccagaaaacaaaggaggcccaaccaggacagtcccaggtttcgtatcaaggattacccgtgcagaagacacagaccatccactcaacttattcacaccagcaggtgatcccacacgtctatcctgtggccgcaaaaacccagttgggccggtgctttcaagaaactataggatcccagtgcggcaaagctctacctgggcttagcaaacaggaggactgctgcggcacagtgggcacctcctggggcttcaacaaatgccagaagtgccccaaaaaaccctcctatcatggctataatcaaatgatggagtgcctgcctgggtataaacgcgtgaataacacgttttgccaggatattaatgagtgccagctccaaggagtgtgccctaacggagagtgcctgaacaccatgggcagctaccgctgcacgtgcaaaatcgggttcggcccggatccaacattctcctcctgcgtgcccgaccctccggttatcagtgaggagaaggggccctgctaccgcctggtatcatccggccggcaatgtatgcatcctttaagtgtacaccttaccaagcagctgtgctgttgctctgttggtaaggcctgggggccccattgcgagaaatgccccttacccggaacggccgcgtttaaagagatttgccctggcgggatgggatacacagttagcggagtgcaccgacgacgccccattcaccaccatgttggaaaggggcctgttttcgtcaagccgaaaaacacccaacccgtagcgaaaagtacgcaccccccaccactgccagccaaggaggaacccgtggaggccctcacctttagcagggagcatggacccggggttgcagagcctgaggttgcaacagcgcctccggaaaaagaaatccctagtcttgaccaggagaagaccaagctggaacctggccagccacagctcagtccaggtatcagcacgatccatctgcaccctcagtttcctggcatagtcattgaaaaaaccagtcctcccgttcccgttgaagttgctcccgaagctagtacatcctctgccagtcaggtaattgcccctacgcaggttacagagatcaatgaatgcactgttaacccagacatttgtggcgccggacactgcattaatctcccagtgcgatacacttgtatatgctacgaaggttatcgattcagtgagcagcagcggaaatgtgtggatatcgacgagtgtacgcaggtccagcacctgtgctcacagggacgatgcgaaaatactgaggggagctttctgtgtatttgccccgcaggcttcatggcttctgaagaagggaccaactgtatcgacgtggatgagtgtttaagacctgacgtctgcggggagggtcattgtgtgaataccgtcggtgccttccggtgcgagtattgtgactcggggtatcggatgacccagcggggacggtgtgaagatatcgatgaatgtttgaatccttccacttgtcccgacgagcaatgtgtcaactcaccgggaagctatcagtgtgttccttgcacagaagggtttcgcggctggaacggtcaatgtctggacgtggacgaatgcttagagcctaatgtgtgcgccaatggcgactgtagcaatctcgagggctcttacatgtgttcttgccacaagggctacacacggacccccgaccacaagcattgccgggatattgacgagtgccaacagggaaacctttgcgtgaatgggcagtgcaaaaatacagagggttcgttccgttgcacctgcggccagggataccagctgtccgcagccaaagaccagtgtgaggacattgatgagtgccagcacaggcatctctgtgcccacggtcaatgccgcaataccgaggggtctttccagtgcgtgtgcgaccagggatacagggcctcaggtcttggcgaccactgcgaggacatcaatgagtgcctggaagataaaagcgtctgtcagagaggggactgcatcaatactgcaggcagctacgattgcacatgcccggacggcttccaactggacgataacaaaacatgccaggatatcaacgaatgtgagcacccggggctctgtggtccccagggcgagtgtcttaataccgaaggcagttttcattgcgtgtgtcagcagggctttagcatttctgcagacggccgtacttgcgaagacatcgacgaatgcgttaacaataccgtttgtgacagccacgggttttgtgacaacacagccggatctttccgatgcctctgttaccagggattccaagcaccacaggacggacagggatgcgtggatgttaatgaatgtgagctgctctcgggcgtttgtggcgaagcattttgtgaaaacgttgaagggtcttttctctgtgtgtgtgccgatgagaatcaagagtacagtcccatgacaggacagtgtagatctcgcacgtccactgatcttgacgtagacgtggatcaaccaaaagaggaaaagaaggagtgctattacaatctgaacgacgcctctctctgcgacaacgtgctggcccctaatgtcacaaaacaggaatgctgttgtacttctggcgtaggctggggagataattgcgaaatatttccttgtcctgtcctggggactgcagaatttacagaaatgtgtccaaagggaaaagggtttgtccccgcaggagaaagctctagcgaggccggtggcgaaaattacaaggatgcagatgagtgcctgctgtttggtcaggagatctgcaaaaacggattttgcctcaacactaggcctggttatgaatgctattgcaaacagggcacctattacgacccagtgaaattgcaatgctttgacatggacgaatgccaggatccttcctcttgcatagatggacagtgcgtcaacacagagggttcctacaattgtttttgtacgcaccctatggtcttggatgccagcgagaagcgctgcattaggccggctgaaagcaacgaacaaattgaggaaacggatgtttatcaagacctttgctgggagcatctctccgatgagtacgtctgctcccgtccgctggtcggtaaacagaccacttatactgagtgttgttgcctctacggagaggcctgggggatgcaatgtgccctctgcccccttaaggacagcgacgactacgcccagctgtgtaacatccctgtgactgggagaaggcaaccttatggaagggacgctctcgttgacttttccgagcagtatacccccgaagctgacccatatttcattcaggaccgattcctcaatagcttcgaggagctgcaagctgaggagtgcggaatcctgaatggctgtgagaacggccggtgtgtccgtgtgcaggagggttatacctgcgactgttttgacggatatcacctggatactgcaaagatgacctgtgtcgatgtcaatgagtgcgatgagcttaataataggatgagcctgtgcaaaaacgcgaagtgcattaacacagacggaagctacaaatgtctatgcctgcctggttatgtgccctccgataagccaaactactgtacaccactgaataccgcgctgaatttggaaaaagacagtgatctggaatag

SEQ ID NO: 13975 - DNA, 4188 bp, Artificial Sequence
  derived and/or modified sequence
atggatacgaaactgatgtgcctgttgttttttttttctttgccccccctactcgtgagcaatcacaccggtagaattaaagtcgtcttcactccctctatctgcaaagtaacatgcactaagggcagctgtcaaaatagttgcgaaaaaggcaacacaaccactctcatctctgagaacgggcatgccgccgatacgctcaccgctactaactttcgggtcgtgatttgccacctaccctgtatgaacggaggacagtgtagcagtagggataagtgtcagtgccctcccaattttaccggcaaactgtgccagatcccagtccacggtgccagcgttccaaagctttaccagcattctcagcagcccgggaaagccctcggcacccatgtcatacacagtactcatactctgcccctgaccgtgacctcccagcagggtgtcaaggtcaaatttccccctaacatcgtgaacatccacgttaagcatccgcctgaagcaagtgtccaaattcaccaagtatcccggattgacgggcccaccggacagaaaaccaaagaggcccaaccaggtcagagccaggtgtcataccaaggtctcccagttcaaaaaacgcagacaattcactcaacttactcgcatcaacaggtgatcccacatgtttaccctgtggctgcaaaaacccagcttggcaggtgtttccaggaaaccattggatctcagtgcggtaaggccctcccgggcctgagcaagcaagaggattgctgtggcaccgtgggtacgagctggggcttcaacaagtgccagaagtgtccaaaaaaaccttcctaccacggatacaatcaaatgatggaatgcctcccaggatacaagagagtgaataacacattctgccaggacattaatgagtgccagctgcagggagtgtgtcctaacggggagtgtctgaacactatgggcagctaccgttgtacttgtaagatcggatttgggcctgatcctacgtttagttcatgtgtgccagatccccccgtcatcagtgaagaaaagggaccatgttatcgccttgtaagttcggggaggcagtgtatgcacccgctctcggtccacttaaccaagcagctctgttgctgctccgtgggcaaagcctggggaccccattgcgaaaaatgtcctttgcccggaacggctgccttcaaggaaatttgccccggaggcatgggctataccgtcagcggcgttcacaggcggagacccattcaccaccatgtggggaaaggaccagtcttcgtcaagccaaaaaacacacaacccgtggccaagtctacgcacccaccaccactgcccgcaaaagaggagcccgtcgaggcccttaccttttctagagagcacggaccaggcgtcgcggagccagaggtggccacagcaccccccgagaaagagattcccagccttgaccaggagaaaactaagcttgaacccggccagccccaattaagccctggtattagtaccatccatctgcatccccagtttccagtggtgatcgaaaagacctctcctccagtgcccgtggaagttgcccctgaggcatccactagctctgcatcgcaggtgatcgcccccacccaggtaaccgaaattaacgaatgtaccgtcaatcctgacatctgtggagctgggcactgcattaacctccccgtgagatatacctgcatctgttacgaaggctataggttctcagagcagcagcgaaaatgtgtggacatcgacgagtgtacccaagttcagcatttatgttcccaaggtaggtgcgagaatacggaaggctcgtttctctgcatatgtcccgccggattcatggcctcagaagagggaaccaactgtatagatgtggacgagtgcttacgccccgatgtgtgcggggaagggcactgcgtgaataccgttggtgcgttccgctgcgagtattgcgacagtggataccgcatgacccaaaggggcaggtgcgaggacatcgacgagtgcctgaacccgtccacatgccccgacgagcagtgtgtgaactcacccgggtcttatcagtgcgtaccttgtaccgagggcttcagaggctggaacgggcaatgcctagacgtcgacgagtgtttggagcctaacgtttgcgccaacggagactgctccaacctggaaggctcatatatgtgttcgtgccacaagggatacactcggacacctgatcataaacactgtcgcgacattgatgagtgtcagcagggcaatctgtgtgtaaatggccagtgtaagaacacagaaggatcctttaggtgcacttgcggccagggataccaactgagcgccgctaaggaccagtgcgaggacatcgacgaatgtcagcaccggcacctttgcgcacacggacagtgtaggaacactgaaggcagcttccagtgtgtgtgcgaccagggttatagggccagcgggctcggagatcattgcgaggacataaacgagtgcctggaagataagagcgtgtgccagcggggagattgcatcaacaccgccggatcatacgattgtacatgccctgatgggttccagctcgatgacaacaagacctgtcaagatatcaacgagtgcgagcacccaggcctttgtggcccccagggtgagtgtctgaataccgagggaagcttccactgcgtctgccagcagggcttctccattagcgcagatgggcgaacatgtgaagacattgacgagtgtgtaaacaacacagtctgtgatagccatgggttctgcgataacactgcaggttcctttcgatgtctgtgctatcagggtttccaggcaccgcaagatgggcagggatgcgtggacgtgaatgagtgcgagctgctttcaggagtctgtggtgaggctttttgcgagaacgtggaagggtcattcttatgtgtgtgcgcggacgagaaccaagaatacagcccgatgacaggccagtgcagatcacgaacctccactgatctggacgtagatgtcgaccagcccaaagaagagaagaaggaatgttattacaacctgaatgacgctagcctgtgtgacaacgtgctagcccctaatgtgaccaaacaggagtgctgttgtacatccggagtgggctggggagataactgcgagatctttccttgccctgtcctgggcactgccgagtttaccgagatgtgccctaagggtaaaggcttcgtgcccgctggcgagagttcatctgaggcagggggggagaattataaggacgcggacgaatgtctcctcttcggacaggaaatctgcaagaatggattctgcttaaatacccgcccaggttacgaatgttactgtaagcaaggcacttattacgacccagttaaattgcaatgttttgacatggacgaatgccaggatcccagctcgtgtatagacggacagtgtgtaaatacagaaggcagttataactgcttctgtacacaccccatggtgttggacgcctctgaaaagcgttgcattcggcctgccgaatctaatgaacaaatagaggagactgatgtgtaccaggatctttgctgggagcatctttccgatgaatatgtgtgtagtcggccactcgtgggtaagcagactacatatacagaatgttgttgcctgtatggcgaggcgtggggtatgcaatgtgctctgtgcccactgaaggactctgacgattatgcacagctgtgcaacattcctgttacaggtcggcgtcagccctacgggagagacgctctggtcgattttagcgagcagtatactccagaggctgacccatatttcattcaggaccgatttctcaactccttcgaagagcttcaggccgaagagtgtggaatcctcaacggctgtgagaacggccgatgcgtgagggtgcaggagggctatacctgcgattgctttgatggctaccaccttgacacagctaagatgacctgcgttgacgtaaatgagtgcgatgaactgaacaaccgtatgagcctctgtaaaaatgctaaatgcatcaatacggacggctcgtacaaatgtctgtgcctgcccggctacgttccaagtgacaaaccaaactattgcaccccactgaataccgctctcaatcttgagaaagacagtgacctggagtag

SEQ ID NO: 13976 - DNA, 5293 bp, Artificial Sequence
  derived and/or modified sequence
gagacaccactgaatacagagcagcgagcactgaaggcttccctctttccttaaacctgtcgggttgtgggctctctcttttcccctcttgctcctttcttttctttttttctgtttttttaaaccttccaaggcaagttcatggatactaagctgatgtgtttgttgttctttttctccctgcctccgctcctagtgagtaaccacactggccgcatcaaggtggtctttactccgagcatctgtaaagtgacctgcaccaagggcagctgtcagaacagctgtgagaaggggaacaccaccactctcattagtgagaatggtcatgctgccgacaccctgacggccacgaacttccgagtggtaatttgccatcttccatgtatgaatggtggccagtgcagttcaagggacaaatgtcagtgccctccaaatttcacaggaaaactttgtcagatcccagtccatggtgccagcgtgcctaaactttatcagcattcccagcagccaggcaaggcgttggggacgcatgtcatccattcaacacataccttgcctctgaccgtgactagccagcaaggagtcaaagtgaaatttcctcctaacatagtcaatatccatgtgaaacatcctcctgaagcttccgtccagatacatcaggtttcaagaattgatggcccaacaggccagaagacaaaagaagctcaaccaggccaatcccaagtctcgtaccaagggcttcctgtccagaagacccagaccatacattccacatactcccaccagcaggtcattcctcacgtctaccccgtggctgctaagacacagcttggccggtgcttccaggaaaccattgggtcacagtgtggcaaagcgctccctggcctttcaaagcaagaggactgctgtggaactgtgggtacctcctggggctttaacaaatgccagaaatgccccaagaaaccatcttatcatggatacaaccaaatgatggaatgcctaccgggttataagcgggttaacaacaccttttgccaagatattaatgaatgtcagctacaaggtgtatgccctaatggtgagtgtttgaataccatgggcagctatcgatgtacctgcaaaataggatttgggccggatcctaccttttcaagttgtgttcctgatccccctgtgatctcggaagagaaagggccctgttaccgacttgtcagttctggaagacagtgtatgcaccctctgtctgttcacctcaccaagcagctctgctgttgtagtgtgggcaaggcctggggcccacactgtgagaaatgtccccttccaggcacagctgcttttaaggaaatctgtcctggtggaatgggttatacggtttctggcgttcatagacgcaggccaatccatcaccatgtaggtaaaggacctgtatttgtcaagccaaagaacactcaacctgttgctaaaagtactcatcctccacctctcccagccaaggaagagccagtggaggccctgaccttctcccgggaacacgggccaggagtggcggagccagaagtggcaactgcaccccctgaaaaggaaataccttcattggatcaagagaaaaccaaacttgagcctggtcaaccccagctgtctccaggcatttccactattcatctgcatccacagtttccaggtatagtgattgaaaaaacatcacctcctgtgcctgttgaagtagctcctgaagcttctacgtctagtgccagccaagtgattgctcctactcaagtgacagaaatcaatgaatgtactgtgaaccctgatatctgtggagcaggacactgcattaacctaccagtgagatatacctgtatatgctacgagggctacaggttcagtgaacaacagaggaaatgtgtggatattgatgagtgtactcaggtccaacacctctgctcccagggccgctgtgaaaacaccgagggaagtttcttgtgcatttgcccagcaggatttatggccagtgaggagggtactaactgcatagatgttgacgaatgcctgaggccggacgtctgtggggaggggcactgtgtcaatactgtgggggccttccggtgtgaatactgtgacagcgggtaccgcatgactcagagaggccgttgtgaggatattgatgaatgtttgaatccaagcacttgtccagatgagcagtgtgtgaattctcctggatcttaccagtgcgttccctgcacagaaggattccgaggctggaatggacagtgccttgatgtggacgagtgcctggaaccaaacgtctgcgcaaatggtgattgttccaaccttgaaggctcctacatgtgttcatgccacaaaggctatacccggactccggaccacaagcactgtagagatattgatgaatgtcagcaagggaatctatgtgtaaacgggcagtgcaaaaataccgagggctccttcaggtgcacctgtggacaggggtaccagctgtcggcagctaaagaccagtgtgaagacattgatgaatgccagcaccgtcatctctgtgctcatgggcagtgcaggaacactgagggctcttttcaatgtgtgtgtgaccagggttacagagcatctgggcttggagaccactgtgaagatatcaatgaatgcttggaggacaagagtgtttgccagagaggagactgcattaatactgcagggtcctatgattgtacttgtccggatggatttcagctagatgacaataaaacatgtcaagatattaatgaatgtgaacatccagggctctgtggtccgcaaggggagtgcctaaacacagagggttctttccattgtgtctgccagcagggtttctcaatctctgcagatggccgtacgtgtgaagatattgatgaatgtgtaaacaacactgtttgtgacagtcacgggttttgtgacaatacagctggctccttccgctgcctctgttatcagggctttcaagccccacaggatgggcaagggtgtgtggatgtgaatgaatgtgaactgctcagtggggtgtgtggtgaagccttctgtgaaaacgtggaagggtccttcctgtgcgtgtgtgctgatgaaaaccaagagtacagccccatgactgggcagtgccgctcccggacctccacagatttagatgtagatgtagatcaacccaaagaagaaaagaaagaatgctactataatctcaatgacgccagtctctgtgataatgtgttggcccccaatgtcacgaaacaagaatgctgctgtacatcaggcgtgggatggggagataactgcgaaatcttcccctgcccggtcttgggaactgctgagttcactgaaatgtgtcccaaagggaaaggttttgtgcctgctggagaatcatcttctgaagctggtggtgagaactataaagatgcagatgaatgcctactttttggacaagaaatctgcaaaaatggtttctgtttgaacactcggcctgggtatgaatgctactgtaagcaagggacgtactatgatcctgtgaaactgcagtgctttgatatggatgaatgtcaagaccccagtagttgtattgatggccagtgtgttaatacagagggctcttacaactgcttctgtactcaccccatggtcctggatgcgtcagaaaaaagatgtatacgaccggctgagtcaaacgaacaaatagaagaaactgatgtctaccaagatttgtgctgggaacatctgagtgatgaatacgtgtgtagccggcctcttgtgggcaagcagacaacgtacactgagtgctgctgtctgtatggagaggcctggggcatgcagtgtgccctctgccccctgaaggattcagatgactatgctcagctgtgtaacatccccgtgacgggacgccggcagccatatggacgggacgccttggttgacttcagtgaacagtatactccagaagccgatccctacttcatccaagaccgttttctaaatagctttgaggagttacaggctgaggaatgcggcatcctcaatggatgtgaaaatggtcgctgtgtgagggtccaggaaggttacacctgcgattgctttgatgggtatcacttggatacggccaagatgacctgtgtcgatgtaaatgaatgcgatgagttgaacaaccggatgtctctctgcaagaatgccaagtgcattaacaccgatggttcctacaagtgtttgtgtctgccaggctacgtgccttctgacaagccaaactactgcactccgttgaataccgccttgaatttagagaaagacagtgacctggagtgaaacagaatctacataacctaagcccatatactctgcactgtgtaaaggaaaagggagaaatgtattatacttgagacattgcacctaccccggaaggctggaaatacagaaacagcatggaattgcaagtcctctgaagacaatgagaggatttaggatgagcccgataggtgtggcagaccaaatggacatttctctaaaaaaccagtatatatagtctgttcatatgtaaaattcaatggaagagaggtggaacagtgctgttattttaaacagaaggttgtattattatgttgttttgtttttttactattgcttgattaaatttggcatttaaatagtggtggaaatattttatataattttcattttttggttgtgcagttccttggctactgtttttcttttacttcagttttttaaaaatctcaaatgaaaaagtcttcgatacaatattgttaagctgtattataagtattgttacacagggttatgcaattcccggcctggagcatttttgaaattcaaattgtctgtcctgtggagcaggcagtgattttgttccaaaactttgtatacacatttggagaaaagtactttatattttcagtgttttgtctgattttaatgtccgttcttagccaagctgctagcaggtgttaattggatccctttccttcactgaaatggaagagtttataagcttacgttagtattgtaatatgtaaagtaagcccaacaaaaatttttaaaaatttgatgatccccaatatatctaccattgtatgttaaataaatcaccatttttgtagaaaaaattctacctgagagtaattgtcaatgagtacatgtgtataagttgtatcccactctccccacttttatcttttccagtggtcttctgttaatgtagtgtcttttacaagttaatcattaaatttgttagatcttgttatgggct

SEQ ID NO: 13977 - DNA, 5087 bp, Artificial Sequence
  derived and/or modified sequence
cgggttgtgggctctctcttttcccctcttgctcctttcttttctttttttctgtttttttaaaccttccaaggcaagttcatggatactaagctgatgtgtttgttgttctttttctccctgcctccgctcctagtgagtaaccacactggccgcatcaaggtggtctttactccgagcatctgtaaagtgacctgcaccaagggcagctgtcagaacagctgtgagaaggggaacaccaccactctcattagtgagaatggtcatgctgccgacaccctgacggccacgaacttccgagtggtaatttgccatcttccatgtatgaatggtggccagtgcagttcaagggacaaatgtcagtgccctccaaatttcacaggaaaactttgtcagatcccagtccatggtgccagcgtgcctaaactttatcagcattcccagcagccaggcaaggcgttggggacgcatgtcatccattcaacacataccttgcctctgaccgtgactagccagcaaggagtcaaagtgaaatttcctcctaacatagtcaatatccatgtgaaacatcctcctgaagcttccgtccagatacatcaggtttcaagaattgatggcccaacaggccagaagacaaaagaagctcaaccaggccaatcccaagtctcgtaccaagggcttcctgtccagaagacccagaccatacattccacatactcccaccagcaggtcattcctcacgtctaccccgtggctgctaagacacagcttggccggtgcttccaggaaaccattgggtcacagtgtggcaaagcgctccctggcctttcaaagcaagaggactgctgtggaactgtgggtacctcctggggctttaacaaatgccagaaatgccccaagaaaccatcttatcatggatacaaccaaatgatggaatgcctaccgggttataagcgggttaacaacaccttttgccaagatattaatgaatgtcagctacaaggtgtatgccctaatggtgagtgtttgaataccatgggcagctatcgatgtacctgcaaaataggatttgggccggatcctaccttttcaagttgtgttcctgatccccctgtgatctcggaagagaaagggccctgttaccgacttgtcagttctggaagacagtgtatgcaccctctgtctgttcacctcaccaagcagctctgctgttgtagtgtgggcaaggcctggggcccacactgtgagaaatgtccccttccaggcacagctgcttttaaggaaatctgtcctggtggaatgggttatacggtttctggcgttcatagacgcaggccaatccatcaccatgtaggtaaaggacctgtatttgtcaagccaaagaacactcaacctgttgctaaaagtactcatcctccacctctcccagccaaggaagagccagtggaggccctgaccttctcccgggaacacgggccaggagtggcggagccagaagtggcaactgcaccccctgaaaaggaaataccttcattggatcaagagaaaaccaaacttgagcctggtcaaccccagctgtctccaggcatttccactattcatctgcatccacagtttccagtagtgattgaaaaaacatcacctcctgtgcctgttgaagtagctcctgaagcttctacgtctagtgccagccaagtgattgctcctactcaagtgacagaaatcaatgaatgtactgtgaaccctgatatctgtggagcaggacactgcattaacctaccagtgagatatacctgtatatgctacgagggctacaggttcagtgaacaacagaggaaatgtgtggatattgatgagtgtactcaggtccaacacctctgctcccagggccgctgtgaaaacaccgagggaagtttcttgtgcatttgcccagcaggatttatggccagtgaggagggtactaactgcatagatgttgacgaatgcctgaggccggacgtctgtggggaggggcactgtgtcaatactgtgggggccttccggtgtgaatactgtgacagcgggtaccgcatgactcagagaggccgttgtgaggatattgatgaatgtttgaatccaagcacttgtccagatgagcagtgtgtgaattctcctggatcttaccagtgcgttccctgcacagaaggattccgaggctggaatggacagtgccttgatgtggacgagtgcctggaaccaaacgtctgcgcaaatggtgattgttccaaccttgaaggctcctacatgtgttcatgccacaaaggctatacccggactccggaccacaagcactgtagagatattgatgaatgtcagcaagggaatctatgtgtaaacgggcagtgcaaaaataccgagggctccttcaggtgcacctgtggacaggggtaccagctgtcggcagctaaagaccagtgtgaagacattgatgaatgccagcaccgtcatctctgtgctcatgggcagtgcaggaacactgagggctcttttcaatgtgtgtgtgaccagggttacagagcatctgggcttggagaccactgtgaagatatcaatgaatgcttggaggacaagagtgtttgccagagaggagactgcattaatactgcagggtcctatgattgtacttgtccggatggatttcagctagatgacaataaaacatgtcaagatattaatgaatgtgaacatccagggctctgtggtccgcaaggggagtgcctaaacacagagggttctttccattgtgtctgccagcagggtttctcaatctctgcagatggccgtacgtgtgaagatattgatgaatgtgtaaacaacactgtttgtgacagtcacgggttttgtgacaatacagctggctccttccgctgcctctgttatcagggctttcaagccccacaggatgggcaagggtgtgtggatgtgaatgaatgtgaactgctcagtggggtgtgtggtgaagccttctgtgaaaacgtggaagggtccttcctgtgcgtgtgtgctgatgaaaaccaagagtacagccccatgactgggcagtgccgctcccggacctccacagatttagatgtagatgtagatcaacccaaagaagaaaagaaagaatgctactataatctcaatgacgccagtctctgtgataatgtgttggcccccaatgtcacgaaacaagaatgctgctgtacatcaggcgtgggatggggagataactgcgaaatcttcccctgcccggtcttgggaactgctgagttcactgaaatgtgtcccaaagggaaaggttttgtgcctgctggagaatcatcttctgaagctggtggtgagaactataaagatgcagatgaatgcctactttttggacaagaaatctgcaaaaatggtttctgtttgaacactcggcctgggtatgaatgctactgtaagcaagggacgtactatgatcctgtgaaactgcagtgctttgatatggatgaatgtcaagaccccagtagttgtattgatggccagtgtgttaatacagagggctcttacaactgcttctgtactcaccccatggtcctggatgcgtcagaaaaaagatgtatacgaccggctgagtcaaacgaacaaatagaagaaactgatgtctaccaagatttgtgctgggaacatctgagtgatgaatacgtgtgtagccggcctcttgtgggcaagcagacaacgtacactgagtgctgctgtctgtatggagaggcctggggcatgcagtgtgccctctgccccctgaaggattcagatgactatgctcagctgtgtaacatccccgtgacgggacgccggcagccatatggacgggacgccttggttgacttcagtgaacagtatactccagaagccgatccctacttcatccaagaccgttttctaaatagctttgaggagttacaggctgaggaatgcggcatcctcaatggatgtgaaaatggtcgctgtgtgagggtccaggaaggttacacctgcgattgctttgatgggtatcacttggatacggccaagatgacctgtgtcgatgtaaatgaatgcgatgagttgaacaaccggatgtctctctgcaagaatgccaagtgcattaacaccgatggttcctacaagtgtttgtgtctgccaggctacgtgccttctgacaagccaaactactgcactccgttgaataccgccttgaatttagagaaagacagtgacctggagtgaaacagaatctacataacctaagcccatatactctgcactgtgtaaaggaaaagggagaaatgtattatacttgagacattgcacctaccccggaaggctggaaatacagaaacagcatggaattgcaagtcctctgaagacaatgagaggatttaggatgagcccgataggtgtggcagaccaaatggacatttctctaaaaaaccagtatatatagtctgttcatatgtaaaattcaatggaagagaggtggaacagtgctgttattttaaacagaaggttgtattattatgttgttttgtttttttactattgcttgattaaatttggcatttaaatagtggtggaaatattttatataattttcattttttggttgtgcagttccttggctactgtttttcttttacttcagttttttaaaaatctcaaatgaaaaagtcttcgatacaatattgttaagctgtattataagtattgttacacagggttatgcaattcccggcctggagcatttttgaaattcaaattgtctgtcctgtggagcaggcagtgattttgttccaaaactttgtatacacatttggagaaaagtactttatattttcagtgttttgtctgattttaatgtccgttcttagccaagctgctagcaggtgttaattggatccctttccttcactgaaatggaagagtttataagcttacgttagtattgtaatatgtaaagtaagcccaacaaaaatttttaaaaatttgatgatccccaatatatctaccattgtatgttaaataaatcaccatttttgtagaaaaaa

SEQ ID NO: 13978 - DNA, 4191 bp, Artificial Sequence
  derived and/or modified sequence
atggacaccaagctgatgtgcctgctcttcttcttcagcctgccccccctgctggtgagcaaccacacaggccgcatcaaggtggtgttcacccccagcatctgcaaggtgacctgcaccaagggcagctgccagaacagctgtgagaagggcaacaccaccaccctcatcagtgaaaatggacatgctgctgacaccctgacagccaccaacttccgggtggtgatctgccacctgccctgcatgaatggaggccagtgcagcagccgggacaagtgccagtgcccccccaacttcaccgggaagctgtgccagatccctgtgcatggagcctctgtgcccaagctgtaccagcacagccagcagcccgggaaggccctgggcacccacgtgatccacagcacccacaccctgcccctgactgtgaccagccagcagggcgtgaaggtgaagtttcctcccaacatcgtgaacatccacgtgaagcaccccccagaggcctctgtgcagatccaccaggtgtccagaattgatggccccaccggccagaagaccaaggaggcccagcccggccagagccaggtgtcctaccagggcctgcctgtgcagaagacccagaccatccacagcacctacagccaccagcaggtgatcccccacgtgtaccctgtggccgccaagacccagctgggccgctgcttccaggagaccatcggcagccagtgtgggaaggccctgcccggcctgagcaagcaggaggactgctgcggcaccgtgggcacctcctggggcttcaacaagtgccagaagtgccccaagaagcccagctaccacggctacaaccagatgatggagtgcctgcccggctacaagagggtgaacaacaccttctgccaggacatcaatgaatgccagctgcagggcgtgtgccccaacggggagtgcctgaacaccatgggcagctaccgctgcacctgcaagattggcttcggccctgaccccaccttcagcagctgtgtgcctgacccccctgtgatcagcgaggagaagggcccctgctaccgcctggtgagcagcggccggcagtgcatgcaccccctgtctgtgcacctgaccaagcagctgtgctgctgcagcgtgggcaaggcctggggcccccactgtgagaagtgccccctgcccggcacagctgccttcaaggagatctgccctgggggcatgggctacacagtgtctggagtgcacagaagaagacccatccaccaccacgtgggcaagggccctgtgtttgtgaagcccaagaacacccagcctgtggccaagagcacccaccccccacccctgcctgccaaggaggagcctgtggaggccctgaccttcagccgggagcacggccctggggtggccgagcctgaggtggccacagcccctcctgagaaggagatccccagcctggaccaggagaagaccaagctggagcccggccagccccagctgagccctggcatcagcaccatccacctgcacccccagtttcctggcatcgtgattgagaagaccagcccccctgtgcctgtggaggtggcccctgaggccagcaccagcagcgccagccaggtgattgcccccacccaggtgacagagatcaatgaatgtactgtgaacccagacatctgtggggccggccactgcatcaacctgcctgtgcgctacacctgcatctgctatgagggctaccgcttcagcgagcagcagaggaaatgtgtggacattgatgaatgtacccaggtgcagcacctgtgcagccagggccgctgtgaaaatacagagggcagcttcctgtgcatctgcccagctggcttcatggccagcgaggagggcaccaactgcattgatgtggatgaatgtctgcggccagatgtgtgtggggagggccactgtgtgaacacagtgggcgccttccgctgtgagtactgtgacagcggctacaggatgacccagaggggccgctgtgaggacattgatgagtgcctgaaccccagcacctgcccagatgagcagtgtgtgaacagccctggcagctaccagtgtgtgccctgcacagagggcttccggggctggaatggccagtgcctggatgtggatgagtgcctggagcccaacgtgtgtgccaatggagactgcagcaacctggagggcagctacatgtgcagctgccacaagggctacaccaggaccccagaccacaagcactgccgggacattgatgagtgccagcagggcaacctgtgtgtgaatggccagtgcaagaacacagagggcagcttccgctgcacctgtggccagggctaccagctgtctgctgccaaggaccagtgtgaggacattgatgagtgccagcaccgccacctgtgtgcccacggccagtgcaggaacacagagggcagcttccagtgtgtgtgtgaccagggctaccgggccagcggcctgggggaccactgtgaggacatcaatgaatgtctggaggacaagtctgtgtgccagagaggagactgcatcaacacagctggcagctatgactgcacctgcccagatggcttccagctggatgacaacaagacctgccaggacatcaatgaatgtgagcaccctggcctgtgtggcccccagggcgagtgcctgaacacagagggcagcttccactgtgtgtgccagcagggcttcagcatctctgcagatggccgcacctgtgaggacattgatgaatgtgtgaacaacacagtgtgtgacagccacggcttctgtgacaacacagctggcagcttccgctgcctgtgctaccagggcttccaggccccccaggacggccagggctgtgtggatgtgaatgaatgtgagctgctgtctggagtgtgtggggaggccttctgtgaaaatgtggagggcagcttcctgtgtgtgtgtgctgatgagaaccaggagtacagccccatgacaggccagtgccgcagcaggaccagcacagacctggatgtggatgtggaccagcccaaggaggagaagaaggagtgctactacaacctgaatgatgccagcctgtgtgacaacgtgctggccccaaatgtgaccaagcaggagtgctgctgcaccagcggcgtgggctggggagacaactgtgagatcttcccctgccctgtgctgggcacagctgagttcacagagatgtgccccaagggcaagggctttgtgcctgctggggagagcagcagcgaggccggaggagagaactacaaggatgctgatgagtgcctgctgtttggccaggagatctgcaagaatggcttctgcctgaacaccaggcctggctatgagtgctactgcaagcagggcacctactatgaccctgtgaagctgcagtgctttgacatggatgagtgccaggaccccagcagctgcattgatggccagtgtgtgaacacagagggcagctacaactgcttctgcacccaccccatggtgctggatgccagcgagaagcgctgcatccggcctgctgagagcaatgagcagatcgaggagacagatgtgtaccaggacctgtgctgggagcacctgagtgatgaatatgtgtgcagccggcccctggtgggcaagcagaccacctacacagagtgctgctgcctgtatggagaggcctggggcatgcagtgtgccctgtgccccctgaaggacagtgatgattatgcccagctgtgcaacatccctgtgactggaagacggcagccctacggcagagatgccctggtggacttcagcgagcagtacaccccagaggccgacccctacttcatccaggaccgcttcctgaacagctttgaggagctgcaggccgaggagtgtggcatcctgaatggctgtgaaaatggccgctgtgtgcgggtgcaggagggctacacctgtgactgctttgatggctaccacctggacacagccaagatgacctgtgtggatgtgaatgaatgtgatgagctgaacaacaggatgagcctgtgcaagaatgccaagtgcatcaacacagatggcagctacaagtgcctgtgcctgcccggctacgtgcccagcgacaagcccaactactgcacccccctgaacacagccctgaacctggagaaggacagcgacctggagtag

SEQ ID NO: 13979 - DNA, 4188 bp, Artificial Sequence
  derived and/or modified sequence
atggacaccaagctgatgtgcctgctcttcttcttcagcctgccccccctgctggtgagcaaccacacaggccgcatcaaggtggtgttcacccccagcatctgcaaggtgacctgcaccaagggcagctgccagaacagctgtgagaagggcaacaccaccaccctcatcagtgaaaatggacatgctgctgacaccctgacagccaccaacttccgggtggtgatctgccacctgccctgcatgaatggaggccagtgcagcagccgggacaagtgccagtgcccccccaacttcaccgggaagctgtgccagatccctgtgcatggagcctctgtgcccaagctgtaccagcacagccagcagcccgggaaggccctgggcacccacgtgatccacagcacccacaccctgcccctgactgtgaccagccagcagggcgtgaaggtgaagtttcctcccaacatcgtgaacatccacgtgaagcaccccccagaggcctctgtgcagatccaccaggtgtccagaattgatggccccaccggccagaagaccaaggaggcccagcccggccagagccaggtgtcctaccagggcctgcctgtgcagaagacccagaccatccacagcacctacagccaccagcaggtgatcccccacgtgtaccctgtggccgccaagacccagctgggccgctgcttccaggagaccatcggcagccagtgtgggaaggccctgcccggcctgagcaagcaggaggactgctgcggcaccgtgggcacctcctggggcttcaacaagtgccagaagtgccccaagaagcccagctaccacggctacaaccagatgatggagtgcctgcccggctacaagagggtgaacaacaccttctgccaggacatcaatgaatgccagctgcagggcgtgtgccccaacggggagtgcctgaacaccatgggcagctaccgctgcacctgcaagattggcttcggccctgaccccaccttcagcagctgtgtgcctgacccccctgtgatcagcgaggagaagggcccctgctaccgcctggtgagcagcggccggcagtgcatgcaccccctgtctgtgcacctgaccaagcagctgtgctgctgcagcgtgggcaaggcctggggcccccactgtgagaagtgccccctgcccggcacagctgccttcaaggagatctgccctgggggcatgggctacacagtgtctggagtgcacagaagaagacccatccaccaccacgtgggcaagggccctgtgtttgtgaagcccaagaacacccagcctgtggccaagagcacccaccccccacccctgcctgccaaggaggagcctgtggaggccctgaccttcagccgggagcacggccctggggtggccgagcctgaggtggccacagcccctcctgagaaggagatccccagcctggaccaggagaagaccaagctggagcccggccagccccagctgagccctggcatcagcaccatccacctgcacccccagtttcctgtggtgattgagaagaccagcccccctgtgcctgtggaggtggcccctgaggccagcaccagcagcgccagccaggtgattgcccccacccaggtgacagagatcaatgaatgtactgtgaacccagacatctgtggggccggccactgcatcaacctgcctgtgcgctacacctgcatctgctatgagggctaccgcttcagcgagcagcagaggaaatgtgtggacattgatgagtgcacccaggtgcagcacctgtgcagccagggccgctgtgagaacacagagggcagcttcctgtgcatctgcccagctggcttcatggccagcgaggagggcaccaactgcattgatgtggatgagtgcctgcggccagatgtgtgtggggagggccactgtgtgaacacagtgggcgccttccgctgtgagtactgtgacagcggctacaggatgacccagaggggccgctgtgaagatattgatgaatgtctgaaccccagcacctgcccagatgagcagtgtgtgaacagccctggcagctaccagtgtgtgccctgcacagagggcttccggggctggaatggccagtgcctggatgtggatgaatgtctggagcccaacgtgtgtgccaacggggactgcagcaacctggagggcagctacatgtgcagctgccacaagggctacaccaggaccccagaccacaagcactgccgggacattgatgagtgccagcagggcaacctgtgtgtgaatggccagtgcaagaacacagagggcagcttccgctgcacctgtggccagggctaccagctgtctgctgccaaggaccagtgtgaagatattgatgagtgccagcaccgccacctgtgtgcccacggccagtgcaggaacacagagggcagcttccagtgtgtgtgtgaccagggctaccgggccagcggcctgggggaccactgtgaggacatcaatgaatgtctggaggacaagtctgtgtgccagagaggagactgcatcaacacagctggcagctatgactgcacctgcccagatggcttccagctggatgacaacaagacctgccaggacatcaatgaatgtgagcaccctggcctgtgtggcccccagggagaatgtctgaacacagagggcagcttccactgtgtgtgccagcagggcttcagcatctctgcagatggccgcacctgtgaagatattgatgaatgtgtgaacaacacagtgtgtgacagccacggcttctgtgacaacacagctggcagcttccgctgcctgtgctaccagggcttccaggccccccaggacggccagggctgtgtggatgtgaatgaatgtgagctgctgagcggcgtgtgtggggaggccttctgtgaaaatgtggagggcagcttcctgtgtgtgtgtgctgatgagaaccaggagtacagccccatgacaggccagtgccgcagcaggaccagcacagacctggatgtggatgtggaccagcccaaggaggagaagaaggagtgctactacaacctgaatgatgccagcctgtgtgacaacgtgctggcccccaacgtgaccaagcaggagtgctgctgcaccagcggcgtgggctggggagacaactgtgagatcttcccctgccctgtgctgggcacagctgagttcacagagatgtgccccaagggcaaaggatttgtgcctgctggggagagcagcagcgaggccggcggggagaactacaaggatgctgatgaatgtctgctgtttggccaggagatctgcaagaatggcttctgcctgaacacccggcccggctatgagtgctactgcaagcagggcacctactatgaccctgtgaagctgcagtgctttgacatggatgagtgccaggaccccagcagctgcattgatggccagtgtgtgaacacagagggcagctacaactgcttctgcacccaccccatggtgctggatgccagcgagaagcgctgcatccggcctgctgagagcaatgagcagatcgaggagacagatgtgtaccaggacctgtgctgggagcacctgagtgatgaatatgtgtgcagccggcccctggtgggcaagcagaccacctacacagagtgctgctgcctgtatggagaggcctggggcatgcagtgtgccctgtgccccctgaaggacagtgatgattatgcccagctgtgcaacatccctgtgacaggccggcggcagccctacggcagagatgccctggtggacttcagcgagcagtacaccccagaggccgacccctacttcatccaggaccgcttcctgaacagctttgaggagctgcaggccgaggagtgtggcatcctgaatggctgtgaaaatggccgctgtgtgcgggtgcaggagggctacacctgtgactgctttgatggctaccacctggacacagccaagatgacctgtgtggatgtgaatgaatgtgatgagctgaacaacaggatgagcctgtgcaagaatgccaagtgcatcaacacagatggcagctacaagtgcctgtgcctgcccggctacgtgcccagcgacaagcccaactactgcacccccctgaacacagccctgaacctggagaaggacagcgacctggagtag

SEQ ID NO: 13980 - DNA, 4191 bp, Artificial Sequence
  derived and/or modified sequence
atggacaccaagctgatgtgcctgctgttcttcttcagcctgcccccactgctggtgtcaaatcacaccggtagaattaaagtcgtattcacgccatcgatctgtaaagtcacttgtaccaagggttcctgccagaactcttgtgaaaagggcaatactacaaccctgatttccgaaaacggccacgctgctgacacattgacggcaacaaacttccgtgtggtaatttgccacctcccctgtatgaacggtgggcagtgcagttcacgcgataagtgtcaatgccctccgaatttcacgggaaagctctgccaaatacccgtgcacggggcaagtgtcccaaagctctatcaacatagtcaacagcccgggaaagccctcggcacgcatgtcatacacagtactcatacgctcccacttaccgtaacctctcaacagggagtcaaggtaaagtttcccccaaacatcgtaaatattcatgtgaagcatcccccagaagctagcgtccaaattcatcaagtgtcccgcatagatggccctaccggacagaaaaccaaagaagcgcagcccggacaaagtcaggtgagctaccagggcctgccagtgcagaaaactcaaactatccatagcacatatagtcaccagcaggttatccctcacgtgtatcccgtggccgcaaaaactcaacttggtcgatgcttccaggaaacaattggttcgcagtgcgggaaagcactccctggcttgagtaagcaagaggattgctgtggcacggtgggcacatcatgggggttcaacaagtgccagaaatgcccaaaaaaaccctcctatcacggatacaaccaaatgatggaatgtctaccgggctataaaagggtgaacaacacattctgccaggacattaacgagtgtcagctgcagggtgtgtgtcccaacggtgagtgcctaaacaccatgggctcctaccgctgtacttgtaaaattggcttcggacccgatccaactttttcaagctgtgtccccgatccccctgtgatctccgaagagaagggcccctgttaccgcctagtcagctcaggacggcaatgcatgcatccattaagtgtgcacttaacgaaacagctgtgttgttgtagcgttggaaaggcctggggaccacactgtgagaaatgtcccctgccgggtaccgctgccttcaaggaaatttgccctggagggatgggctatactgtcagtggcgttcaccggcggaggccaattcaccatcatgtgggaaagggaccagttttcgtcaaaccgaagaatacacagcccgtggccaagtccactcacccgcctcctctaccagcgaaggaagaacccgtggaagctctaacttttagtcgggagcatggcccgggcgtcgctgaaccagaggtagccactgctcctccggagaaggagattccctccctcgaccaagaaaagacgaaactcgagccaggacagccacagctgagccctggtatcagtacaattcacctgcaccctcaatttccggggattgtaattgaaaaaacaagtcctccggtaccggtagaggttgcccctgaagcatctacaagctccgctagccaggtgatcgccccgacccaggttacagaaattaacgagtgtactgtcaatcccgacatttgcggcgcaggacactgtatcaacctcccggtacggtacacctgcatttgctacgaaggctataggttctctgaacagcagaggaagtgcgtggatattgacgagtgcacacaggtgcagcacctgtgcagccagggccgatgtgagaatacagaagggtcttttctctgcatctgccctgccggctttatggcctcagaggagggcacaaattgcattgatgtagatgagtgtctgcggccggatgtttgtggagaaggtcactgcgtgaatactgtaggggccttcaggtgtgagtattgtgactcaggctatagaatgacacaacgcggcaggtgcgaagacattgatgaatgtctaaatccctccacttgccccgacgagcagtgcgtcaattctcccgggtcctaccagtgcgtcccatgtacagaggggttcagaggttggaacggtcagtgcctggatgtggatgaatgcctggaacccaatgtgtgcgccaacggcgactgctcaaacctggagggaagttacatgtgtagctgccacaagggttataccagaaccccagatcataaacactgtagagatattgacgagtgccagcagggaaatctttgcgtgaatgggcaatgtaaaaacacagagggttctttccgttgtacttgcggccagggttaccagctgtcagcagctaaggaccagtgcgaagatattgacgaatgtcaacatagacacctgtgcgcacacggccagtgtcgtaataccgaaggctcattccagtgcgtgtgtgaccagggctatagagcctcaggccttggcgaccactgtgaagatattaacgagtgcctggaggacaagtcagtctgccagcggggtgactgcattaataccgcagggtcgtatgattgcacttgtccagacggatttcagttagacgataacaaaacctgccaggacataaacgagtgtgaacacccagggctctgcggccctcagggcgagtgcctcaacactgagggctcgttccattgtgtttgtcaacaggggtttagcatctcggctgatggccggacctgtgaagatatcgatgagtgtgtaaacaacacggtgtgcgacagccatggcttttgtgataatacggcaggcagttttaggtgcctgtgctatcaaggttttcaggccccccaggatggccaaggctgcgtggacgtaaatgaatgcgaactcctgtccggcgtgtgcggggaagcgttctgcgagaacgtcgagggcagtttcctgtgtgtgtgcgctgacgaaaaccaagaatactctccaatgaccggacaatgcaggagcaggacatccaccgacctcgatgtggacgtggaccaacctaaggaagagaagaaggaatgctactacaacctcaacgatgcatctctgtgtgataacgtgttggctccaaacgtgacaaagcaagaatgctgttgcacgtccggcgtgggatggggagacaattgtgagatattcccatgtccggtactgggcacagccgagttcacggagatgtgccccaaaggtaaaggcttcgtgccagcaggagaatcttcatcagaagccgggggtgaaaactacaaggatgcggacgagtgtctgcttttcggacaggagatttgtaaaaacggcttttgcctgaatacaaggcctggttacgaatgttattgtaagcagggcacatattatgaccctgtgaagttgcaatgttttgatatggatgaatgtcaggatccttccagctgtattgacggtcagtgtgtgaacactgagggatcctacaactgcttctgtactcacccaatggtgcttgatgcatcagagaagcggtgtattcgccccgcagaatctaacgagcagatcgaggagactgacgtataccaagatctgtgctgggaacatctgagtgatgagtatgtctgttctcggcctctggtggggaaacagacgacatatactgaatgctgttgcctctacggcgaggcttggggtatgcaatgcgcgctatgtccacttaaggacagcgacgactacgcacagctttgcaacatacccgtgacaggtcgcaggcagccttacggtcgtgacgccctggtggatttctccgaacagtacacgcctgaggcagatccatatttcattcaggatcggttcctgaactccttcgaggagcttcaggccgaggagtgcggaatcctgaatggatgtgagaacgggcggtgcgttagggtacaggaagggtatacctgtgactgtttcgatggttaccacttggatacagctaagatgacttgcgttgacgtgaatgaatgtgacgagttgaataacagaatgtctctctgtaaaaatgccaagtgcattaatactgatggctcctacaaatgcctctgtctgccaggctatgtcccatccgataaacctaactactgtacccctctgaataccgctctgaacctagagaaagacagtgatctggaatag

SEQ ID NO: 13981 - DNA, 4188 bp, Artificial Sequence
  derived and/or modified sequence
atggacaccaagctgatgtgcctgctgttcttcttcagcctgcccccactgctagtgagcaaccacactggccggataaaagtagtatttaccccctctatctgcaaggtgacctgcaccaaaggaagttgtcagaactcctgcgagaaaggcaatacaactacactcatcagcgagaacggacatgctgccgacacattaacagccaccaattttcgggtggtgatttgccacctgccttgtatgaacggtggacagtgttccagcagggataagtgtcagtgcccccctaatttcactggcaaactgtgtcagatccccgtccacggtgcgagcgtcccaaaactgtaccaacacagccaacagccaggaaaagcgcttgggactcatgtcatccattccacccacacactgcccctgactgtcaccagtcagcaaggagtaaaggtgaaatttccccccaacatcgtgaatatccacgtgaaacaccctcccgaggcttccgttcagattcatcaagtttcacgcatcgatggaccaaccgggcagaaaaccaaagaggcgcagcccggacagtcacaagtgtcctaccaaggactgcctgttcagaagacacagactatacattcaacatacagtcaccagcaggtgatccctcacgtgtaccccgtggccgccaaaacacagctgggacgttgcttccaggaaactataggctcacagtgtggaaaagctctgcctggcctgagtaaacaggaagattgttgcgggaccgttgggacctcctggggcttcaataagtgtcagaagtgtcccaagaagccaagctaccacggctataaccaaatgatggagtgtctgccaggctacaaacgggtcaacaacacattctgccaggatattaatgagtgccagctgcagggagtgtgtcccaacggcgagtgcctgaataccatgggttcttatcggtgcacgtgtaaaattggcttcgggccggacccaactttcagctcttgtgtgccggacccccctgtcatctctgaagagaaaggaccctgttaccgtcttgttagcagcggccgccaatgtatgcatccgctgtccgtccacttaactaagcagctgtgttgctgttcggtggggaaagcctggggacctcattgcgagaaatgtcctctgccaggtactgccgcatttaaagaaatctgtcctggcgggatgggctacacagtcagcggtgtccatagaagacgtcctatccaccatcacgttggaaaaggaccagtgttcgtgaaacctaaaaacacccagcctgtggctaaatcaacccaccccccacccctgccagctaaggaggagcccgtggaagctcttacattttccagggagcacggacccggtgtggctgagccagaagtggcaactgcaccgccagagaaggaaatcccctccttagaccaggaaaagaccaagctggaaccaggacaacctcaacttagccccggaatttctaccatccatctccatccccagtttcctgtcgtcatcgagaaaacatctcctcccgtaccagtggaagtggcccccgaagcctcgacgtctagcgcaagccaggtcattgccccgacacaagtgactgagatcaacgagtgtaccgtgaatcccgacatatgcggggccgggcattgcatcaatttacccgttcggtatacctgcatttgctatgagggataccgtttctccgaacagcagcggaagtgcgtggacattgacgagtgtactcaggtgcagcatctttgcagccaaggacggtgtgaaaacaccgagggttcatttctgtgcatctgtccagctggttttatggcttccgaggaaggcaccaattgcattgatgtggatgaatgcctcagaccagacgtatgtggggaaggtcattgcgtgaatacagtgggcgctttccgctgtgagtactgcgactcagggtaccgaatgacccagcgcgggcgatgcgaagacattgatgaatgcctaaaccccagcacctgtcctgacgaacagtgtgtcaacagcccaggatcctaccaatgtgttccttgcaccgaagggttccgcggatggaacggacagtgcctggacgtcgacgagtgtctagaaccaaatgtctgtgccaacggcgactgctccaacctggagggcagttatatgtgttcctgtcacaaaggatatacacggacccctgaccacaaacactgccgtgatattgatgagtgtcaacagggaaacctgtgcgttaacggtcagtgtaaaaacactgagggaagctttaggtgcacgtgtgggcagggctaccagttaagcgcagctaaagatcagtgtgaggatatcgacgagtgtcaacacagacatctgtgtgcccacggacagtgccgcaacacagaagggagtttccagtgtgtttgcgaccagggttacagggcatctggactcggtgatcactgcgaagacatcaacgagtgtttagaggataagtccgtgtgccagcggggcgactgtattaacacggctggatcttatgattgtacctgccccgatggcttccaactggacgataataaaacgtgtcaggatatcaacgaatgtgagcatccaggactgtgtggtccacagggggaatgtcttaatacggagggctccttccattgcgtgtgtcagcagggcttctcgatctcggccgatggacggacctgcgaggacatcgacgaatgtgttaacaacacagtatgcgattctcacggcttctgcgacaacacagccgggagttttaggtgtctttgctaccaagggttccaggctcctcaggatggccaagggtgcgtggatgttaacgagtgcgaactgctatcaggcgtttgcggcgaggccttttgcgaaaatgtggaagggtccttcctttgcgtctgtgcagatgagaatcaagagtatagcccgatgactgggcagtgccggtctcgtacttctactgaccttgatgttgacgtagatcagccgaaggaagagaaaaaagaatgctactataatttaaatgacgcatctctgtgcgacaacgtgttggcaccaaacgtaaccaagcaggaatgttgttgcacatctggggtgggatggggtgacaattgcgaaatttttccctgccccgtgctgggcacagccgagttcacagagatgtgtcccaaggggaaaggctttgttcctgcgggtgagtcctcaagcgaggccggcggagagaattataaggacgccgacgagtgcttgctcttcgggcaggagatttgtaagaacggcttctgcctgaataccagaccaggatatgagtgctactgcaaacagggcacttactatgaccctgttaagctccagtgcttcgacatggatgagtgtcaagaccctagcagttgtattgatggccaatgtgtaaacactgaaggatcgtacaattgtttctgcacacaccccatggttctcgacgcctcggaaaagcgatgtattcggcctgctgagtctaacgagcaaatagaagaaacggatgtgtaccaggatctgtgttgggagcacttaagtgatgaatatgtgtgttcaaggcccctagtgggcaagcaaacaacgtatacagagtgctgttgtttgtatggggaggcctggggtatgcagtgtgctctatgccccctgaaagattcagatgattacgctcaactgtgcaatatccctgtaacaggccgacggcagccctatggtcgagatgcgctggtcgacttctcagagcagtatacgcctgaggccgatccttatttcatccaagatcgctttctgaactcattcgaggagcttcaggctgaggagtgcggcatcctgaacggctgcgagaatggtaggtgcgttcgcgtgcaggagggctacacttgcgactgtttcgacggttaccatctggataccgccaagatgacatgcgtggacgtcaacgagtgtgatgagctgaacaatagaatgtccctctgtaagaatgccaagtgcatcaataccgacggttcctacaagtgcctgtgcctaccaggctatgtccccagtgacaagccaaattattgtaccccactaaatacggctctaaacctggagaaagattcggatctggagtag

SEQ ID NO: 13982 - DNA, 4191 bp, Artificial Sequence
  derived and/or modified sequence
atggacaccaaattgatgtgccttttgtttttcttcagcctgccccctttgctggtaagtaatcacacaggccgaatcaaagtggtgtttacaccctcaatttgtaaagtcacctgtactaagggatcgtgccagaattcttgcgagaaaggaaacaccacaacactgattagcgagaatggacatgccgctgatacgctgaccgcaaccaattttagggtggtgatttgtcacctgccatgcatgaacggcggtcaatgcagttcaagggacaaatgtcagtgcccacccaacttcaccggaaagctctgccagattcccgttcacggggcaagtgtaccgaaactgtaccagcacagccagcagccagggaaggccctagggactcacgtaatccattcaactcacacgctgcccctcaccgtcacctcccagcagggggtgaaagtcaagtttccgcctaatatcgtgaacatacatgtcaaacaccccccagaagcctcggtgcagatccatcaggtatcaagaattgacggacctaccgggcagaaaacaaaggaagcccagccagggcagtcgcaagtgagctatcagggccttcccgttcagaaaactcagaccatacattctacgtatagccatcagcaggtcatcccccatgtgtatccggtggccgctaagacgcaactaggtaggtgcttccaagagaccatcggttcacagtgcggcaaggcactgcccggactgtcgaaacaagaagactgctgtggcacagtgggcacatcttggggcttcaataaatgccagaagtgtcccaagaaaccatcatatcatggctataatcagatgatggaatgtctgcccggatacaaacgagtaaataacaccttttgtcaggatattaacgaatgtcagctgcagggcgtgtgtcccaacggcgaatgcctcaataccatggggtcttatcgatgtacctgcaagattggctttggacctgacccaacttttagctcctgcgttcccgacccccctgtaatctctgaggaaaaaggaccttgctatcgcctagtcagtagtggcagacagtgtatgcatcctctgtctgtccacctgacaaagcagctgtgctgttgtagtgtgggcaaggcttggggaccgcactgcgaaaaatgtcctctacccggtacagcagcctttaaagaaatatgcccagggggtatgggctacaccgtgagcggagttcacagaagacggccaatccatcaccatgtaggcaagggcccagtgttcgtcaaacctaaaaatacacagccagtagctaaatccactcacccaccaccgctgcctgccaaagaggagcccgtggaggccctcacattctcaagagagcatgggccaggcgtggcagagcctgaagttgccacggcccctcccgaaaaagagatacctagtctcgaccaggagaagacgaagttagaacccggacaaccgcagttatcccctggaatcagcacaatccatctgcatcctcagttccctggtatagtgatagaaaagacttcaccgcctgtcccagtggaggtggctcctgaggccagtacatcttcagccagccaggtgatcgctcccacccaagttaccgagatcaatgagtgtactgttaacccagacatttgcggagccggtcattgcatcaaccttccagttagatacacctgcatctgctacgaagggtatcgcttttccgagcagcagagaaagtgtgtcgacattgacgagtgcacacaggtgcagcacctctgcagccagggaagatgcgagaacacagaaggaagcttcttgtgcatttgccccgctggattcatggccagcgaggagggcaccaactgcattgacgttgatgaatgcctgaggcccgatgtgtgcggcgagggacactgtgtaaacacggtgggcgctttcaggtgcgaatactgtgactcaggatataggatgacacagcgtggacgctgcgaagatatcgacgaatgcctcaaccctagcacgtgcccggatgagcagtgcgtgaattccccaggctcgtatcagtgcgtaccttgtactgagggatttagaggatggaatggccagtgtcttgacgtggatgagtgtcttgaaccaaacgtatgcgctaacggtgactgctccaatctggaaggctcctacatgtgcagctgtcacaaaggttatacaaggacaccagatcacaaacactgccgggatatcgatgagtgtcagcaggggaatctgtgcgtgaacggacagtgcaagaacacagagggttcctttcggtgcacatgcgggcaaggctaccagctgagtgctgctaaggaccagtgtgaggatatcgatgagtgccagcatcgacacttatgcgcacatgggcagtgtagaaacaccgagggatcatttcaatgcgtctgcgaccagggttatcgggcatccggccttggcgaccactgcgaggatatcaatgagtgtcttgaagataagtccgtttgccaaagaggcgactgcataaacactgctggctcctacgattgtacctgtcccgacggctttcaacttgacgacaacaaaacctgtcaagacattaatgagtgtgagcaccctggcttgtgtggaccacagggagaatgcctgaataccgagggctctttccattgcgtatgccagcagggattcagtataagtgcagacggccgtacatgcgaggatatagatgaatgtgtcaacaatacagtgtgtgacagccacggcttctgtgataacaccgcgggttccttcaggtgcctgtgttaccagggttttcaagctcctcaagacggccaagggtgtgtggatgttaatgaatgtgaattgctgtctggtgtctgtggtgaggccttttgcgagaatgtggaaggcagcttcctttgcgtgtgtgcggacgagaatcaggagtactcccccatgacagggcagtgtcgcagcaggacgagtacggatctcgatgttgacgtggatcagcctaaggaagagaagaaagaatgttactacaacctgaacgatgctagcctttgcgacaacgtcctcgcaccaaacgtaaccaaacaggagtgctgctgtacgtccggagtgggttggggcgataactgtgagatcttcccctgcccagtccttggcaccgcggaattcaccgaaatgtgcccaaaaggcaagggcttcgtacccgcaggggagtcaagtagtgaagccggaggtgagaactacaaggatgccgacgagtgcctcctattcgggcaggaaatttgcaagaacggcttctgcctcaacacaaggcctggctatgaatgctattgcaaacagggaacatactacgatccggtgaagctacaatgcttcgacatggacgagtgtcaggacccttcctcatgcattgatgggcaatgcgtgaatacagagggaagctacaactgcttttgcacccatcctatggtgttggatgcctcggagaaacgctgcatcagaccagccgagtccaatgaacaaattgaagagaccgacgtgtaccaggatctttgttgggaacatttgtccgatgagtacgtgtgttcacgaccccttgtaggcaagcaaactacgtacaccgagtgttgctgtctgtatggcgaggcctggggaatgcagtgcgctctgtgtccattgaaagatagtgacgattacgcccagctttgcaatattccagtgaccggaagaagacaaccctacgggagagacgccctggttgacttctccgagcagtatacccccgaggcagacccatactttatccaggatcggttcctgaactctttcgaggagttacaagcggaagaatgtgggattttgaatggatgcgaaaacggcaggtgcgtacgagtgcaggaaggctacacatgcgattgtttcgacgggtatcacctggataccgccaagatgacctgcgtggacgtgaatgaatgtgacgagttgaataacagaatgagcttgtgtaagaacgcaaagtgcattaacactgacggatcttataagtgcctctgcctgccaggatacgttcccagcgacaagccaaattactgcacacctctcaacacggctctaaatctcgaaaaagactctgatctggagtag

SEQ ID NO: 13983 - DNA, 4188 bp, Artificial Sequence
  derived and/or modified sequence
atggatacaaaactgatgtgcctgctctttttctttagcctgccccctctgctggtgtccaatcataccgggaggatcaaagtggtttttacacctagcatttgtaaggtgacgtgcactaaggggagttgccaaaacagttgtgaaaaggggaataccaccacactcatctcagaaaacggccacgctgctgatacgctaaccgccacaaacttcagagttgtcatctgccacttaccttgcatgaacgggggacaatgcagcagccgggacaaatgccaatgcccgcctaatttcacaggtaaactctgtcaaatcccagtccatggggcatctgtgcccaaactgtaccagcattcgcagcagccgggaaaggctctaggcacacatgtaattcactccacccacacattgccccttaccgtgaccagccagcaaggggttaaggttaagtttccccctaatatcgtgaacattcacgtgaaacatccacctgaggcctctgttcagatccaccaggtgtcacgcattgacggtccgaccggacagaaaactaaggaggcccagccaggccagtcacaggtctcttatcagggcttgcccgttcagaagacacagacaatacactcgacttactcgcaccagcaggttatacctcatgtctatcccgtggctgctaagacacagctgggccgttgtttccaagagacgatcggctcccaatgcgggaaagccctgcctggcctatcaaagcaggaagactgttgcgggaccgtgggcacctcctggggcttcaacaagtgtcagaagtgtcccaagaaaccttcataccacggatacaaccaaatgatggaatgcctgccgggatacaaaagggtgaataacaccttttgtcaggatatcaacgaatgtcagctgcaaggagtatgccccaacggtgaatgtctcaacaccatgggcagttacagatgcacatgtaagattggattcggcccagatcccactttttcaagttgcgttcccgatccgccagtgatctctgaggaaaagggtccgtgctaccgcctggtgagtagtggacgtcaatgcatgcaccctctgtctgttcacttgactaaacagttgtgttgttgttcagtagggaaggcctggggccctcactgcgagaagtgccccctgccaggtaccgctgcattcaaggagatatgcccaggaggcatgggctatacggtcagcggagtgcacagacgacggcctatccaccatcacgttggcaaggggcctgtgtttgtaaaacctaaaaatacgcaacccgtggcaaagtccacacacccccctcccctgcccgcaaaggaagagccagtcgaagcccttactttctcaagagaacatggtccaggggtggctgagccggaggtagcaacggccccacccgagaaagagattccgtcactggaccaggaaaagactaagttggaaccgggacaacctcagttaagcccgggaatttccacaatccatcttcatccacagttccctgtcgtcatagagaagacctctcccccagtgcccgttgaggttgcacccgaagcttccacatcaagcgcctcacaggtgattgccccaacccaggtcactgaaatcaatgaatgcacagtaaaccctgatatctgtggggctggccattgtattaatttgcccgttcggtacacctgtatttgctatgaaggctaccgtttctctgaacagcagcgtaagtgtgttgatatagacgagtgtactcaggtccagcacctgtgttcccaggggaggtgtgaaaacacggagggttcattcctgtgcatttgtccagcaggatttatggcaagtgaggagggcaccaattgcattgacgtcgacgagtgtctgaggcctgacgtctgtggcgaaggacattgcgtgaacacagtgggcgcttttagatgcgagtattgcgatagcggatatcggatgacccagcgagggcgatgcgaggatatagacgagtgcctgaacccatccacctgccctgatgagcaatgtgtcaacagtcccggatcgtaccagtgcgtgccgtgtacagagggcttccgaggttggaacgggcagtgcctcgatgtggacgagtgcctggaacctaatgtgtgcgctaacggcgattgttccaacctcgaggggtcttacatgtgctcatgtcacaaaggatatacgagaacaccggaccacaaacattgcagagatatagacgaatgtcagcaaggaaatttgtgtgtgaacggccaatgtaagaatacagagggttccttccgttgtacctgcggacagggctaccagttgtccgcggctaaagaccaatgtgaggatatcgacgagtgtcaacaccgccatctttgcgcgcatggccagtgcagaaatactgaaggctcgttccagtgtgtctgcgatcagggctatcgggcttccggcctcggagaccattgtgaagatatcaatgaatgcttggaggacaaatcagtgtgccaacgcggagattgcataaacaccgccggtagctacgactgcacatgcccggacggattccagctggacgataacaaaacctgtcaggacattaatgaatgtgaacaccccggactgtgcggtcctcaaggggaatgtctgaatacagaaggaagttttcactgtgtatgccagcagggtttctctattagtgcggatggacggacctgcgaagacatagatgagtgcgtgaataacaccgtatgtgactcccacgggttctgtgataataccgccggaagcttccgttgtctgtgctaccaaggcttccaggctcctcaggatggtcaaggctgcgtcgatgtgaacgagtgcgagctcttgtccggcgtctgcggagaagccttctgtgagaatgttgagggcagtttcctttgtgtgtgcgccgatgaaaatcaggagtattcccctatgaccggccagtgccggtctaggacaagcaccgatctggacgtcgatgtggatcaacctaaggaagagaagaaagagtgttattacaatctcaatgacgcttctctgtgtgataacgtgctcgcccctaatgttaccaaacaggaatgttgttgcacatccggggtgggctggggagataattgtgagatctttccctgtccagtactcggaactgctgaatttacagaaatgtgcccaaagggaaagggcttcgtgccggctggcgagagctcctccgaggccggaggagaaaattacaaggatgctgacgaatgcctcctgtttggacaggaaatatgcaagaatggtttttgtttaaacactcggccagggtacgagtgctattgcaagcagggcacctactatgaccctgtgaagctgcagtgctttgatatggatgagtgccaggatccatccagttgcatcgatggccagtgtgtcaacacggagggtagttataactgtttttgcacccacccaatggttttggacgccagtgagaagcgctgtatccgacccgctgagagtaacgagcaaatagaggagactgatgtctatcaagacttatgttgggaacacctgagcgatgagtatgtatgttcgcgcccactggtcggcaaacagacaacttacacagagtgttgttgtctgtatggcgaagcctggggtatgcagtgtgctctgtgcccccttaaagacagcgatgactacgctcaattgtgcaacatacccgttaccggtaggcggcagccctatgggagggatgctcttgttgacttctcagagcaatacacacccgaagcggacccatactttatacaagacagatttctgaacagttttgaggagctccaggccgaagaatgcggaattttgaacggctgtgagaacggaaggtgcgtgcgggtgcaagaggggtacacttgtgactgttttgatggttatcacctggacacagcaaaaatgacctgcgtcgatgtaaacgagtgtgatgaactcaataatagaatgtccctatgcaagaacgcaaaatgcatcaacaccgacggaagctataagtgtctctgcttacctggatacgtcccctcagacaagcctaattactgcacacctttgaatacagccctgaacctagagaaggacagcgacttagagtag

SEQ ID NO: 13984 - DNA, 4191 bp, Artificial Sequence
  derived and/or modified sequence
atggacaccaagctgatgtgcctgctgttcttcttcagcctgccccccctgctggtgagcaaccacaccggcagaatcaaggtggtgttcacccccagcatctgcaaggtgacctgcaccaagggcagctgccagaacagctgcgagaagggcaacaccaccaccctgatcagcgagaacggccacgccgccgacaccctgaccgccaccaacttcagagtggtgatctgccacctgccctgcatgaacggcggccagtgcagcagcagagacaagtgccagtgcccccccaacttcaccggcaagctgtgccagatccccgtgcacggcgccagcgtgcccaagctgtaccagcacagccagcagcccggcaaggccctgggcacccacgtgatccacagcacccacaccctgcccctgaccgtgaccagccagcagggcgtgaaggtgaagttcccccccaacatcgtgaacatccacgtgaagcacccccccgaggccagcgtgcagatccaccaggtgagcagaatcgacggccccaccggccagaagaccaaggaggcccagcccggccagagccaggtgagctaccagggcctgcccgtgcagaagacccagaccatccacagcacctacagccaccagcaggtgatcccccacgtgtaccccgtggccgccaagacccagctgggcagatgcttccaggagaccatcggcagccagtgcggcaaggccctgcccggcctgagcaagcaggaggactgctgcggcaccgtgggcaccagctggggcttcaacaagtgccagaagtgccccaagaagcccagctaccacggctacaaccagatgatggagtgcctgcccggctacaagagagtgaacaacaccttctgccaggacatcaacgagtgccagctgcagggcgtgtgccccaacggcgagtgcctgaacaccatgggcagctacagatgcacctgcaagatcggcttcggccccgaccccaccttcagcagctgcgtgcccgacccccccgtgatcagcgaggagaagggcccctgctacagactggtgagcagcggcagacagtgcatgcaccccctgagcgtgcacctgaccaagcagctgtgctgctgcagcgtgggcaaggcctggggcccccactgcgagaagtgccccctgcccggcaccgccgccttcaaggagatctgccccggcggcatgggctacaccgtgagcggcgtgcacagaagaagacccatccaccaccacgtgggcaagggccccgtgttcgtgaagcccaagaacacccagcccgtggccaagagcacccaccccccccccctgcccgccaaggaggagcccgtggaggccctgaccttcagcagagagcacggccccggcgtggccgagcccgaggtggccaccgccccccccgagaaggagatccccagcctggaccaggagaagaccaagctggagcccggccagccccagctgagccccggcatcagcaccatccacctgcacccccagttccccggcatcgtgatcgagaagaccagcccccccgtgcccgtggaggtggcccccgaggccagcaccagcagcgccagccaggtgatcgcccccacccaggtgaccgagatcaacgagtgcaccgtgaaccccgacatctgcggcgccggccactgcatcaacctgcccgtgagatacacctgcatctgctacgagggctacagattcagcgagcagcagagaaagtgcgtggacatcgacgagtgcacccaggtgcagcacctgtgcagccagggcagatgcgagaacaccgagggcagcttcctgtgcatctgccccgccggcttcatggccagcgaggagggcaccaactgcatcgacgtggacgagtgcctgagacccgacgtgtgcggcgagggccactgcgtgaacaccgtgggcgccttcagatgcgagtactgcgacagcggctacagaatgacccagagaggcagatgcgaggacatcgacgagtgcctgaaccccagcacctgccccgacgagcagtgcgtgaacagccccggcagctaccagtgcgtgccctgcaccgagggcttcagaggctggaacggccagtgcctggacgtggacgagtgcctggagcccaacgtgtgcgccaacggcgactgcagcaacctggagggcagctacatgtgcagctgccacaagggctacaccagaacccccgaccacaagcactgcagagacatcgacgagtgccagcagggcaacctgtgcgtgaacggccagtgcaagaacaccgagggcagcttcagatgcacctgcggccagggctaccagctgagcgccgccaaggaccagtgcgaggacatcgacgagtgccagcacagacacctgtgcgcccacggccagtgcagaaacaccgagggcagcttccagtgcgtgtgcgaccagggctacagagccagcggcctgggcgaccactgcgaggacatcaacgagtgcctggaggacaagagcgtgtgccagagaggcgactgcatcaacaccgccggcagctacgactgcacctgccccgacggcttccagctggacgacaacaagacctgccaggacatcaacgagtgcgagcaccccggcctgtgcggcccccagggcgagtgcctgaacaccgagggcagcttccactgcgtgtgccagcagggcttcagcatcagcgccgacggcagaacctgcgaggacatcgacgagtgcgtgaacaacaccgtgtgcgacagccacggcttctgcgacaacaccgccggcagcttcagatgcctgtgctaccagggcttccaggccccccaggacggccagggctgcgtggacgtgaacgagtgcgagctgctgagcggcgtgtgcggcgaggccttctgcgagaacgtggagggcagcttcctgtgcgtgtgcgccgacgagaaccaggagtacagccccatgaccggccagtgcagaagcagaaccagcaccgacctggacgtggacgtggaccagcccaaggaggagaagaaggagtgctactacaacctgaacgacgccagcctgtgcgacaacgtgctggcccccaacgtgaccaagcaggagtgctgctgcaccagcggcgtgggctggggcgacaactgcgagatcttcccctgccccgtgctgggcaccgccgagttcaccgagatgtgccccaagggcaagggcttcgtgcccgccggcgagagcagcagcgaggccggcggcgagaactacaaggacgccgacgagtgcctgctgttcggccaggagatctgcaagaacggcttctgcctgaacaccagacccggctacgagtgctactgcaagcagggcacctactacgaccccgtgaagctgcagtgcttcgacatggacgagtgccaggaccccagcagctgcatcgacggccagtgcgtgaacaccgagggcagctacaactgcttctgcacccaccccatggtgctggacgccagcgagaagagatgcatcagacccgccgagagcaacgagcagatcgaggagaccgacgtgtaccaggacctgtgctgggagcacctgagcgacgagtacgtgtgcagcagacccctggtgggcaagcagaccacctacaccgagtgctgctgcctgtacggcgaggcctggggcatgcagtgcgccctgtgccccctgaaggacagcgacgactacgcccagctgtgcaacatccccgtgaccggcagaagacagccctacggcagagacgccctggtggacttcagcgagcagtacacccccgaggccgacccctacttcatccaggacagattcctgaacagcttcgaggagctgcaggccgaggagtgcggcatcctgaacggctgcgagaacggcagatgcgtgagagtgcaggagggctacacctgcgactgcttcgacggctaccacctggacaccgccaagatgacctgcgtggacgtgaacgagtgcgacgagctgaacaacagaatgagcctgtgcaagaacgccaagtgcatcaacaccgacggcagctacaagtgcctgtgcctgcccggctacgtgcccagcgacaagcccaactactgcacccccctgaacaccgccctgaacctggagaaggacagcgacctggagtag

SEQ ID NO: 13985 - DNA, 4188 bp, Artificial Sequence
  derived and/or modified sequence
atggacaccaagctgatgtgcctgctgttcttcttcagcctgccccccctgctggtgagcaaccacaccggcagaatcaaggtggtgttcacccccagcatctgcaaggtgacctgcaccaagggcagctgccagaacagctgcgagaagggcaacaccaccaccctgatcagcgagaacggccacgccgccgacaccctgaccgccaccaacttcagagtggtgatctgccacctgccctgcatgaacggcggccagtgcagcagcagagacaagtgccagtgcccccccaacttcaccggcaagctgtgccagatccccgtgcacggcgccagcgtgcccaagctgtaccagcacagccagcagcccggcaaggccctgggcacccacgtgatccacagcacccacaccctgcccctgaccgtgaccagccagcagggcgtgaaggtgaagttcccccccaacatcgtgaacatccacgtgaagcacccccccgaggccagcgtgcagatccaccaggtgagcagaatcgacggccccaccggccagaagaccaaggaggcccagcccggccagagccaggtgagctaccagggcctgcccgtgcagaagacccagaccatccacagcacctacagccaccagcaggtgatcccccacgtgtaccccgtggccgccaagacccagctgggcagatgcttccaggagaccatcggcagccagtgcggcaaggccctgcccggcctgagcaagcaggaggactgctgcggcaccgtgggcaccagctggggcttcaacaagtgccagaagtgccccaagaagcccagctaccacggctacaaccagatgatggagtgcctgcccggctacaagagagtgaacaacaccttctgccaggacatcaacgagtgccagctgcagggcgtgtgccccaacggcgagtgcctgaacaccatgggcagctacagatgcacctgcaagatcggcttcggccccgaccccaccttcagcagctgcgtgcccgacccccccgtgatcagcgaggagaagggcccctgctacagactggtgagcagcggcagacagtgcatgcaccccctgagcgtgcacctgaccaagcagctgtgctgctgcagcgtgggcaaggcctggggcccccactgcgagaagtgccccctgcccggcaccgccgccttcaaggagatctgccccggcggcatgggctacaccgtgagcggcgtgcacagaagaagacccatccaccaccacgtgggcaagggccccgtgttcgtgaagcccaagaacacccagcccgtggccaagagcacccaccccccccccctgcccgccaaggaggagcccgtggaggccctgaccttcagcagagagcacggccccggcgtggccgagcccgaggtggccaccgccccccccgagaaggagatccccagcctggaccaggagaagaccaagctggagcccggccagccccagctgagccccggcatcagcaccatccacctgcacccccagttccccgtggtgatcgagaagaccagcccccccgtgcccgtggaggtggcccccgaggccagcaccagcagcgccagccaggtgatcgcccccacccaggtgaccgagatcaacgagtgcaccgtgaaccccgacatctgcggcgccggccactgcatcaacctgcccgtgagatacacctgcatctgctacgagggctacagattcagcgagcagcagagaaagtgcgtggacatcgacgagtgcacccaggtgcagcacctgtgcagccagggcagatgcgagaacaccgagggcagcttcctgtgcatctgccccgccggcttcatggccagcgaggagggcaccaactgcatcgacgtggacgagtgcctgagacccgacgtgtgcggcgagggccactgcgtgaacaccgtgggcgccttcagatgcgagtactgcgacagcggctacagaatgacccagagaggcagatgcgaggacatcgacgagtgcctgaaccccagcacctgccccgacgagcagtgcgtgaacagccccggcagctaccagtgcgtgccctgcaccgagggcttcagaggctggaacggccagtgcctggacgtggacgagtgcctggagcccaacgtgtgcgccaacggcgactgcagcaacctggagggcagctacatgtgcagctgccacaagggctacaccagaacccccgaccacaagcactgcagagacatcgacgagtgccagcagggcaacctgtgcgtgaacggccagtgcaagaacaccgagggcagcttcagatgcacctgcggccagggctaccagctgagcgccgccaaggaccagtgcgaggacatcgacgagtgccagcacagacacctgtgcgcccacggccagtgcagaaacaccgagggcagcttccagtgcgtgtgcgaccagggctacagagccagcggcctgggcgaccactgcgaggacatcaacgagtgcctggaggacaagagcgtgtgccagagaggcgactgcatcaacaccgccggcagctacgactgcacctgccccgacggcttccagctggacgacaacaagacctgccaggacatcaacgagtgcgagcaccccggcctgtgcggcccccagggcgagtgcctgaacaccgagggcagcttccactgcgtgtgccagcagggcttcagcatcagcgccgacggcagaacctgcgaggacatcgacgagtgcgtgaacaacaccgtgtgcgacagccacggcttctgcgacaacaccgccggcagcttcagatgcctgtgctaccagggcttccaggccccccaggacggccagggctgcgtggacgtgaacgagtgcgagctgctgagcggcgtgtgcggcgaggccttctgcgagaacgtggagggcagcttcctgtgcgtgtgcgccgacgagaaccaggagtacagccccatgaccggccagtgcagaagcagaaccagcaccgacctggacgtggacgtggaccagcccaaggaggagaagaaggagtgctactacaacctgaacgacgccagcctgtgcgacaacgtgctggcccccaacgtgaccaagcaggagtgctgctgcaccagcggcgtgggctggggcgacaactgcgagatcttcccctgccccgtgctgggcaccgccgagttcaccgagatgtgccccaagggcaagggcttcgtgcccgccggcgagagcagcagcgaggccggcggcgagaactacaaggacgccgacgagtgcctgctgttcggccaggagatctgcaagaacggcttctgcctgaacaccagacccggctacgagtgctactgcaagcagggcacctactacgaccccgtgaagctgcagtgcttcgacatggacgagtgccaggaccccagcagctgcatcgacggccagtgcgtgaacaccgagggcagctacaactgcttctgcacccaccccatggtgctggacgccagcgagaagagatgcatcagacccgccgagagcaacgagcagatcgaggagaccgacgtgtaccaggacctgtgctgggagcacctgagcgacgagtacgtgtgcagcagacccctggtgggcaagcagaccacctacaccgagtgctgctgcctgtacggcgaggcctggggcatgcagtgcgccctgtgccccctgaaggacagcgacgactacgcccagctgtgcaacatccccgtgaccggcagaagacagccctacggcagagacgccctggtggacttcagcgagcagtacacccccgaggccgacccctacttcatccaggacagattcctgaacagcttcgaggagctgcaggccgaggagtgcggcatcctgaacggctgcgagaacggcagatgcgtgagagtgcaggagggctacacctgcgactgcttcgacggctaccacctggacaccgccaagatgacctgcgtggacgtgaacgagtgcgacgagctgaacaacagaatgagcctgtgcaagaacgccaagtgcatcaacaccgacggcagctacaagtgcctgtgcctgcccggctacgtgcccagcgacaagcccaactactgcacccccctgaacaccgccctgaacctggagaaggacagcgacctggagtag

SEQ ID NO: 13986 - protein, 325 aa, Artificial Sequence
  derived and/or modified sequence
MAWSLGSWLGGCLLVSALGMVPPPENVRMNSVNFKNILQWESPAFAKGNLTFTAQYLSYRIFQDKCMNTTLTECDFSSLSKYGDHTLRVRAEFADEHSDWVNITFCPVDDTIIGPPGMQVEVLADSLHMRFLAPKIENEYETWTMKNVYNSWTYNVQYWKNGTDEKFQITPQYDFEVLRNLEPWTTYCVQVRGFLPDRNKAGEWSEPVCEQTTHDETVPSWMVAVILMASVFMVCLALLGCFALLWCVYKKTKYAFSPRNSLPQHLKEFLGHPHHNTLLFFSFPLSDENDVFDKLSVIAEDSESGKQNPGDSCSLGTPPGQGPQS

SEQ ID NO: 13987 - protein, 322 aa, Artificial Sequence
  derived and/or modified sequence
MAWSLGSWLGGCLLVSALGMVPPPENVRMNSVNFKNILQWESPAFAKGNLTFTAQYLSYRIFQDKCMNTTLTECDFSSLSKYGDHTLRVRAEFADEHSDWVNITFCPVDDTIIGPPGMQVEVLADSLHMRFLAPKIENEYETWTMKNVYNSWTYNVQYWKNGTDEKFQITPQYDFEVLRNLEPWTTYCVQVRGFLPDRNKAGEWSEPVCEQTTHDETVPSWMVAVILMASVFMVCLALLGCFALLWCVYKKTKYAFSPRNSLPQHLKEFLGHPHHNTLLFFSFPLSDENDVFDKLSVIAEDSESGKQNPGDSPTSRTPRPWT

SEQ ID NO: 13988 - DNA, 978 bp, Artificial Sequence
  derived and/or modified sequence
atggcctggagcctgggcagctggctgggcggctgcctgctggtgagcgccctgggcatggtgcccccccccgagaacgtgagaatgaacagcgtgaacttcaagaacatcctgcagtgggagagccccgccttcgccaagggcaacctgaccttcaccgcccagtacctgagctacagaatcttccaggacaagtgcatgaacaccaccctgaccgagtgcgacttcagcagcctgagcaagtacggcgaccacaccctgagagtgagagccgagttcgccgacgagcacagcgactgggtgaacatcaccttctgccccgtggacgacaccatcatcggcccccccggcatgcaggtggaggtgctggccgacagcctgcacatgagattcctggcccccaagatcgagaacgagtacgagacctggaccatgaagaacgtgtacaacagctggacctacaacgtgcagtactggaagaacggcaccgacgagaagttccagatcaccccccagtacgacttcgaggtgctgagaaacctggagccctggaccacctactgcgtgcaggtgagaggcttcctgcccgacagaaacaaggccggcgagtggagcgagcccgtgtgcgagcagaccacccacgacgagaccgtgcccagctggatggtggccgtgatcctgatggccagcgtgttcatggtgtgcctggccctgctgggctgcttcgccctgctgtggtgcgtgtacaagaagaccaagtacgccttcagccccagaaacagcctgccccagcacctgaaggagttcctgggccacccccaccacaacaccctgctgttcttcagcttccccctgagcgacgagaacgacgtgttcgacaagctgagcgtgatcgccgaggacagcgagagcggcaagcagaaccccggcgacagctgcagcctgggcaccccccccggccagggcccccagagctag

SEQ ID NO: 13989 - DNA, 969 bp, Artificial Sequence
  derived and/or modified sequence
atggcctggagcctgggcagctggctgggcggctgcctgctggtgagcgccctgggcatggtgcccccccccgagaacgtgagaatgaacagcgtgaacttcaagaacatcctgcagtgggagagccccgccttcgccaagggcaacctgaccttcaccgcccagtacctgagctacagaatcttccaggacaagtgcatgaacaccaccctgaccgagtgcgacttcagcagcctgagcaagtacggcgaccacaccctgagagtgagagccgagttcgccgacgagcacagcgactgggtgaacatcaccttctgccccgtggacgacaccatcatcggcccccccggcatgcaggtggaggtgctggccgacagcctgcacatgagattcctggcccccaagatcgagaacgagtacgagacctggaccatgaagaacgtgtacaacagctggacctacaacgtgcagtactggaagaacggcaccgacgagaagttccagatcaccccccagtacgacttcgaggtgctgagaaacctggagccctggaccacctactgcgtgcaggtgagaggcttcctgcccgacagaaacaaggccggcgagtggagcgagcccgtgtgcgagcagaccacccacgacgagaccgtgcccagctggatggtggccgtgatcctgatggccagcgtgttcatggtgtgcctggccctgctgggctgcttcgccctgctgtggtgcgtgtacaagaagaccaagtacgccttcagccccagaaacagcctgccccagcacctgaaggagttcctgggccacccccaccacaacaccctgctgttcttcagcttccccctgagcgacgagaacgacgtgttcgacaagctgagcgtgatcgccgaggacagcgagagcggcaagcagaaccccggcgacagccccaccagcagaacccccagaccctggacctag

SEQ ID NO: 13990 - DNA, 978 bp, Artificial Sequence
  derived and/or modified sequence
atggcatggagcctgggaagttggctagggggatgtttgctggtctccgcccttggaatggtcccccccccagagaacgtgaggatgaattctgtcaattttaagaacattttgcagtgggagagtccagcattcgctaagggcaacctgacatttaccgctcaatacctgtcatacaggatcttccaggacaagtgcatgaataccaccttaacagagtgcgatttcagctccctgagtaagtacggcgaccacacccttcgggtgagagcggaatttgctgacgagcacagtgattgggtaaatattacattttgtccagttgacgacacaataatcggaccaccggggatgcaggtggaggttttagccgattctcttcatatgaggtttctggcccccaagatcgagaatgagtacgagacttggacgatgaagaacgtctataactcctggacgtacaatgtgcagtactggaagaacgggacagacgagaagttccagatcaccccacagtatgactttgaggtccttcgaaatctggagccgtggaccacctactgcgtgcaggttcggggatttctgccagacagaaataaggccggagagtggagcgagccggtgtgtgagcagacgacccacgatgagactgtcccttcttggatggttgccgttattttgatggcctccgtctttatggtgtgcctggccctgctgggatgcttcgcccttctatggtgtgtctataagaagaccaaatacgccttttctccgcggaattcgttgccccagcacctgaaagagtttctgggtcatcctcaccacaataccctgctgttcttttcgttccccttgtcagatgagaacgatgtgttcgataagctgagcgtaatagccgaggatagcgagtccggcaaacagaatccgggggacagttgttctctgggaactcctcctgggcagggtcctcagtcttag

SEQ ID NO: 13991 - DNA, 969 bp, Artificial Sequence
  derived and/or modified sequence
atggcgtggtctctgggtagttggctgggcggctgccttctggtgtctgcactgggaatggtacccccacctgagaacgtccgcatgaatagcgtgaattttaagaatatcctgcagtgggagagtcccgcctttgccaaaggcaacctgactttcacagctcaatatctttcatatcggatttttcaggataaatgtatgaacacgaccctaaccgagtgcgattttagctccttgagtaaatacggggatcatacactgagagtcagagcggagttcgctgacgagcattctgactgggtgaacatcaccttctgtcccgttgatgacacaatcataggaccgccaggcatgcaagtggaggttctcgccgacagtttgcacatgagatttttggcgcctaagatagaaaacgaatatgagacatggactatgaagaacgtgtataacagttggacatataacgtacagtattggaaaaacgggacggatgagaagtttcagattacgccacaatatgacttcgaggtgttacggaacctggagccctggaccacctactgcgtgcaggtcaggggcttcttacccgacaggaacaaagcgggcgagtggagcgagcctgtgtgcgagcagaccacacacgacgagacagtgcctagttggatggtggccgtgatactaatggcctccgtgtttatggtatgcctagcgcttctgggctgttttgcgctactttggtgtgtgtacaaaaagaccaaatacgctttcagtccccggaactccctcccccagcatctgaaggaatttctgggacacccccaccataacacactactcttttttagtttcccacttagtgacgagaatgatgtcttcgacaagttatccgtgatagcggaagactcagaaagtggtaagcaaaatccgggcgattcacccacgtcgagaacaccaaggccctggacttag

SEQ ID NO: 13992 - DNA, 1963 bp, Artificial Sequence
  derived and/or modified sequence
gccccgcccatctccgctggttcccggaagccgccgcggacaagctctcccgggcgcgggcgggggtcgtgtgcttggaggaagccgcggaacccccagcgtccgtccatggcgtggagccttgggagctggctgggtggctgcctgctggtgtcagcattgggaatggtaccacctcccgaaaatgtcagaatgaattctgttaatttcaagaacattctacagtgggagtcacctgcttttgccaaagggaacctgactttcacagctcagtacctaagttataggatattccaagataaatgcatgaatactaccttgacggaatgtgatttctcaagtctttccaagtatggtgaccacaccttgagagtcagggctgaatttgcagatgagcattcagactgggtaaacatcaccttctgtcctgtggatgacaccattattggaccccctggaatgcaagtagaagtacttgctgattctttacatatgcgtttcttagcccctaaaattgagaatgaatacgaaacttggactatgaagaatgtgtataactcatggacttataatgtgcaatactggaaaaacggtactgatgaaaagtttcaaattactccccagtatgactttgaggtcctcagaaacctggagccatggacaacttattgtgttcaagttcgagggtttcttcctgatcggaacaaagctggggaatggagtgagcctgtctgtgagcaaacaacccatgacgaaacggtcccctcctggatggtggccgtcatcctcatggcctcggtcttcatggtctgcctggcactcctcggctgcttcgccttgctgtggtgcgtttacaagaagacaaagtacgccttctcccctaggaattctcttccacagcacctgaaagagtttttgggccatcctcatcataacacacttctgtttttctcctttccattgtcggatgagaatgatgtttttgacaagctaagtgtcattgcagaagactctgagagcggcaagcagaatcctggtgacagctgcagcctcgggaccccgcctgggcaggggccccaaagctaggctctgagaaggaaacacactcggctgggcacagtgacgtactccatctcacatctgcctcagtgagggatcagggcagcaaacaagggccaagaccatctgagccagccccacatctagaactcccagaccctggacttagccaccagagagctacattttaaaggctgtcttggcaaaaatactccatttgggaactcactgccttataaaggctttcatgatgttttcagaagttggccactgagagtgtaattttcagccttttatatcactaaaataagatcatgttttaattgtgagaaacagggccgagcacagtggctcacgcctgtaataccagcaccttagaggtcgaggcaggcggatcacttgaggtcaggagttcaagaccagcctggccaatatggtgaaacccagtctctactaaaaatacaaaaattagctaggcatgatggcgcatgcctataatcccagctactcgagtgcctgaggcaggagaattgcatgaacccgggaggaggaggaggaggttgcagtgagccgagatagcggcactgcactccagcctgggtgacaaagtgagactccatctcaaaaaaaaaaaaaaaaaaaattgtgagaaacagaaatacttaaaatgaggaataagaatggagatgttacatctggtagatgtaacattctaccagattatggatggactgatctgaaaatcgacctcaactcaagggtggtcagctcaatgctacacagagcacggacttttggattctttgcagtactttgaatttatttttctacctatatatgttttatatgctgctggtgctccattaaagttttactctgtgttgcactatatgtgttcatgata

SEQ ID NO: 13993 - DNA, 1215 bp, Artificial Sequence
  derived and/or modified sequence
tccgtccatggcgtggagccttgggagctggctgggtggctgcctgctggtgtcagcattgggaatggtaccacctcccgaaaatgtcagaatgaattctgttaatttcaagaacattctacagtgggagtcacctgcttttgccaaagggaacctgactttcacagctcagtacctaagttataggatattccaagataaatgcatgaatactaccttgacggaatgtgatttctcaagtctttccaagtatggtgaccacaccttgagagtcagggctgaatttgcagatgagcattcagactgggtaaacatcaccttctgtcctgtggatgacaccattattggaccccctggaatgcaagtagaagtacttgctgattctttacatatgcgtttcttagcccctaaaattgagaatgaatacgaaacttggactatgaagaatgtgtataactcatggacttataatgtgcaatactggaaaaacggtactgatgaaaagtttcaaattactccccagtatgactttgaggtcctcagaaacctggagccatggacaacttattgtgttcaagttcgagggtttcttcctgatcggaacaaagctggggaatggagtgagcctgtctgtgagcaaacaacccatgacgaaacggtcccctcctggatggtggccgtcatcctcatggcctcggtcttcatggtctgcctggcactcctcggctgcttcgccttgctgtggtgcgtttacaagaagacaaagtacgccttctcccctaggaattctcttccacagcacctgaaagagtttttgggccatcctcatcataacacacttctgtttttctcctttccattgtcggatgagaatgatgtttttgacaagctaagtgtcattgcagaagactctgagagcggcaagcagaatcctggtgacagccccacatctagaactcccagaccctggacttagccaccagagagctacattttaaaggctgtcttggcaaaaatactccatttgggaactcactgccttataaaggctttcatgatgttttcagaagttggccactgagagtgtaattttcagccttttatatcactaaaataagatcatgttttaattgtgagaaacagggccgagcacagtggctcacgcctgtaataccagcaccttagaggtcgaggcaggcggatcacttgaggtca

SEQ ID NO: 13994 - DNA, 978 bp, Artificial Sequence
  derived and/or modified sequence
atggcctggagcctgggctcctggctgggcggctgcctgctggtgtctgccctgggcatggtgcccccaccagaaaatgtgaggatgaacagcgtgaacttcaagaacatcctgcagtgggagagccctgcctttgccaagggcaacctgaccttcaccgcccagtacctgagctaccgcatcttccaggacaagtgcatgaacaccaccctgacagaatgtgacttcagcagcctgagcaagtacggggaccacaccctgcgggtgcgggcagagtttgctgatgagcacagcgactgggtgaacatcaccttctgccctgtggatgacaccatcatcggccccccaggcatgcaggtggaggtgctggccgacagcctgcacatgaggttcctggcccccaagattgaaaatgaatatgagacctggaccatgaagaatgtgtacaacagctggacctacaacgtgcagtactggaagaatggaacagatgagaagttccagatcaccccccagtatgactttgaggtgctgaggaacctggagccctggaccacctactgtgtgcaggtgcggggcttcctgcctgacaggaacaaggccggggagtggagcgagcctgtgtgtgagcagaccacccatgatgaaacagtgcccagctggatggtggccgtcatcctgatggccagcgtcttcatggtgtgcctggccctgctgggctgctttgccctgctgtggtgtgtgtacaagaagaccaagtatgccttcagccccaggaacagcctgccccagcacctgaaggagttcctgggccacccccaccacaacaccctgctcttcttctccttccccctgagtgatgaaaatgatgtgtttgacaagctgtctgtgattgctgaggacagcgagagcggcaagcagaaccctggggacagctgcagcctgggcaccccacctggccagggcccccagagctag

SEQ ID NO: 13995 - DNA, 969 bp, Artificial Sequence
  derived and/or modified sequence
atggcctggagcctgggctcctggctgggcggctgcctgctggtgtctgccctgggcatggtgcccccaccagaaaatgtgaggatgaacagcgtgaacttcaagaacatcctgcagtgggagagccctgcctttgccaagggcaacctgaccttcaccgcccagtacctgagctaccgcatcttccaggacaagtgcatgaacaccaccctgacagaatgtgacttcagcagcctgagcaagtacggggaccacaccctgcgggtgcgggcagagtttgctgatgagcacagcgactgggtgaacatcaccttctgccctgtggatgacaccatcatcggccccccaggcatgcaggtggaggtgctggccgacagcctgcacatgaggttcctggcccccaagattgaaaatgaatatgagacctggaccatgaagaatgtgtacaacagctggacctacaacgtgcagtactggaagaatggaacagatgagaagttccagatcaccccccagtatgactttgaggtgctgaggaacctggagccctggaccacctactgtgtgcaggtgcggggcttcctgcctgacaggaacaaggccggggagtggagcgagcctgtgtgtgagcagaccacccatgatgaaacagtgcccagctggatggtggccgtcatcctgatggccagcgtcttcatggtgtgcctggccctgctgggctgctttgccctgctgtggtgtgtgtacaagaagaccaagtatgccttcagccccaggaacagcctgccccagcacctgaaggagttcctgggccacccccaccacaacaccctgctcttcttctccttccccctgagtgatgaaaatgatgtgtttgacaagctgtctgtgattgctgaggacagcgagagcggcaagcagaaccctggggacagccccaccagcaggaccccccggccctggacctag

SEQ ID NO: 13996 - DNA, 978 bp, Artificial Sequence
  derived and/or modified sequence
atggcctggagcctgggcagctggctgggcggctgcctgctggtgtccgcattagggatggtgccccccccagagaatgtgcggatgaattccgttaacttcaagaatatccttcagtgggaaagtcccgcctttgcaaaggggaacctcacctttaccgctcagtatctcagctatcgaatttttcaggataagtgcatgaatactaccttaaccgaatgtgatttcagcagcctgtccaaatatggagaccatactctgcgagtgagagcggagtttgctgacgagcacagcgactgggttaacatcaccttttgtccggtggacgataccattattgggccccccgggatgcaggtcgaagtcttggctgacagcctgcacatgcggttcctcgcacccaagatcgaaaacgagtatgagacctggacaatgaagaacgtatacaatagttggacctacaacgtacaatattggaagaatggaactgacgagaagtttcagatcaccccacagtacgacttcgaggtgcttcgaaaccttgagccatggacaacttactgtgtccaagtgagagggttcctccccgacaggaataaagcgggagagtggtcagaaccagtgtgcgagcagaccacccacgacgaaaccgtgccatcttggatggtggctgttatcctgatggcctccgtgttcatggtgtgccttgccttactgggttgctttgcattgctgtggtgtgtgtacaagaaaactaagtatgcattcagtcctagaaactcactacctcagcatctcaaggaattccttggtcacccacatcacaatacgctactgttttttagtttccccctctccgacgaaaatgatgtctttgacaaactgtccgttatcgccgaggactctgagtccggaaagcagaacccaggggacagctgcagtctggggacaccgcctggccaaggtccccagagctag

SEQ ID NO: 13997 - DNA, 969 bp, Artificial Sequence
  derived and/or modified sequence
atggcctggagcctgggcagctggctgggcggctgcctgctggtgtcagccctgggtatggtgccgccacctgagaatgtacgaatgaactcagttaactttaagaatatcttacagtgggaaagcccagccttcgcaaagggcaatttaacattcaccgcccagtaccttagttatcgaatttttcaggacaagtgcatgaacactactctaaccgagtgcgattttagttcgctctccaaatatggagatcacacactgagggtcagagctgaatttgctgacgagcactccgactgggttaatatcactttctgccccgtggacgatacaattatagggcctcctggtatgcaggtggaggtgctcgccgactccctccacatgagattcttagcccctaagatcgaaaacgaatacgaaacctggaccatgaaaaatgtatataattcttggacatataacgtgcagtactggaagaatggtacagacgagaagttccaaatcacgccgcagtatgactttgaggtgctaaggaacttagagccgtggaccacctattgtgttcaggtgcgcgggttcctgcccgaccggaacaaagctggtgaatggagtgaacccgtctgtgaacagacgacgcacgatgaaactgtcccgtcttggatggtggccgtgattctgatggcttcagtcttcatggtgtgtcttgccctgctcggctgttttgcgctattgtggtgtgtgtataaaaagacaaagtacgcgttcagccctcgaaactcattgcctcagcacctgaaagaattcctgggccacccgcatcacaacactctgctctttttctctttcccactatccgacgagaacgatgtattcgataagttaagtgtcatagcagaggacagcgagagcggcaaacagaacccaggcgattcacccacatcccggaccccacgtccctggacgtag

SEQ ID NO: 13998 - DNA, 978 bp, Artificial Sequence
  derived and/or modified sequence
atggcatggagtctcggcagctggttggggggttgtctcctggtgagtgccctcggcatggtgcctccccctgagaatgtacgcatgaactccgtgaatttcaaaaatatactgcagtgggagagccccgcttttgccaaaggcaacctaaccttcacggcccaatacctttcataccggatcttccaggataaatgtatgaataccaccctcactgagtgcgacttctcatccctaagcaagtacggggatcatactttacgggtgagagctgaatttgcggatgaacacagcgattgggtgaatatcactttttgtccagtcgacgacacaataattggcccacccggtatgcaggtggaggtgctcgctgactccctgcacatgagatttcttgctcccaagatcgaaaacgagtacgaaacatggaccatgaagaacgtttacaattcctggacctacaacgtccagtactggaagaacgggactgatgagaagttccagattactccccagtatgatttcgaagtgctccggaatctagaaccttggaccacttattgtgtacaagtaagggggttcctgccagaccggaataaagcaggggaatggagcgagccagtatgcgagcaaaccacccatgacgagactgttccttcctggatggtggctgtgatccttatggcctccgtgtttatggtttgtcttgcattactgggctgctttgcactgctatggtgtgtgtataagaaaacaaaatatgccttttctccaaggaactctctaccgcagcacctcaaagagttcctggggcatcctcaccataatactctccttttcttttccttcccattgagtgacgagaacgatgtcttcgataagctttctgttatcgcggaggattccgaatctggaaaacagaaccctggagatagttgtagccttgggacaccacccggtcagggtccacagagttag

SEQ ID NO: 13999 - DNA, 969 bp, Artificial Sequence
  derived and/or modified sequence
atggcctggtctttggggagctggctcggagggtgtttactcgtcagcgccctcggcatggtccctcccccagaaaacgtcaggatgaacagtgtgaattttaagaatatcctccagtgggagtctccagcgttcgctaagggaaacctcacatttaccgcccaatatttgtcctaccggattttccaggataaatgtatgaatactaccttgacagagtgcgatttctcatctcttagcaagtacggggaccacaccttaagggtccgggcagaattcgcagatgaacacagcgactgggtgaatattaccttttgtcccgtggacgacaccatcatcgggccacccggaatgcaggtcgaggttctggcggatagtctgcatatgcggttcctcgccccaaagattgagaacgaatatgagacatggacaatgaagaacgtgtacaactcttggacctacaacgtccagtactggaaaaacgggacagatgaaaaattccagattaccccacaatatgatttcgaggtgctgaggaacctggaaccttggacaacttactgtgtccaggtgcggggatttctccccgatcggaacaaggccggtgaatggagcgaaccagtttgtgaacaaaccactcatgacgaaacagtaccttcttggatggtggctgtgattctgatggcttccgtcttcatggtctgcctggccctattaggatgttttgctttgctgtggtgtgtctacaaaaagaccaaatacgccttttctcctagaaactcgctgccacagcacttgaaggaatttcttgggcacccgcaccacaacactttgctcttcttttccttcccactgtcggacgaaaacgacgtttttgacaagttatccgtcatagctgaggacagtgagtccggcaaacagaaccccggagatagtcccacctctcggacacccagaccatggacgtag

SEQ ID NO: 14000 - protein, 557 aa, Artificial Sequence
  derived and/or modified sequence
MMVVLLGATTLVLVAVAPWVLSAAAGGKNLKSPQKVEVDIIDDNFILRWNRSDESVGNVTFSFDYQKTGMDNWIKLSGCQNITSTKCNFSSLKLNVYEEIKLRIRAEKENTSSWYEVDSFTPFRKAQIGPPEVHLEAEDKAIVIHISPGTKDSVMWALDGLSFTYSLVIWKNSSGVEERIENIYSRHKIYKLSPETTYCLKVKAALLTSWKIGVYSPVHCIKTTVENELPPPENIEVSVQNQNYVLKWDYTYANMTFQVQWLHAFLKRNPGNHLYKWKQIPDCENVKTTQCVFPQNVFQKGIYLLRVQASDGNNTSFWSEEIKFDTEIQAFLLPPVFNIRSLSDSFHIYIGAPKQSGNTPVIQDYPLIYEIIFWENTSNAERKIIEKKTDVTVPNLKPLTVYCVKARAHTMDEKLNKSSVFSDAVCEKTKPGNTSKIWLIVGICIALFALPFVIYAAKVFLRCINYVFFPSLKPSSSIDEYFSEQPLKNLLLSTSEEQIEKCFIIENISTIATVEETNQTDEDHKKYSSQTSQDSGNYSNEDESESKTSEELQQDFV

SEQ ID NO: 14001 - protein, 488 aa, Artificial Sequence
  derived and/or modified sequence
MDNWIKLSGCQNITSTKCNFSSLKLNVYEEIKLRIRAEKENTSSWYEVDSFTPFRKAQIGPPEVHLEAEDKAIVIHISPGTKDSVMWALDGLSFTYSLVIWKNSSGVEERIENIYSRHKIYKLSPETTYCLKVKAALLTSWKIGVYSPVHCIKTTVENELPPPENIEVSVQNQNYVLKWDYTYANMTFQVQWLHAFLKRNPGNHLYKWKQIPDCENVKTTQCVFPQNVFQKGIYLLRVQASDGNNTSFWSEEIKFDTEIQAFLLPPVFNIRSLSDSFHIYIGAPKQSGNTPVIQDYPLIYEIIFWENTSNAERKIIEKKTDVTVPNLKPLTVYCVKARAHTMDEKLNKSSVFSDAVCEKTKPGNTSKIWLIVGICIALFALPFVIYAAKVFLRCINYVFFPSLKPSSSIDEYFSEQPLKNLLLSTSEEQIEKCFIIENISTIATVEETNQTDEDHKKYSSQTSQDSGNYSNEDESESKTSEELQQDFV

SEQ ID NO: 14002 - protein, 496 aa, Artificial Sequence
  derived and/or modified sequence
MMVVLLGATTLVLVAVAPWVLSAAAGGKNLKSPQKVEVDIIDDNFILRWNRSDESVGNVTFSFDYQKTGMDNWIKLSGCQNITSTKCNFSSLKLNVYEEIKLRIRAEKENTSSWYEVDSFTPFRKAQIGPPEVHLEAEDKAIVIHISPGTKDSVMWALDGLSFTYSLVIWKNSSGVEERIENIYSRHKIYKLSPETTYCLKVKAALLTSWKIGVYSPVHCIKTTVENELPPPENIEVSVQNQNYVLKWDYTYANMTFQVQWLHAFLKRNPGNHLYKWKQIPDCENVKTTQCVFPQNVFQKGIYLLRVQASDGNNTSFWSEEIKFDTEIQAFLLPPVFNIRSLSDSFHIYIGAPKQSGNTPVIQDYPLIYEIIFWENTSNAERKIIEKKTDVTVPNLKPLTVYCVKARAHTMDENDAVCEYFSEQPLKNLLLSTSEEQIEKCFIIENISTIATVEETNQTDEDHKKYSSQTSQDSGNYSNEDESESKTSEELQQDFV

SEQ ID NO: 14003 - DNA, 1674 bp, Artificial Sequence
  derived and/or modified sequence
atgatggtggtgctgctaggggcaacaacattggttctggttgcagtggccccttgggtactgtccgcggctgccggaggcaaaaatttgaagagtccccagaaggtagaggttgacataatagatgataatttcattcttagatggaacagaagtgacgagtcagttgggaatgtgaccttcagcttcgattatcagaaaactgggatggacaattggattaagctgtcaggttgccagaacattacgtcaactaaatgtaacttctcgtcactaaaactgaatgtgtatgaggagattaagctgcgcatccgcgctgagaaggaaaatacatcttcttggtacgaggtggattccttcaccccatttagaaaagcccagatcggccctcctgaagtgcacttggaagcagaggacaaagctatcgtgatccacattagccccggtacaaaagattccgtgatgtgggccctggatggccttagctttacttattctctcgtgatttggaagaacagtagcggcgtggaggaaagaatcgagaatatttatagccgtcataagatttataagctctcgccagagacaacctactgcctcaaagttaaggcagccctgcttaccagctggaagattggggtgtactcccccgtgcattgtataaagactaccgttgaaaatgaactcccccctcccgaaaacatcgaagtctcggttcagaaccaaaattatgttctaaaatgggattacacctacgccaacatgaccttccaggtgcagtggctgcacgcctttcttaaacggaacccgggcaaccatctatataaatggaagcagattccagactgcgagaacgtgaaaaccacacaatgtgtcttcccccagaacgtcttccagaaaggcatttatcttcttcgggtgcaggccagtgatggaaacaatacgtcattttggtccgaagaaattaaattcgacaccgaaattcaggcattcctactcccccctgtgttcaatatccgctccctctcagactcattccacatatacatcggcgcccctaagcagtctggaaatacccccgtcatccaagactacccactgatttatgagattatcttctgggagaacacttcgaatgccgaaaggaagattatcgaaaagaaaaccgatgtgactgttcctaatctgaaaccactgacggtttactgcgttaaggcacgcgcccacaccatggacgaaaaactcaacaaatcatccgtgttctccgatgccgtctgcgaaaaaaccaaacccgggaacacctcgaagatttggctcattgtgggtatatgcatcgcactgttcgccctcccttttgtgatctacgcggccaaggtgtttctgcggtgtatcaattacgtctttttcccctctcttaagcccagctccagcatagacgaatacttcagtgagcagccgctgaagaatctgttactgagcactagcgaggagcagatcgagaaatgctttattatcgagaatatctctacaatagccactgttgaggagactaatcagacggacgaggaccacaaaaaatacagcagccagactagtcaggattccggaaattactctaacgaggacgaatctgagagtaaaactagcgaggagctgcagcaggacttcgtttag

SEQ ID NO: 14004 - DNA, 1467 bp, Artificial Sequence
  derived and/or modified sequence
atggataactggatcaaactaagtggctgtcaaaacatcacgtcaaccaagtgtaattttagttcgcttaaactgaacgtgtacgaggaaatcaagctgcgcattcgcgcggaaaaggaaaacaccagttcttggtatgaagttgatagcttcacacctttccgcaaggcacagatcggacccccagaggttcatcttgaggccgaagataaagctatagtcatacacatctccccaggaaccaaagacagcgtgatgtgggccctggacggtctgagcttcacctacagcctcgtcatttggaagaactcaagtggagttgaggaacgcattgagaacatctacagcagacacaagatttataaactctccccagagaccacttattgtctgaaagtgaaggccgcattgctgacctcttggaagataggagtttatagtccagtgcactgtattaagacaaccgtggagaacgagctgcctcctccagagaatatcgaagtgagtgtgcagaaccagaattacgttctgaagtgggattacacctacgcaaacatgacctttcaggtgcagtggctgcacgcatttcttaagcggaacccggggaatcacctgtacaagtggaagcagattcctgattgcgaaaatgttaaaaccacccagtgcgtgttcccccaaaatgtctttcaaaaaggtatctacctgcttcgggtccaagcatctgatggcaataacactagcttctggtctgaagaaatcaagtttgacaccgaaatccaagcgttcctgttgccccctgtcttcaacatacgctctctcagcgattcattccatatttatatcggggcccccaagcagagcggcaacacaccagtcatccaggactaccccctgatctatgagatcattttttgggaaaatacctccaatgctgagcggaaaattatagaaaagaaaacagatgtaactgtccctaacttgaaacctctgacagtttattgcgtgaaagcccgagcccacaccatggacgaaaagcttaataagtcctctgtctttagcgatgcggtgtgtgagaagaccaaacctggaaatacaagtaagatctggttaattgtggggatctgtattgccctatttgcgctgccatttgtgatctatgccgccaaggtgttcctgaggtgcataaattatgtattttttcctagtttaaaaccgtcatcttctatcgatgaatatttctccgagcaacctttaaaaaacctcctgttgagcacgtcagaggagcaaattgagaagtgctttataattgaaaacatttctaccattgccactgtggaagagaccaaccagactgacgaggatcataagaagtattcgtctcaaacatcacaggactctggaaactactccaacgaagacgaaagtgaatctaaaacaagtgaggaactgcaacaagattttgtgtag

SEQ ID NO: 14005 - DNA, 1491 bp, Artificial Sequence
  derived and/or modified sequence
atgatggtcgtactgctgggcgccaccacacttgtgcttgtggctgtcgccccatgggttctgagtgctgcggctggtggaaagaatctaaaaagcccacaaaaggtggaggtggacattattgatgataacttcatcttaaggtggaaccgctccgatgaatctgtcgggaatgtcacattcagctttgattaccaaaagaccgggatggacaattggatcaagctcagcggctgtcagaacatcaccagtactaaatgtaacttcagttccctgaagctgaacgtctacgaagaaatcaagctgcgtattagagctgagaaagaaaacacatcctcctggtatgaggttgatagctttacacccttccgcaaggcccagataggccctccagaggtgcacttagaggccgaagataaggcgatcgtgattcacatctcgccaggcaccaaagattccgtgatgtgggccttagacggactctccttcacctactccctggttatatggaagaatagctccggcgtggaggaaaggatagaaaacatctatagtagacacaagatctacaaactttccccagagaccacgtactgtcttaaagtgaaggcagctctcctcaccagttggaagatcggtgtgtactcccccgtgcattgcataaagacaaccgtggaaaacgagttgcctccacctgagaatatcgaagtttccgtacagaaccaaaattacgtgttgaagtgggactatacttacgctaacatgacatttcaggtgcagtggttgcacgcctttctgaagcggaatcctggcaatcacctttacaagtggaagcagatcccagactgcgagaatgtaaagactacccagtgcgtttttccacagaacgtgttccaaaaagggatttacctccttagggtgcaagcctccgatgggaacaacactagtttctggagtgaggagatcaaatttgacacagagatccaggcctttctcctgcctcctgtgttcaacataagatctctgagcgactcgttccacatctatattggcgcccctaaacaatcaggaaacacgcctgtcattcaggattacccccttatctacgagatcatattttgggagaacacctccaacgccgaaagaaaaattattgaaaagaagacagatgttactgttccaaacctgaagcccctcacagtctactgtgtgaaggcacgtgcccacaccatggacgagaatgatgctgtctgtgaatacttttcagaacaaccgctgaagaatctcctactgagcacaagtgaggagcagattgagaaatgtttcatcattgagaacatatctacgatcgccacagtagaggaaactaaccagactgacgaggatcacaaaaagtattcctcccagacaagtcaggactcagggaactattccaacgaggacgagagtgaatccaagacttccgaagaactgcagcaggattttgtgtag

SEQ ID NO: 14006 - DNA, 6139 bp, Artificial Sequence
  derived and/or modified sequence
agaagaggcggcgcgtgcgtagaggggcggtgagagctaagaggggcagcgcgtgtgcagaggggcggtgtgacttaggacggggcgatggcggctgagaggagctgcgcgtgcgcgaacatgtaactggtgggatctgcggcggctcccagatgatggtcgtcctcctgggcgcgacgaccctagtgctcgtcgccgtggcgccatgggtgttgtccgcagccgcaggtggaaaaaatctaaaatctcctcaaaaagtagaggtcgacatcatagatgacaactttatcctgaggtggaacaggagcgatgagtctgtcgggaatgtgactttttcattcgattatcaaaaaactgggatggataattggataaaattgtctgggtgtcagaatattactagtaccaaatgcaacttttcttcactcaagctgaatgtttatgaagaaattaaattgcgtataagagcagaaaaagaaaacacttcttcatggtatgaggttgactcatttacaccatttcgcaaagctcagattggtcctccagaagtacatttagaagctgaagataaggcaatagtgatacacatctctcctggaacaaaagatagtgttatgtgggctttggatggtttaagctttacatatagcttagttatctggaaaaactcttcaggtgtagaagaaaggattgaaaatatttattccagacataaaatttataaactctcaccagagactacttattgtctaaaagttaaagcagcactacttacgtcatggaaaattggtgtctatagtccagtacattgtataaagaccacagttgaaaatgaactacctccaccagaaaatatagaagtcagtgtccaaaatcagaactatgttcttaaatgggattatacatatgcaaacatgacctttcaagttcagtggctccacgcctttttaaaaaggaatcctggaaaccatttgtataaatggaaacaaatacctgactgtgaaaatgtcaaaactacccagtgtgtctttcctcaaaacgttttccaaaaaggaatttaccttctccgcgtacaagcatctgatggaaataacacatctttttggtctgaagagataaagtttgatactgaaatacaagctttcctacttcctccagtctttaacattagatcccttagtgattcattccatatctatatcggtgctccaaaacagtctggaaacacgcctgtgatccaggattatccactgatttatgaaattattttttgggaaaacacttcaaatgctgagagaaaaattatcgagaaaaaaactgatgttacagttcctaatttgaaaccactgactgtatattgtgtgaaagccagagcacacaccatggatgaaaagctgaataaaagcagtgtttttagtgacgctgtatgtgagaaaacaaaaccaggaaatacctctaaaatttggcttatagttggaatttgtattgcattatttgctctcccgtttgtcatttatgctgcgaaagtcttcttgagatgcatcaattatgtcttctttccatcacttaaaccttcttccagtatagatgagtatttctctgaacagccattgaagaatcttctgctttcaacttctgaggaacaaatcgaaaaatgtttcataattgaaaatataagcacaattgctacagtagaagaaactaatcaaactgatgaagatcataaaaaatacagttcccaaactagccaagattcaggaaattattctaatgaagatgaaagcgaaagtaaaacaagtgaagaactacagcaggactttgtatgaccagaaatgaactgtgtcaagtataaggtttttcagcaggagttacactgggagcctgaggtcctcaccttcctctcagtaactacagagaggacgtttccctgtttagggaaagaaaaaacatcttcagatcataggtcctaaaaatacgggcaagctcttaactatttaaaaatgaaattacaggcccgggcacggtggctcacacctgtaatcccagcactttgggaggctgaggcaggcagatcatgaggtcaagagatcgagaccagcctggccaacgtggtgaaaccccatctctactaaaaatacaaaaattagccgggtgtggtggcgcgcgcctgttgtcttagctactcaggaggctgaggcaggagaatcgcttgaaaacaggaggtggaggttgcagtgagccgagatcacgccactgcactccagcctggtgacagcgtgagactctttaaaaaaagaaattaaaagagttgagacaaacgtttcctacattcttttccatgtgtaaaatcatgaaaaagcctgtcaccggacttgcattggatgagatgagtcagaccaaaacagtggccacccgtcttcctcctgtgagcctaagtgcagccgtgctagctgcgcaccgtggctaaggatgacgtctgtgttcctgtccatcactgatgctgctggctactgcatgtgccacacctgtctgttcgccattcctaacattctgtttcattcttcctcgggagatatttcaaacatttggtcttttcttttaacactgagggtaggcccttaggaaatttatttaggaaagtctgaacacgttatcacttggttttctggaaagtagcttaccctagaaaacagctgcaaatgccagaaagatgatccctaaaaatgttgagggacttctgttcattcatcccgagaacattggcttccacatcacagtatctacccttacatggtttaggattaaagccaggcaatcttttactatgcattaagacctctgattcaaaacttattagaacagtagcttctgctggaatttgcaatcactgaagtcatagaaaataggtaactatctaattagagaaataattgttgtattttaagatctgagagtgtgtacaagttttagtatacatgccatgccagaagatagtgtatgcaagaagtcttgggaccagaaaatggcaatgataggagactgacatagaagaagaatgcttccctaggaaaaaggtcgctggctttggtgcaagaggaagaagaatgttccactggaagcctgagcacctaatcagctctcagtgatcaacccactcttgttatgggtggtctctgtcactttgaatgccaggctggcttctcgtctagcagtattcagataccccttctgctcagcctgcttggcgttaaaatacaaatcattgaactgagggggaaaaatgtaactaggaagaaaaacccaatttaagaaattacataatgctttccaaaggcacctacaacttagttttaaattacttgctactggggattacccatggatatccttaataggcaggaagtctgggaattctggtggcctctagggcagtgttctcacagcaccgttccgacagggaccagtgaaagaaaagagacaaagttagaacgtgctggggagcggccatttctaaggccagtctggtttaagtagtcatttctgctgaaaaaacagatgatcctggtggaagaaaaggttgaaggcagctgccctcgggagggctgtgatgctcggcacatcctgcctggcacatacacgtgtctgcaggccacaccgtgcatgtccccagacctgccgcctggcttctggagtgcttcaagcagagcatggtgggtcattgaggagacccaggaatctcatctgagaacccactctctgccggagaaccccatggtgacacattttcatctttctgaccagaggctgtttttttttttttttgagacagtctcattctgttgcccaggctggagtgcagtggcttgatctcggctcactgcaacctcgcctcccgggttcaagcaattctctgccgcagcctccagagtagctgggataacaggtgcccaccaccacaccccactaatttttgtatttgtatttttagtagagatggggtttcaccatgttggtcaggctggtcttggactcctgacctcatgctccacccgcttcggcctcccaaagttctgggattacaggtgtgagccaccgtgcacggccggcctgacctttggaaaagccttgtcactttggacgtttgcgtctttgaagaggcgatgggagcatatcatgactgcctgccaccattgcttttcagactaccacaactcaatcatgctgtccaggacttctggccctgtgttcaccactgggaaaacgtacttcagactggatagcctaaaaaggagcaatgcccttgtaggatgtggagaagggaaaatacggacattaacattaaaagacaccagtgaaattgttaggtctctaggaagttggagcacaaggcttcacgctttaagaccatctgtggttttcagtgaacaagcgctgagcaccagcagcagaaaacaacaacaaaaaaacacctcgtttttaccttgtcttctagacatgaaaaggcagttgcattccactctgcattatgttctacatgttgctttatcagtatatgcttagctgtaagtgacaagtattttttctgaacagaagtttacttagaaataccatgcacttgggggtaccaattaaccgcctgaaaattagcatattgatagttcttagagagaccagatataatctaagaatttatatgaaagatttgtatcattagagccagaaataattttatattaatatataatacagattaacattatatataatatgtacctgtgtcacttctgacatgagcctgtaaacatatattcatatatgtacctgcacatgtacccacctgatgtaggtcttattcctttagtatggacttaaagtacttattcatataccttgtaactaaaaattagaacagctccctagaattgtgaacttttaagagtctgactagaaatttgcaacttataaaaaagttacttttaaaaatataagttagggctaggcacagtggctcatgcctataatctcagcacttttgggaggccaagacaggaggatcacttcaggccaggagttcaagatcaaccaacctgggtaacatggccagaccccatctctatttatatatatatatataaaacttagagtttttatcttcccctaaaagaggccgtgatatttgcagcagcctcaaattgctcttaaggggtttaggtgtgcagaagctttcctttccctacccagtaaccatgtgactactaacgtggtatattgatttattttgtttgctgtctgtctcccctgccccactgctggaacagaggctccaagaaaacagggaccttattattcattactgcatccccagtaatgaaagtacttagaaaataattattgaatgaatgaaatctaaactgtgaacctgagggtgtttgtggcagtgtttgttttactgaattgtagaaggacataaccgtgttttcagtgtttctatggaacaaacttgtacattttatttcacttgtgttttgtcttaaaccctactgctggaaacaattttatgtaataagcaatgggcccaaaagtctaggagtttttttgtacttagtgaatttgtatgcaacagagatgctgcagctgatgcctttaaaaggtattcatcatggaagagctgaggcctgtgcttggtgttccagagcccagggttgagcatcctgaaggagccactgcagccgtcactgtccccagagcctgtggagatagagcctgtttgctgctttttcttcccgctcttaagacatggctggagctcagtcttcattgaatgaagtttgctgtggtattgcatagccttgctttcttgaactaaactgtttgcccttcacaagtagttcttctttcaggattagttcgttccaaggaggctcttcagtctcacagataagtagatctctcctgctgtctggacacatttcactcggaaattgaatacaatttgtattcaggctgggaacctgaacacacacttgtgtttttaagcttcccttttttacagtggacaaggacacaaataataaataaatcatccctaatgcccaagaaatgccctggtacttagtaataacaaaataccagtaacttc

SEQ ID NO: 14007 - DNA, 1950 bp, Artificial Sequence
  derived and/or modified sequence
tcagccacttcctccttccagcctcatctggttcccaggccgctggggactcccaacgccactgtccaagactctagggtcagcaagcgccccgggcggagaagggcgaggacgaagagcgccgggccgcgaccaggagcccacccgcgccctccgactgcagacatggggaagagacgcgggaactccaaagtcgctgggtctgcgcaggtggaaaaaatctaaaatctcctcaaaaagtagaggtcgacatcatagatgacaactttatcctgaggtggaacaggagcgatgagtctgtcgggaatgtgactttttcattcgattatcaaaaaactgggatggataattggataaaattgtctgggtgtcagaatattactagtaccaaatgcaacttttcttcactcaagctgaatgtttatgaagaaattaaattgcgtataagagcagaaaaagaaaacacttcttcatggtatgaggttgactcatttacaccatttcgcaaagctcagattggtcctccagaagtacatttagaagctgaagataaggcaatagtgatacacatctctcctggaacaaaagatagtgttatgtgggctttggatggtttaagctttacatatagcttagttatctggaaaaactcttcaggtgtagaagaaaggattgaaaatatttattccagacataaaatttataaactctcaccagagactacttattgtctaaaagttaaagcagcactacttacgtcatggaaaattggtgtctatagtccagtacattgtataaagaccacagttgaaaatgaactacctccaccagaaaatatagaagtcagtgtccaaaatcagaactatgttcttaaatgggattatacatatgcaaacatgacctttcaagttcagtggctccacgcctttttaaaaaggaatcctggaaaccatttgtataaatggaaacaaatacctgactgtgaaaatgtcaaaactacccagtgtgtctttcctcaaaacgttttccaaaaaggaatttaccttctccgcgtacaagcatctgatggaaataacacatctttttggtctgaagagataaagtttgatactgaaatacaagctttcctacttcctccagtctttaacattagatcccttagtgattcattccatatctatatcggtgctccaaaacagtctggaaacacgcctgtgatccaggattatccactgatttatgaaattattttttgggaaaacacttcaaatgctgagagaaaaattatcgagaaaaaaactgatgttacagttcctaatttgaaaccactgactgtatattgtgtgaaagccagagcacacaccatggatgaaaagctgaataaaagcagtgtttttagtgacgctgtatgtgagaaaacaaaaccaggaaatacctctaaaatttggcttatagttggaatttgtattgcattatttgctctcccgtttgtcatttatgctgcgaaagtcttcttgagatgcatcaattatgtcttctttccatcacttaaaccttcttccagtatagatgagtatttctctgaacagccattgaagaatcttctgctttcaacttctgaggaacaaatcgaaaaatgtttcataattgaaaatataagcacaattgctacagtagaagaaactaatcaaactgatgaagatcataaaaaatacagttcccaaactagccaagattcaggaaattattctaatgaagatgaaagcgaaagtaaaacaagtgaagaactacagcaggactttgtatgaccagaaatgaactgtgtcaagtataaggtttttcagcaggagttacactgggagcctgaggtcctcaccttcctctcagtaactacagagaggacgtttccctgtttagggaaagaaaaaacatcttcagatcataggtcct

SEQ ID NO: 14008 - DNA, 1878 bp, Artificial Sequence
  derived and/or modified sequence
gtgacttaggacggggcgatggcggctgagaggagctgcgcgtgcgcgaacatgtaactggtgggatctgcggcggctcccagatgatggtcgtcctcctgggcgcgacgaccctagtgctcgtcgccgtggcgccatgggtgttgtccgcagccgcaggtggaaaaaatctaaaatctcctcaaaaagtagaggtcgacatcatagatgacaactttatcctgaggtggaacaggagcgatgagtctgtcgggaatgtgactttttcattcgattatcaaaaaactgggatggataattggataaaattgtctgggtgtcagaatattactagtaccaaatgcaacttttcttcactcaagctgaatgtttatgaagaaattaaattgcgtataagagcagaaaaagaaaacacttcttcatggtatgaggttgactcatttacaccatttcgcaaagctcagattggtcctccagaagtacatttagaagctgaagataaggcaatagtgatacacatctctcctggaacaaaagatagtgttatgtgggctttggatggtttaagctttacatatagcttagttatctggaaaaactcttcaggtgtagaagaaaggattgaaaatatttattccagacataaaatttataaactctcaccagagactacttattgtctaaaagttaaagcagcactacttacgtcatggaaaattggtgtctatagtccagtacattgtataaagaccacagttgaaaatgaactacctccaccagaaaatatagaagtcagtgtccaaaatcagaactatgttcttaaatgggattatacatatgcaaacatgacctttcaagttcagtggctccacgcctttttaaaaaggaatcctggaaaccatttgtataaatggaaacaaatacctgactgtgaaaatgtcaaaactacccagtgtgtctttcctcaaaacgttttccaaaaaggaatttaccttctccgcgtacaagcatctgatggaaataacacatctttttggtctgaagagataaagtttgatactgaaatacaagctttcctacttcctccagtctttaacattagatcccttagtgattcattccatatctatatcggtgctccaaaacagtctggaaacacgcctgtgatccaggattatccactgatttatgaaattattttttgggaaaacacttcaaatgctgagagaaaaattatcgagaaaaaaactgatgttacagttcctaatttgaaaccactgactgtatattgtgtgaaagccagagcacacaccatggatgaaaatgacgctgtatgtgagtatttctctgaacagccattgaagaatcttctgctttcaacttctgaggaacaaatcgaaaaatgtttcataattgaaaatataagcacaattgctacagtagaagaaactaatcaaactgatgaagatcataaaaaatacagttcccaaactagccaagattcaggaaattattctaatgaagatgaaagcgaaagtaaaacaagtgaagaactacagcaggactttgtatgaccagaaatgaactgtgtcaagtataaggtttttcagcaggagttacactgggagcctgaggtcctcaccttcctctcagtaactacagagaggacgtttccctgtttagggaaagaaaaaacatcttcagatcataggtcctaaaaatacgggcaagctcttaactatttaaaaatgaaattacaggcccgggcacggtggctcacacctgtaatcccagcactttgggaggctgaggcaggcagatcatgaggtcaagagatcgagaccagcctggccaacgtggtgaaaccccatctctact

SEQ ID NO: 14009 - DNA, 1674 bp, Artificial Sequence
  derived and/or modified sequence
atgatggtggtgctgctgggcgccaccaccctggtgctggtggccgtggccccctgggtgctgtctgctgctgctgggggcaagaacctgaagagcccccagaaggtggaggtggacatcattgatgacaacttcatcctgcgctggaacagaagtgatgaatctgtgggcaatgtgaccttctcctttgactaccagaagacaggcatggacaactggatcaagctgagcggctgccagaacatcaccagcaccaagtgcaacttcagcagcctgaagctgaatgtgtatgaggagatcaagctgcgcatccgggcagagaaggagaacaccagctcctggtatgaggtggacagcttcacccccttcaggaaggcccagatcggccccccagaggtgcacctggaggccgaggacaaggccatcgtcatccacatcagccctggcaccaaggacagcgtgatgtgggccctggatggcctgtccttcacctacagcctggtgatctggaagaacagcagcggcgtggaggagagaattgagaacatctacagccgccacaagatctacaagctgagccctgagaccacctactgcctgaaggtgaaggccgccctgctgacctcctggaagattggagtgtacagccctgtgcactgcatcaagaccaccgtggagaatgagctgcccccaccagaaaatattgaggtgtctgtgcagaaccagaactacgtgctgaagtgggactacacctacgccaacatgaccttccaggtgcagtggctgcacgccttcctgaagaggaaccctggcaaccacctgtacaagtggaagcagatcccagactgtgaaaatgtgaagaccacccagtgtgtgttcccccagaatgtgttccagaagggcatctacctgctgcgggtgcaggccagtgatggcaacaacaccagcttctggagcgaggagatcaagtttgacacagagatccaggccttcctgctgccccctgtgttcaacatccgcagcctgagtgacagcttccacatctacatcggggcccccaagcagagcggcaacacccctgtgatccaggactaccccctcatctatgagatcatcttctgggagaacaccagcaatgctgagaggaagatcatcgagaagaagacagatgtgacagtgcccaacctgaagcccctgactgtgtactgtgtgaaggcccgggcccacaccatggatgagaagctgaacaagagctctgtgttcagtgatgctgtgtgtgagaagaccaagccaggcaacaccagcaagatctggctgattgtgggcatctgcatcgccctgtttgccctgcccttcgtcatctatgctgccaaggtgttcctgcgctgcatcaactacgtgttcttccccagcctgaagcccagcagcagcattgatgagtacttcagcgagcagcccctgaagaacctgctgctgagcaccagcgaggagcagatcgagaagtgcttcatcatcgagaacatcagcaccatcgccaccgtggaggagaccaaccagacagatgaggaccacaagaagtacagcagccagaccagccaggacagcggcaactacagcaatgaagatgagagcgagagcaagaccagcgaggagctgcagcaggactttgtgtag

SEQ ID NO: 14010 - DNA, 1467 bp, Artificial Sequence
  derived and/or modified sequence
atggacaactggatcaagctgagcggctgccagaacatcaccagcaccaagtgcaacttcagcagcctgaagctgaatgtgtatgaggagatcaagctgcgcatccgggcagagaaggagaacaccagctcctggtatgaggtggacagcttcacccccttcaggaaggcccagatcggccccccagaggtgcacctggaggccgaggacaaggccatcgtcatccacatcagccctggcaccaaggacagcgtgatgtgggccctggatggcctgtccttcacctacagcctggtgatctggaagaacagcagtggagtggaggagagaattgagaacatctacagccgccacaagatctacaagctgagccctgagaccacctactgcctgaaggtgaaggccgccctgctgacctcctggaagattggagtgtacagccctgtgcactgcatcaagaccaccgtggagaatgagctgcccccacctgagaacatcgaggtgtctgtgcagaaccagaactacgtgctgaagtgggactacacctacgccaacatgaccttccaggtgcagtggctgcacgccttcctgaagagaaatcctggcaaccacctgtacaagtggaagcagatcccagactgtgaaaatgtgaagaccacccagtgtgtgttcccccagaatgtgttccagaagggcatctacctgctgcgggtgcaggccagtgatggcaacaacaccagcttctggagcgaggagatcaagtttgacacagagatccaggccttcctgctgccccctgtgttcaacatccgcagcctgagtgacagcttccacatctacatcggggcccccaagcagagcggcaacacccctgtgatccaggactaccccctcatctatgagatcatcttctgggagaacaccagcaatgctgagaggaagatcatcgagaagaagacagatgtgacagtgcccaacctgaagcccctgactgtgtactgtgtgaaggcccgggcccacaccatggatgagaagctgaacaagagcagcgtcttcagtgatgctgtgtgtgagaagaccaagccaggcaacaccagcaagatctggctgattgtgggcatctgcatcgccctgtttgccctgccctttgtgatctatgctgccaaggtgttcctgcgctgcatcaactacgtgttcttccccagcctgaagcccagcagcagcattgatgagtacttcagcgagcagcccctgaagaacctgctgctgagcaccagcgaggagcagatcgagaagtgcttcatcatcgagaacatcagcaccatcgccaccgtggaggagaccaaccagacagatgaggaccacaagaagtacagcagccagaccagccaggacagcggcaactacagcaatgaagatgaaagtgagagcaagaccagcgaggagctgcagcaggactttgtgtag

SEQ ID NO: 14011 - DNA, 1491 bp, Artificial Sequence
  derived and/or modified sequence
atgatggtggtgctgctgggcgccaccaccctggtgctggtggccgtggccccctgggtgctgtctgctgctgctgggggcaagaacctgaagagcccccagaaggtggaggtggacatcattgatgacaacttcatcctgcgctggaacagaagtgatgaatctgtgggcaatgtgaccttctcctttgactaccagaagacaggcatggacaactggatcaagctgagcggctgccagaacatcaccagcaccaagtgcaacttcagcagcctgaagctgaatgtgtatgaggagatcaagctgcgcatccgggcagagaaggagaacaccagctcctggtatgaggtggacagcttcacccccttcaggaaggcccagatcggccccccagaggtgcacctggaggccgaggacaaggccatcgtcatccacatcagccctggcaccaaggacagcgtgatgtgggccctggatggcctgtccttcacctacagcctggtgatctggaagaacagcagcggcgtggaggagagaattgagaacatctacagccgccacaagatctacaagctgagccctgagaccacctactgcctgaaggtgaaggccgccctgctgacctcctggaagattggagtgtacagccctgtgcactgcatcaagaccaccgtggagaatgagctgcccccaccagaaaatattgaggtgtctgtgcagaaccagaactacgtgctgaagtgggactacacctacgccaacatgaccttccaggtgcagtggctgcacgccttcctgaagaggaaccctggcaaccacctgtacaagtggaagcagatcccagactgtgaaaatgtgaagaccacccagtgtgtgttcccccagaatgtgttccagaagggcatctacctgctgcgggtgcaggccagtgatggcaacaacaccagcttctggagcgaggagatcaagtttgacacagagatccaggccttcctgctgccccctgtgttcaacatccgcagcctgagtgacagcttccacatctacatcggggcccccaagcagagcggcaacacccctgtgatccaggactaccccctcatctatgagatcatcttctgggagaacaccagcaatgctgagaggaagatcatcgagaagaagacagatgtgacagtgcccaacctgaagcccctgactgtgtactgtgtgaaggcccgggcccacaccatggatgaaaatgatgctgtgtgtgagtacttcagcgagcagcccctgaagaacctgctgctgagcaccagcgaggagcagatcgagaagtgcttcatcatcgagaacatcagcaccatcgccaccgtggaggagaccaaccagacagatgaggaccacaagaagtacagcagccagaccagccaggacagcggcaactacagcaatgaagatgaaagtgagagcaagaccagcgaggagctgcagcaggactttgtgtag

SEQ ID NO: 14012 - DNA, 1674 bp, Artificial Sequence
  derived and/or modified sequence
atgatggtggtgctgctgggcgccaccaccctggtgctggtggccgtggccccgtgggtccttagcgcggccgcggggggtaaaaacttaaaatcaccacagaaggtcgaggtggacatcatcgacgacaactttatactcaggtggaaccgttccgatgaatctgtcggtaacgtgaccttttcatttgactatcagaagaccgggatggataactggattaaactcagcggatgccaaaacatcacttccaccaagtgcaattttagcagcctcaagcttaacgtgtacgaggagatcaagttgcggatccgcgccgaaaaggaaaatacttcttcctggtacgaggtggatagcttcacccccttccgcaaagcacaaatcggcccaccagaggtacatctggaggctgaagataaagctatagtaatacacatctccccaggcacgaaggattccgtcatgtgggctttagatgggctgtcattcacctactctctggttatttggaaaaattcttccggcgtagaggagagaattgagaatatttatagtcgccataagatttacaaactttctcctgagacgacctattgtctcaaggtgaaagcagctctgttaactagctggaaaattggggtctatagcccagtgcattgcataaagacaactgtagaaaatgagttaccgcctcccgaaaatatcgaggtaagtgttcagaaccagaactatgtgctaaaatgggactatacttatgcgaatatgaccttccaggtccagtggcttcacgcttttctgaagcgtaatcccggtaaccatctgtataagtggaagcagatccccgactgcgaaaatgtaaagactacccagtgcgtgttcccccagaatgtctttcaaaaaggaatctacttgctcagagtccaggctagtgatggcaataacacatctttttggtcggaagaaataaagttcgataccgaaatccaggcattcctgctgccaccggtgtttaacatccgtagtctctccgattcttttcatatttatatcggggctcctaagcagagcggcaacacccctgttatacaagactatccactgatttacgagatcatcttctgggagaacacctccaatgctgaacggaagatcatcgagaagaaaacagacgtcacagtgcccaatctcaagcccctcactgtttattgtgtcaaggctagggcgcacactatggatgaaaagctcaataaatctagtgtgttttctgacgcagtatgcgagaagacaaagcctggcaacacctcgaaaatttggctgatcgtaggcatctgcatagccctatttgcgctgcctttcgtgatttacgccgctaaagtttttctgcggtgtatcaattatgtcttttttccatctctgaaaccaagctcttcaatagacgaatattttagcgagcagccactgaagaacctgttgctgtccacgtctgaagagcagattgaaaaatgcttcataatcgaaaatatctcaaccatcgcgactgttgaagagacaaatcaaaccgacgaggaccacaagaaatatagttcacagactagccaggactcgggcaactactcaaatgaggatgagtctgaaagcaaaacatcagaagagctccagcaggatttcgtctag

SEQ ID NO: 14013 - DNA, 1467 bp, Artificial Sequence
  derived and/or modified sequence
atggacaactggatcaagctgagcggctgccagaacatcaccagcactaagtgcaacttttcctccttaaaacttaacgtctatgaggaaatcaagctgcgtattagagccgagaaggaaaatactagcagttggtacgaggtagacagcttcacacctttccgcaaagcccagatcggccctcctgaggtgcacttagaagccgaggataaggctatcgtgatacacattagccccggcactaaggactctgtcatgtgggcattggatggattatccttcacttattcgctcgtgatctggaaaaacagtagcggagttgaggagagaatagaaaacatctacagccgacacaagatctacaaattgtcgcccgaaacaacttactgcctgaaggtcaaagcagccctgttaaccagctggaaaataggcgtttacagtcccgttcattgcattaagacaactgtggagaacgaactcccgccaccagagaatatcgaggtgagcgtccagaaccagaattacgtcctaaaatgggactacacctatgccaacatgacttttcaggtccagtggttacacgccttcctgaaaaggaaccccggcaaccacctgtacaagtggaagcaaatacctgactgcgagaacgtcaagaccacgcaatgcgttttccctcagaatgtgttccagaagggaatttatctgcttcgcgtccaggcttccgacggaaataacacatctttttggtccgaggagattaaatttgacactgaaattcaggctttcctgctgccccccgtgtttaatattcgatcattaagcgacagctttcatatttatatcggcgctcccaagcagtctggcaacactcccgtgatacaagactaccctttgatttacgaaattattttttgggagaacacatccaatgcagaacgtaagattattgagaaaaaaacagatgtgaccgtgcctaaccttaagccacttactgtgtactgtgtaaaagccagggcccacaccatggatgaaaagcttaacaagtctagcgtgttcagcgacgctgtctgcgagaagacaaagcccggcaacacctctaaaatctggctcatcgtgggcatctgtatcgcactctttgccctcccctttgtgatctatgcagccaaggtgtttctccgctgtatcaactatgtgttttttcctagccttaagccaagttcctcaatagatgagtactttagcgagcagccactgaagaatctactgctgagcacgtcggaggagcaaattgagaagtgcttcataatcgagaatatttcaacgattgccaccgttgaagagactaatcaaaccgacgaggaccacaagaagtattcaagccagacttctcaagactccggtaactatagcaacgaggatgaatctgaaagcaaaacatcagaggaactgcagcaggattttgtctag

SEQ ID NO: 14014 - DNA, 1491 bp, Artificial Sequence
  derived and/or modified sequence
atgatggtggtgctgctgggcgccaccaccctggtgctggtggccgtggccccatgggtgttgtctgcagcggcaggggggaaaaaccttaagagcccccagaaggtggaagtggacatcatcgacgacaactttatactgcggtggaataggtcagatgaaagtgtcgggaacgtgacattcagcttcgactatcagaagacaggaatggacaattggatcaagctgtctggatgccagaacatcacttccaccaagtgcaatttttcgtcactgaagttaaatgtttacgaggaaatcaagctgcgcataagagccgagaaggagaacaccagttcctggtacgaagtggactctttcactccatttcggaaagcacagatcggtcctcctgaagtgcacttggaggcagaggataaggccattgtgatccatatttcgccaggaacaaaggactcagtcatgtgggccctggacggcctgtcattcacatattcccttgtgatctggaaaaattcatctggcgttgaagagcggatcgaaaacatttattcacgacataaaatctacaaacttagccctgagaccacatactgcctcaaggtcaaagccgctctgctgaccagttggaaaatcggcgtttatagtccagtccactgcataaagaccaccgttgagaacgaactccccccgccggaaaatattgaggtatcggtccagaatcaaaattacgtgctgaaatgggattacacttacgccaatatgacattccaagttcagtggcttcacgcattccttaaacgtaatcctggcaatcacctatataagtggaagcaaatcccagactgcgaaaacgtgaagaccacacagtgtgtcttcccacaaaacgtatttcagaagggcatatatttgctgcgagtgcaggcgtcggatggaaataacacttcattttggtccgaggagatcaagtttgataccgagatacaggccttcctgctgccaccagtttttaatatccggtccctttctgatagtttccacatctacatcggggctcccaagcaatccggaaatacaccagtgatccaggactatccacttatttatgagatcatattttgggagaatacatcaaacgctgaaagaaaaatcatcgaaaaaaagactgacgtgaccgtccccaacctgaaaccactaaccgtgtattgcgtgaaagcaagggcgcacaccatggatgagaacgacgccgtgtgcgaatacttcagcgaacagcctctcaagaatctactactctccacatcagaggaacaaatcgagaaatgctttataattgaaaatatcagcaccatcgccaccgttgaggagaccaaccagaccgacgaagatcataaaaaatacagctcccagactagccaagattctggcaattattccaatgaggacgagtctgagtcgaaaactagcgaggagctccagcaggacttcgtctag

SEQ ID NO: 14015 - DNA, 1674 bp, Artificial Sequence
  derived and/or modified sequence
atgatggtcgtactcttgggtgccacaaccttggtgctggtggctgtcgccccttgggtgctctcagctgctgctggcggaaagaacttgaagtctcctcagaaggtggaggtggatatcatcgatgacaattttatcctgcgctggaatagaagcgacgagtcagtgggaaatgtgacattcagctttgactatcagaagacaggcatggacaactggatcaagttgtctggatgtcaaaatattacctcaacaaagtgcaattttagctcccttaagctgaacgtgtacgaggagattaagctccggatccgcgcagaaaaggagaatacctcttcctggtatgaggtggattcctttacgccatttcggaaggctcagatcggacctcctgaggtgcatcttgaagctgaggataaagcaatcgttatccatatatcgcctggaacgaaagactctgttatgtgggctctcgacggactgtcatttacatactctctcgtcatctggaaaaacagctccggtgtcgaggagagaatcgagaatatttattccaggcacaaaatctataagctgagtcctgaaaccacttattgtctaaaagtgaaggccgcactactgacatcatggaagattggagtctacagtccggttcattgtattaaaacaaccgttgaaaatgagttaccccctccagagaatatagaggtgtctgttcagaatcagaactatgtgttgaagtgggattacacgtacgccaatatgaccttccaggtacaatggctgcacgcatttttaaaacggaatcccggaaaccatttgtataagtggaaacagatccccgactgtgaaaacgttaaaacaactcagtgcgtgtttccacagaatgtcttccagaagggcatctacttgttaagagtccaggctagcgatggcaacaatacttcattctggagtgaggagataaaattcgataccgaaattcaggcattcctgctgcccccagtattcaatatcagatctctgagtgattccttccacatctacatcggagctcctaaacagtctgggaatacccctgtaatccaggactatcccctcatatatgagatcattttttgggagaatactagcaatgcagagagaaagataatcgagaaaaagaccgacgtaaccgtcccaaatctaaagcctctgaccgtgtactgtgtcaaagcccgtgcccacactatggatgagaagcttaacaagtcctccgtcttctcagatgccgtgtgtgagaagaccaagcctggcaacacttcaaagatctggctgattgtgggcatatgcatagcactgtttgcactgccattcgtgatctatgcggctaaagttttccttcggtgcattaactatgttttctttccttctctaaagccgagttcttctattgatgaatacttcagcgagcagcctctgaaaaatctgctgctgtccacttctgaggagcagattgagaaatgcttcatcatcgagaatatctccaccatagctaccgtggaagagacgaaccagacagacgaggaccataagaaatacagcagccaaactagtcaggattccggcaactactcaaacgaagacgagagtgagtccaagaccagcgaagagttgcagcaggatttcgtgtag

SEQ ID NO: 14016 - DNA, 1467 bp, Artificial Sequence
  derived and/or modified sequence
atggataattggattaaattaagcggatgccagaatatcacttcaactaagtgcaatttctccagtctaaagctgaatgtgtacgaagagattaaacttcggataagagctgaaaaagagaacacttcttcatggtacgaagttgattcattcacacccttccggaaagcccaaatcgggccacccgaggtgcacctagaagccgaggacaaagcaatcgtgattcatattagtcccggaacaaaggattcggtcatgtgggcactggacgggctcagtttcacatactcactggtcatatggaagaactccagtggagtcgaggaaagaattgagaacatatatagtcgtcacaaaatatacaagctctccccggagaccacctattgccttaaggtgaaagccgcactattgaccagttggaagatcggagtctactctcccgttcattgcattaaaaccactgtggagaacgaactgccgccacctgaaaatattgaagttagcgtacaaaatcagaattacgtcctgaaatgggattacacatacgccaacatgacttttcaggtgcagtggttgcacgccttcttaaaaaggaatcccggtaatcacctctacaagtggaagcagattcctgactgcgaaaacgtgaaaaccacgcagtgtgtgtttccccagaatgtattccagaagggcatatatctgctgagagtgcaggcaagcgatggcaataacacatctttttggtcagaggaaatcaagtttgacaccgaaattcaagctttcttattgcccccagtatttaatatcagaagcctgagcgacagttttcacatatacatcggggctcctaagcagtctggtaacacgcccgtgatccaggactaccccctgatatacgagatcattttctgggaaaacaccagcaatgccgagagaaaaataatcgagaaaaaaacggatgtcacagttcctaacctcaaaccgttaactgtttattgtgtaaaagccagagcgcataccatggacgagaagttaaataagtcgtcagtttttagcgacgcagtttgcgaaaagaccaaaccaggaaataccagcaagatttggctgatcgttggaatctgcatagcactgttcgcacttccttttgtgatttatgctgctaaggtttttctgcgatgtatcaattatgtattcttcccaagtctgaagccctcgtccagcattgacgagtatttcagcgagcagcccctcaaaaacttgctgttatccacgtcggaagaacagatcgagaagtgtttcataattgagaatattagcactatagccacggtcgaagagactaatcaaacagacgaagatcataaaaagtattctagtcagacttcccaggatagcggcaattactcgaacgaagatgaatcagaaagcaaaacaagcgaggagttgcaacaggactttgtttag

SEQ ID NO: 14017 - DNA, 1491 bp, Artificial Sequence
  derived and/or modified sequence
atgatggtcgtgctacttggagctactaccctagtgcttgtggcggtggccccttgggtcttgtcggcagctgccggaggcaagaacctgaagtctccccaaaaagtggaagtggacatcatagatgacaatttcatcttgcggtggaatcggtccgatgaaagtgtcgggaacgtgacctttagctttgactatcaaaagacgggcatggacaattggataaagctgtcaggttgccagaatattacttctacaaaatgtaactttagctccctaaaactcaatgtgtacgaggagataaagctccgaatacgggcagaaaaggagaacactagttcctggtatgaggtggacagtttcacgccctttagaaaagcccagattggcccacctgaagtgcacctggaggcagaggataaggccattgttatccatatttctcctggaacaaaagattccgtgatgtgggccctagacggactgtcctttacttatagcctggtgatttggaagaactcaagcggggtggaggagaggatagagaatatttatagccgccacaagatctataaactgagtccagaaactacatattgcttaaaggtaaaggccgcactgcttaccagttggaagattggcgtttactcacccgtgcactgtattaaaactactgtggagaatgaactgccccctccggaaaacatcgaagtgagtgtacagaaccagaactatgttcttaagtgggattacacatacgccaatatgactttccaggtccagtggctccatgccttcttaaaacgtaacccgggtaaccacctgtacaagtggaaacagattcctgactgcgagaacgtgaagacaactcaatgtgttttcccacaaaatgtctttcagaagggcatttacctactgagagtgcaggcctcggatgggaacaacacctccttctggtctgaagagattaaattcgacaccgaaattcaagcctttttgcttcccccagtctttaacatcaggtccctgagtgactcatttcacatttacattggcgcacccaaacagtccggaaatacacctgtgatccaggactatcctctaatttacgagatcattttttgggaaaatacctccaacgccgaacgcaaaataattgagaaaaagaccgatgtaaccgtgccgaatttgaagccactaaccgtttactgcgtcaaagctagggctcataccatggacgagaacgacgccgtgtgtgagtacttcagcgaacagccactaaaaaatctgctgctttctacatctgaagagcagattgagaagtgtttcataattgaaaacatatctactatagcgacagtcgaagagaccaaccagaccgacgaagatcataagaagtactcttcccagacaagccaggattccgggaactatagcaatgaagatgaatcagagagcaaaacaagcgaggagttacaacaagattttgtgtag

SEQ ID NO: 14018 - DNA, 1674 bp, Artificial Sequence
  derived and/or modified sequence
atgatggtggtgctgctgggcgccaccaccctggtgctggtggccgtggccccctgggtgctgagcgccgccgccggcggcaagaacctgaagagcccccagaaggtggaggtggacatcatcgacgacaacttcatcctgagatggaacagaagcgacgagagcgtgggcaacgtgaccttcagcttcgactaccagaagaccggcatggacaactggatcaagctgagcggctgccagaacatcaccagcaccaagtgcaacttcagcagcctgaagctgaacgtgtacgaggagatcaagctgagaatcagagccgagaaggagaacaccagcagctggtacgaggtggacagcttcacccccttcagaaaggcccagatcggcccccccgaggtgcacctggaggccgaggacaaggccatcgtgatccacatcagccccggcaccaaggacagcgtgatgtgggccctggacggcctgagcttcacctacagcctggtgatctggaagaacagcagcggcgtggaggagagaatcgagaacatctacagcagacacaagatctacaagctgagccccgagaccacctactgcctgaaggtgaaggccgccctgctgaccagctggaagatcggcgtgtacagccccgtgcactgcatcaagaccaccgtggagaacgagctgcccccccccgagaacatcgaggtgagcgtgcagaaccagaactacgtgctgaagtgggactacacctacgccaacatgaccttccaggtgcagtggctgcacgccttcctgaagagaaaccccggcaaccacctgtacaagtggaagcagatccccgactgcgagaacgtgaagaccacccagtgcgtgttcccccagaacgtgttccagaagggcatctacctgctgagagtgcaggccagcgacggcaacaacaccagcttctggagcgaggagatcaagttcgacaccgagatccaggccttcctgctgccccccgtgttcaacatcagaagcctgagcgacagcttccacatctacatcggcgcccccaagcagagcggcaacacccccgtgatccaggactaccccctgatctacgagatcatcttctgggagaacaccagcaacgccgagagaaagatcatcgagaagaagaccgacgtgaccgtgcccaacctgaagcccctgaccgtgtactgcgtgaaggccagagcccacaccatggacgagaagctgaacaagagcagcgtgttcagcgacgccgtgtgcgagaagaccaagcccggcaacaccagcaagatctggctgatcgtgggcatctgcatcgccctgttcgccctgcccttcgtgatctacgccgccaaggtgttcctgagatgcatcaactacgtgttcttccccagcctgaagcccagcagcagcatcgacgagtacttcagcgagcagcccctgaagaacctgctgctgagcaccagcgaggagcagatcgagaagtgcttcatcatcgagaacatcagcaccatcgccaccgtggaggagaccaaccagaccgacgaggaccacaagaagtacagcagccagaccagccaggacagcggcaactacagcaacgaggacgagagcgagagcaagaccagcgaggagctgcagcaggacttcgtgtag

SEQ ID NO: 14019 - DNA, 1467 bp, Artificial Sequence
  derived and/or modified sequence
atggacaactggatcaagctgagcggctgccagaacatcaccagcaccaagtgcaacttcagcagcctgaagctgaacgtgtacgaggagatcaagctgagaatcagagccgagaaggagaacaccagcagctggtacgaggtggacagcttcacccccttcagaaaggcccagatcggcccccccgaggtgcacctggaggccgaggacaaggccatcgtgatccacatcagccccggcaccaaggacagcgtgatgtgggccctggacggcctgagcttcacctacagcctggtgatctggaagaacagcagcggcgtggaggagagaatcgagaacatctacagcagacacaagatctacaagctgagccccgagaccacctactgcctgaaggtgaaggccgccctgctgaccagctggaagatcggcgtgtacagccccgtgcactgcatcaagaccaccgtggagaacgagctgcccccccccgagaacatcgaggtgagcgtgcagaaccagaactacgtgctgaagtgggactacacctacgccaacatgaccttccaggtgcagtggctgcacgccttcctgaagagaaaccccggcaaccacctgtacaagtggaagcagatccccgactgcgagaacgtgaagaccacccagtgcgtgttcccccagaacgtgttccagaagggcatctacctgctgagagtgcaggccagcgacggcaacaacaccagcttctggagcgaggagatcaagttcgacaccgagatccaggccttcctgctgccccccgtgttcaacatcagaagcctgagcgacagcttccacatctacatcggcgcccccaagcagagcggcaacacccccgtgatccaggactaccccctgatctacgagatcatcttctgggagaacaccagcaacgccgagagaaagatcatcgagaagaagaccgacgtgaccgtgcccaacctgaagcccctgaccgtgtactgcgtgaaggccagagcccacaccatggacgagaagctgaacaagagcagcgtgttcagcgacgccgtgtgcgagaagaccaagcccggcaacaccagcaagatctggctgatcgtgggcatctgcatcgccctgttcgccctgcccttcgtgatctacgccgccaaggtgttcctgagatgcatcaactacgtgttcttccccagcctgaagcccagcagcagcatcgacgagtacttcagcgagcagcccctgaagaacctgctgctgagcaccagcgaggagcagatcgagaagtgcttcatcatcgagaacatcagcaccatcgccaccgtggaggagaccaaccagaccgacgaggaccacaagaagtacagcagccagaccagccaggacagcggcaactacagcaacgaggacgagagcgagagcaagaccagcgaggagctgcagcaggacttcgtgtag

SEQ ID NO: 14020 - DNA, 1491 bp, Artificial Sequence
  derived and/or modified sequence
atgatggtggtgctgctgggcgccaccaccctggtgctggtggccgtggccccctgggtgctgagcgccgccgccggcggcaagaacctgaagagcccccagaaggtggaggtggacatcatcgacgacaacttcatcctgagatggaacagaagcgacgagagcgtgggcaacgtgaccttcagcttcgactaccagaagaccggcatggacaactggatcaagctgagcggctgccagaacatcaccagcaccaagtgcaacttcagcagcctgaagctgaacgtgtacgaggagatcaagctgagaatcagagccgagaaggagaacaccagcagctggtacgaggtggacagcttcacccccttcagaaaggcccagatcggcccccccgaggtgcacctggaggccgaggacaaggccatcgtgatccacatcagccccggcaccaaggacagcgtgatgtgggccctggacggcctgagcttcacctacagcctggtgatctggaagaacagcagcggcgtggaggagagaatcgagaacatctacagcagacacaagatctacaagctgagccccgagaccacctactgcctgaaggtgaaggccgccctgctgaccagctggaagatcggcgtgtacagccccgtgcactgcatcaagaccaccgtggagaacgagctgcccccccccgagaacatcgaggtgagcgtgcagaaccagaactacgtgctgaagtgggactacacctacgccaacatgaccttccaggtgcagtggctgcacgccttcctgaagagaaaccccggcaaccacctgtacaagtggaagcagatccccgactgcgagaacgtgaagaccacccagtgcgtgttcccccagaacgtgttccagaagggcatctacctgctgagagtgcaggccagcgacggcaacaacaccagcttctggagcgaggagatcaagttcgacaccgagatccaggccttcctgctgccccccgtgttcaacatcagaagcctgagcgacagcttccacatctacatcggcgcccccaagcagagcggcaacacccccgtgatccaggactaccccctgatctacgagatcatcttctgggagaacaccagcaacgccgagagaaagatcatcgagaagaagaccgacgtgaccgtgcccaacctgaagcccctgaccgtgtactgcgtgaaggccagagcccacaccatggacgagaacgacgccgtgtgcgagtacttcagcgagcagcccctgaagaacctgctgctgagcaccagcgaggagcagatcgagaagtgcttcatcatcgagaacatcagcaccatcgccaccgtggaggagaccaaccagaccgacgaggaccacaagaagtacagcagccagaccagccaggacagcggcaactacagcaacgaggacgagagcgagagcaagaccagcgaggagctgcagcaggacttcgtgtag

SEQ ID NO: 14021 - protein, 339 aa, Artificial Sequence
  derived and/or modified sequence
MAVAQQLRAESDFEQLPDDVAISANIADIEEKRGFTSHFVFVIEVKTKGGSKYLIYRRYRQFHALQSKLEERFGPDSKSSALACTLPTLPAKVYVGVKQEIAEMRIPALNAYMKSLLSLPVWVLMDEDVRIFFYQSPYDSEQVPQALRRLRPRTRKVKSVSPQGNSVDRMAAPRAEALFDFTGNSKLELNFKAGDVIFLLSRINKDWLEGTVRGATGIFPLSFVKILKDFPEEDDPTNWLRCYYYEDTISTIKDIAVEEDLSSTPLLKDLLELTRREFQREDIALNYRDAEGDLVRLLSDEDVALMVRQARGLPSQKRLFPWKLHITQKDNYRVYNTMP

SEQ ID NO: 14022 - DNA, 1020 bp, Artificial Sequence
  derived and/or modified sequence
atggccgtagcccagcagctaagagcagaatccgattttgaacaactcccagacgatgtcgccattagtgcaaatatcgctgacattgaagaaaagagggggttcacatcacatttcgtgtttgtcatcgaagtaaaaactaagggcggcagtaagtacttgatctataggagatataggcaattccacgccctgcagtccaagcttgaggaaagatttggtccagactcaaagtcttcagcactcgcctgtaccctgccaactctaccggccaaagtttatgttggagtcaaacaggaaatcgctgaaatgcgtatccccgccttaaacgcatatatgaagtccctactgtcattgcctgtctgggtcctcatggacgaggacgtgcgaattttcttttatcagtcgccttacgatagtgagcaagtgcctcaggcccttagacgattaagaccgaggacccggaaagtgaagtccgtgtcgcctcaggggaacagtgtggacagaatggccgcgccacgtgccgaggcactcttcgactttactggcaattcgaaactggaactgaactttaaggctggagatgtgatcttcctgctttcaagaatcaataaagattggttggaaggcacagttcggggtgccacgggaatctttcccttgtcattcgtcaagattctaaaggattttcctgaggaggatgatcctaccaactggctgcggtgctattactatgaagataccatcagcaccatcaaggacattgcggtcgaagaggatctttcttctacccccctgctcaaagacctgttagagctgacgcgaagagagttccagagggaggatatcgcacttaactaccgggatgctgaaggtgacctggtgcggctcctctcagatgaagacgtagctctgatggtgcgccaggcccggggtctgccaagccagaagcgacttttcccatggaagctgcatataactcagaaagataactaccgcgtatataacacaatgccatag

SEQ ID NO: 14023 - DNA, 1020 bp, Artificial Sequence
  derived and/or modified sequence
atggctgtggcccagcagctgcgggcagagagtgactttgagcagctgcctgatgatgtggccatcagcgccaacattgctgacatcgaggagaagaggggcttcaccagccactttgtgtttgtgattgaggtgaagaccaagggcggcagcaagtacctgatctaccgccgctaccggcagttccacgccctgcagagcaagctggaggagagatttggaccagacagcaagagcagcgccctggcctgcaccctgcccaccctgcctgccaaggtgtatgtgggcgtgaagcaggagattgctgagatgaggatcccagccctgaatgcctacatgaagagcctgctgagcctgcctgtgtgggtgctgatggatgaagatgtgcgcatcttcttctaccagagcccctatgacagcgagcaggtgccccaggccctgcggcggctgcggcccaggaccaggaaggtgaagtctgtgagcccccagggcaacagcgtggacaggatggccgcccccagggctgaggccctgtttgacttcaccggcaacagcaagctggagctgaacttcaaggctggagatgtgatcttcctgctgagccgcatcaacaaggactggctggagggcaccgtgcggggggccaccggcatcttccccctgagctttgtgaagatcctgaaggacttcccagaagaagatgaccccaccaactggctgcgctgctactactatgaggacaccatcagcaccatcaaggacattgctgtggaggaggacctgagcagcacccccctgctgaaggacctgctggagctgacccggcgggagttccagagagaagatattgccctgaactacagagatgctgagggggacctggtgcggctgctgagtgatgaagatgtggccctgatggtgcggcaggcccggggcctgcccagccagaagaggctcttcccctggaagctgcacatcacccagaaggacaactacagagtgtacaacaccatgccctag

SEQ ID NO: 14024 - DNA, 1020 bp, Artificial Sequence
  derived and/or modified sequence
atggccgtggcccagcagctgcgggccgagagcgacttcgagcagctccctgacgacgttgcgatctccgctaatatcgccgacatcgaagaaaaaaggggattcacgagccactttgtgttcgtcatcgaggtaaagacgaaagggggctctaagtatctaatctatcgtcgctatcgccagtttcacgccttgcaaagcaaactggaggaacgctttggcccggacagcaaaagttctgctctggcctgtactctccctaccctgccggccaaggtctacgtgggcgtcaagcaggaaatagctgaaatgaggatccccgccctaaatgcctacatgaaatccctgctcagcttacccgtctgggtgctcatggacgaagacgtgcgtatattcttctaccagagtccatacgacagcgaacaagtgcctcaggcgctgagaagactgcggcctagaacccggaaggttaagtccgtttcccctcagggaaattctgttgaccgcatggcagcccccagggcagaagcattgttcgattttaccggcaacagcaagctcgaattgaatttcaaggctggcgacgttatcttccttctgtcaagaatcaacaaggactggctggaaggcaccgtgaggggcgctacaggaatcttcccactgtctttcgttaagattctgaaagacttccccgaagaggacgatcccacaaactggctgcgctgctattattacgaggatacaatctccaccattaaggacatcgcagtcgaagaggatctgagcagcacccccctcttaaaagatctgttggagttaacgaggagggagtttcagcgcgaggatatcgccctgaattacagggatgcagagggtgacctggttcggctgctgagtgacgaggatgtcgccctgatggtgaggcaagctaggggacttccaagccagaagaggctgtttccctggaaactgcacatcacacagaaagacaactatcgggtttacaacactatgccctag

SEQ ID NO: 14025 - DNA, 1396 bp, Artificial Sequence
  derived and/or modified sequence
ggaggaggagcctctgccagactggagagaagcaggcctgagcctccccaaaggcagctcctggggactcccaggaccacaggctgagacgagacgcagggtggctggaggaagtgagaggtgaactcagcctgggactggctgggcgagactctccacctgctccctgggaccatcgcccaccatggctgtggcccagcagctgcgggccgagagtgactttgaacagcttccggatgatgttgccatctcggccaacattgctgacatcgaggagaagagaggcttcaccagccactttgttttcgtcatcgaggtgaagacaaaaggaggatccaagtacctcatctaccgccgctaccgccagttccatgctttgcagagcaagctggaggagcgcttcgggccagacagcaagagcagtgccctggcctgtaccctgcccacactcccagccaaagtctacgtgggtgtgaaacaggagatcgccgagatgcggatacctgccctcaacgcctacatgaagagcctgctcagcctgccggtctgggtgctgatggatgaggacgtccggatcttcttttaccagtcgccctatgactcagagcaggtgccccaggcactccgccggctccgcccgcgcacccggaaagtcaagagcgtgtccccacagggcaacagcgttgaccgcatggcagctccgagagcagaggctctatttgacttcactggaaacagcaaactggagctgaatttcaaagctggagatgtgatcttcctcctcagtcggatcaacaaagactggctggagggcactgtccggggagccacgggcatcttccctctctccttcgtgaagatcctcaaagacttccctgaggaggacgaccccaccaactggctgcgttgctactactacgaagacaccatcagcaccatcaaggacatcgcggtggaggaagatctcagcagcactcccctattgaaagacctgctggagctcacaaggcgggagttccagagagaggacatagctctgaattaccgggacgctgagggggatctggttcggctgctgtcggatgaggacgtagcgctcatggtgcggcaggctcgtggcctcccctcccagaagcgcctcttcccctggaagctgcacatcacgcagaaggacaactacagggtctacaacacgatgccatgagctgacggtgtccctggagcagtgaggggacaccagcaaaaaccttcagctctcagaggagattgggaccaggaaaacctgggaggatgggcagacttcctgtctttgaggctaatggacccgtggggcttgtaatctgtctctttctactatttacatctgatttaaataaaccattccatctgaaagggg

SEQ ID NO: 14026 - DNA, 1020 bp, Artificial Sequence
  derived and/or modified sequence
atggccgtggctcaacagctgagggccgagagcgactttgaacagctgcctgatgatgtagccatctccgccaatattgctgacattgaggaaaaaagaggcttcacatcccacttcgttttcgtgattgaggtcaagaccaaaggcggatctaagtatcttatctaccgtaggtacagacaattccacgccctgcagtctaagttggaggagcgcttcggccctgattctaagtcaagcgccctcgcttgtactctgccaactcttccagccaaggtttacgtgggcgtgaaacaggagatcgccgagatgaggataccagccctgaatgcatacatgaaaagcctgcttagcctccctgtctgggtgcttatggacgaggacgtgcggatcttcttttaccagtcgccttacgactcggagcaggtcccccaggccttgagacggctgcgcccacggacgaggaaagtgaaatctgtttcgcctcagggcaattccgtggacagaatggccgcaccacgcgctgaggcactctttgacttcacgggaaatagcaagctggaattgaatttcaaggccggagatgtgatttttctgctgagtaggattaacaaggactggctggagggcaccgtgagaggggcaacaggcattttccctctctcctttgttaagattttgaaagattttcctgaggaagatgatccaaccaattggctgcgatgttactactacgaagacaccatctctacaataaaagatatagctgtggaagaagatttaagtagtacacctttgctgaaggaccttctcgagctgacacggagagaattccagagagaagacatcgccctcaactacagggacgcagaaggagacctcgtccggctgctctctgacgaggacgtggctctgatggttcgccaggccagagggcttccctctcagaaacgtttgtttccatggaagctccacatcacgcagaaagataactaccgcgtctacaatactatgccctag

SEQ ID NO: 14027 - DNA, 1020 bp, Artificial Sequence
  derived and/or modified sequence
atggccgtggcccagcagctgagagccgagagcgacttcgagcagctgcccgacgacgtggccatcagcgccaacatcgccgacatcgaggagaagagaggcttcaccagccacttcgtgttcgtgatcgaggtgaagaccaagggcggcagcaagtacctgatctacagaagatacagacagttccacgccctgcagagcaagctggaggagagattcggccccgacagcaagagcagcgccctggcctgcaccctgcccaccctgcccgccaaggtgtacgtgggcgtgaagcaggagatcgccgagatgagaatccccgccctgaacgcctacatgaagagcctgctgagcctgcccgtgtgggtgctgatggacgaggacgtgagaatcttcttctaccagagcccctacgacagcgagcaggtgccccaggccctgagaagactgagacccagaaccagaaaggtgaagagcgtgagcccccagggcaacagcgtggacagaatggccgcccccagagccgaggccctgttcgacttcaccggcaacagcaagctggagctgaacttcaaggccggcgacgtgatcttcctgctgagcagaatcaacaaggactggctggagggcaccgtgagaggcgccaccggcatcttccccctgagcttcgtgaagatcctgaaggacttccccgaggaggacgaccccaccaactggctgagatgctactactacgaggacaccatcagcaccatcaaggacatcgccgtggaggaggacctgagcagcacccccctgctgaaggacctgctggagctgaccagaagagagttccagagagaggacatcgccctgaactacagagacgccgagggcgacctggtgagactgctgagcgacgaggacgtggccctgatggtgagacaggccagaggcctgcccagccagaagagactgttcccctggaagctgcacatcacccagaaggacaactacagagtgtacaacaccatgccctag

SEQ ID NO: 14028 - protein, 1152 aa, Artificial Sequence
  derived and/or modified sequence
MALRVLLLTALTLCHGFNLDTENAMTFQENARGFGQSVVQLQGSRVVVGAPQEIVAANQRGSLYQCDYSTGSCEPIRLQVPVEAVNMSLGLSLAATTSPPQLLACGPTVHQTCSENTYVKGLCFLFGSNLRQQPQKFPEALRGCPQEDSDIAFLIDGSGSIIPHDFRRMKEFVSTVMEQLKKSKTLFSLMQYSEEFRIHFTFKEFQNNPNPRSLVKPITQLLGRTHTATGIRKVVRELFNITNGARKNAFKILVVITDGEKFGDPLGYEDVIPEADREGVIRYVIGVGDAFRSEKSRQELNTIASKPPRDHVFQVNNFEALKTIQNQLREKIFAIEGTQTGSSSSFEHEMSQEGFSAAITSNGPLLSTVGSYDWAGGVFLYTSKEKSTFINMTRVDSDMNDAYLGYAAAIILRNRVQSLVLGAPRYQHIGLVAMFRQNTGMWESNANVKGTQIGAYFGASLCSVDVDSNGSTDLVLIGAPHYYEQTRGGQVSVCPLPRGRARWQCDAVLYGEQGQPWGRFGAALTVLGDVNGDKLTDVAIGAPGEEDNRGAVYLFHGTSGSGISPSHSQRIAGSKLSPRLQYFGQSLSGGQDLTMDGLVDLTVGAQGHVLLLRSQPVLRVKAIMEFNPREVARNVFECNDQVVKGKEAGEVRVCLHVQKSTRDRLREGQIQSVVTYDLALDSGRPHSRAVFNETKNSTRRQTQVLGLTQTCETLKLQLPNCIEDPVSPIVLRLNFSLVGTPLSAFGNLRPVLAEDAQRLFTALFPFEKNCGNDNICQDDLSITFSFMSLDCLVVGGPREFNVTVTVRNDGEDSYRTQVTFFFPLDLSYRKVSTLQNQRSQRSWRLACESASSTEVSGALKSTSCSINHPIFPENSEVTFNITFDVDSKASLGNKLLLKANVTSENNMPRTNKTEFQLELPVKYAVYMVVTSHGVSTKYLNFTASENTSRVMQHQYQVSNLGQRSLPISLVFLVPVRLNQTVIWDRPQVTFSENLSSTCHTKERLPSHSDFLAELRKAPVVNCSIAVCQRIQCDIPFFGIQEEFNATLKGNLSFDWYIKTSHNHLLIVSTAEILFNDSVFTLLPGQGAFVRSQTETKVEPFEVPNPLPLIVGSSVGGLLLLALITAALYKLGFFKRQYKDMMSEGGPPGAEPQ

SEQ ID NO: 14029 - DNA, 3459 bp, Artificial Sequence
  derived and/or modified sequence
atggcattgcgagttcttcttctaaccgccctaacactgtgccatgggtttaaccttgacactgagaatgccatgacatttcaggagaatgcccgcggcttcggtcagagcgttgtccagctgcagggcagcagagtggtggtgggtgcgccacaggagatagtggctgccaaccagagaggtagcctataccagtgcgattatagtacaggttcatgcgagccgatccgcctgcaggtgccagtcgaggccgtgaatatgtcacttggcctcagcctggccgctactacatctcctcctcagctgctggcctgtggccctacggtacaccaaacatgctccgagaatacctatgtgaagggtctgtgcttcctgttcggtagcaatctacgacagcaacctcagaagttcccagaagctctgcgcggatgtcctcaggaagatagcgatattgctttccttatagatggcagcggaagcatcattccccacgactttcgtcgcatgaaagagtttgtgtctaccgtgatggagcagctcaagaaatccaagaccttgttctctctgatgcagtatagcgaggagtttaggattcatttcacctttaaagaatttcaaaataaccccaacccccgctcattggtcaaacccataacacagctgttgggccgcactcacacagctactggtatccgcaaggtggtgagagaactgtttaacattaccaatggggctaggaagaacgcatttaagatcctggtagtcatcaccgatggcgaaaaattcggcgaccctttggggtatgaggatgtgattcccgaagccgacagggagggcgtcatccgctacgtgatcggtgtaggagacgcattccgctcagaaaaatccagacaggagttgaacaccatcgccagcaagccaccaagggaccatgtgttccaggtgaacaattttgaagccttgaaaacaattcagaatcagttgagagagaagatcttcgccatagaaggaacccaaactggaagcagctcttcctttgagcatgaaatgagtcaggagggcttcagcgcagcaatcactagtaacgggccactgttatctacagtgggatcatacgattgggccggcggagtctttctctacacttccaaggaaaaatctacttttatcaatatgactagagtggacagcgatatgaacgacgcttatctgggctacgccgcagccattatcttgcggaacagggtacagagcctcgttcttggagccccccggtatcagcatattgggcttgtggctatgtttagacaaaatactggtatgtgggaaagcaatgccaacgtcaaaggaacccaaatcggcgcctacttcggggcgtccttatgcagcgtcgatgtagattcaaacggatctacagacctggtgctgattggggctccccactactacgaacagacccgaggcgggcaagtgagcgtttgtcctttgccacggggcagagccagatggcagtgcgatgcagttctgtacggtgaacagggccagccttgggggcgtttcggcgctgccttaaccgtactaggggatgtgaatggggacaaactcacagatgtggcaatcggggcaccgggggaagaggacaacaggggtgcagtttacctgtttcatggaaccagcgggtcaggaatcagccccagccactctcagcgcatagcaggcagcaagctctctcctagattgcaatattttggccagtctctttccggaggccaagatctcacaatggatggcctcgtggacctgacagtgggggcacagggtcacgtattgctgctgagatcccagccagtattgagggttaaagcgataatggaatttaacccacgcgaagtggcaaggaacgtcttcgagtgtaacgaccaagtcgtcaagggaaaagaggcaggggaggtacgggtgtgtctccatgttcagaagtccactagagacagattgcgcgagggccaaatacaaagcgttgtgacctacgacctagcgctggatagcgggcgtccccactcgagagcggtattcaatgaaactaagaactccaccagacggcagacccaggttctcggccttactcagacgtgcgagacacttaaattgcagttgccgaattgtatcgaagaccccgtctcccctattgtgctcaggctgaacttctcactcgttgggaccccgttatccgcctttgggaacctgcggccagtgcttgccgaagacgcccaacgattgttcaccgccctgttcccatttgaaaaaaattgtgggaacgacaacatctgccaagatgatttaagcattacattttcatttatgtctctggattgcttagtcgtcggcggaccaagagagtttaatgtaactgtaaccgtccggaatgacggggaagatagttaccgaacccaagtgacattttttttccctctagacctcagctacaggaaggtgtctactctgcagaatcagcgcagtcaaaggtcctggagactggcatgcgagtcggctagcagcacagaggtatctggcgctctgaaatcaacgtcctgctccataaaccacccaattttccctgagaactcggaagtgacttttaacattactttcgatgtggattctaaagcgtccttagggaacaagttgctgctgaaggcgaatgtgacatctgagaataacatgccccggaccaacaagactgagttccagcttgagctgccagtgaagtatgccgtctatatggtagtaaccagtcatggggtgagtactaaatacctgaattttacggccagcgagaacacttccagggttatgcagcaccagtaccaggtctccaaccttgggcagaggtccttgccaattagcttagtttttcttgtgccggtgagattgaaccagacggtaatctgggacagacctcaggtaactttttccgaaaatctcagctcaacatgtcataccaaggagagactgccatcccactccgacttcctggctgagttacggaaagcaccggtggtgaattgtagtattgctgtatgccagcgaattcagtgtgacatacccttctttgggatacaggaagagttcaacgccacactgaaagggaaccttagttttgattggtatattaaaacctcccacaatcacctgctgatcgtgtccaccgccgagattctttttaacgactcagtattcaccctgttgcctggacagggtgccttcgtgagatcccaaacagaaactaaggtggagccatttgaggtgcccaacccattgcccctcattgtcgggtcctctgtcggcgggctgctactgctagcactaataactgccgcattgtataagttaggattctttaagcggcagtacaaggacatgatgtcagagggaggaccgccaggggccgagccacaatag

SEQ ID NO: 14030 - DNA, 4742 bp, Artificial Sequence
  derived and/or modified sequence
ttttctgcccttctttgctttggtggcttccttgtggttcctcagtggtgcctgcaacccctggttcacctccttccaggttctggctccttccagccatggctctcagagtccttctgttaacagccttgaccttatgtcatgggttcaacttggacactgaaaacgcaatgaccttccaagagaacgcaaggggcttcgggcagagcgtggtccagcttcagggatccagggtggtggttggagccccccaggagatagtggctgccaaccaaaggggcagcctctaccagtgcgactacagcacaggctcatgcgagcccatccgcctgcaggtccccgtggaggccgtgaacatgtccctgggcctgtccctggcagccaccaccagcccccctcagctgctggcctgtggtcccaccgtgcaccagacttgcagtgagaacacgtatgtgaaagggctctgcttcctgtttggatccaacctacggcagcagccccagaagttcccagaggccctccgagggtgtcctcaagaggatagtgacattgccttcttgattgatggctctggtagcatcatcccacatgactttcggcggatgaaggagtttgtctcaactgtgatggagcaattaaaaaagtccaaaaccttgttctctttgatgcagtactctgaagaattccggattcactttaccttcaaagagttccagaacaaccctaacccaagatcactggtgaagccaataacgcagctgcttgggcggacacacacggccacgggcatccgcaaagtggtacgagagctgtttaacatcaccaacggagcccgaaagaatgcctttaagatcctagttgtcatcacggatggagaaaagtttggcgatcccttgggatatgaggatgtcatccctgaggcagacagagagggagtcattcgctacgtcattggggtgggagatgccttccgcagtgagaaatcccgccaagagcttaataccatcgcatccaagccgcctcgtgatcacgtgttccaggtgaataactttgaggctctgaagaccattcagaaccagcttcgggagaagatctttgcgatcgagggtactcagacaggaagtagcagctcctttgagcatgagatgtctcaggaaggcttcagcgctgccatcacctctaatggccccttgctgagcactgtggggagctatgactgggctggtggagtctttctatatacatcaaaggagaaaagcaccttcatcaacatgaccagagtggattcagacatgaatgatgcttacttgggttatgctgccgccatcatcttacggaaccgggtgcaaagcctggttctgggggcacctcgatatcagcacatcggcctggtagcgatgttcaggcagaacactggcatgtgggagtccaacgctaatgtcaagggcacccagatcggcgcctacttcggggcctccctctgctccgtggacgtggacagcaacggcagcaccgacctggtcctcatcggggccccccattactacgagcagacccgagggggccaggtgtccgtgtgccccttgcccagggggagggctcggtggcagtgtgatgctgttctctacggggagcagggccaaccctggggccgctttggggcagccctaacagtgctgggggacgtaaatggggacaagctgacggacgtggccattggggccccaggagaggaggacaaccggggtgctgtttacctgtttcacggaacctcaggatctggcatcagcccctcccatagccagcggatagcaggctccaagctctctcccaggctccagtattttggtcagtcactgagtgggggccaggacctcacaatggatggactggtagacctgactgtaggagcccaggggcacgtgctgctgctcaggtcccagccagtactgagagtcaaggcaatcatggagttcaatcccagggaagtggcaaggaatgtatttgagtgtaatgatcaggtggtgaaaggcaaggaagccggagaggtcagagtctgcctccatgtccagaagagcacacgggatcggctaagagaaggacagatccagagtgttgtgacttatgacctggctctggactccggccgcccacattcccgcgccgtcttcaatgagacaaagaacagcacacgcagacagacacaggtcttggggctgacccagacttgtgagaccctgaaactacagttgccgaattgcatcgaggacccagtgagccccattgtgctgcgcctgaacttctctctggtgggaacgccattgtctgctttcgggaacctccggccagtgctggcggaggatgctcagagactcttcacagccttgtttccctttgagaagaattgtggcaatgacaacatctgccaggatgacctcagcatcaccttcagtttcatgagcctggactgcctcgtggtgggtgggccccgggagttcaacgtgacagtgactgtgagaaatgatggtgaggactcctacaggacacaggtcaccttcttcttcccgcttgacctgtcctaccggaaggtgtccacgctccagaaccagcgctcacagcgatcctggcgcctggcctgtgagtctgcctcctccaccgaagtgtctggggccttgaagagcaccagctgcagcataaaccaccccatcttcccggaaaactcagaggtcacctttaatatcacgtttgatgtagactctaaggcttcccttggaaacaaactgctcctcaaggccaatgtgaccagtgagaacaacatgcccagaaccaacaaaaccgaattccaactggagctgccggtgaaatatgctgtctacatggtggtcaccagccatggggtctccactaaatatctcaacttcacggcctcagagaataccagtcgggtcatgcagcatcaatatcaggtcagcaacctggggcagaggagcctccccatcagcctggtgttcttggtgcccgtccggctgaaccagactgtcatatgggaccgcccccaggtcaccttctccgagaacctctcgagtacgtgccacaccaaggagcgcttgccctctcactccgactttctggctgagcttcggaaggcccccgtggtgaactgctccatcgctgtctgccagagaatccagtgtgacatcccgttctttggcatccaggaagaattcaatgctaccctcaaaggcaacctctcgtttgactggtacatcaagacctcgcataaccacctcctgatcgtgagcacagctgagatcttgtttaacgattccgtgttcaccctgctgccgggacagggggcgtttgtgaggtcccagacggagaccaaagtggagccgttcgaggtccccaaccccctgccgctcatcgtgggcagctctgtcgggggactgctgctcctggccctcatcaccgccgcgctgtacaagctcggcttcttcaagcggcaatacaaggacatgatgagtgaagggggtcccccgggggccgaaccccagtagcggctccttcccgacagagctgcctctcggtggccagcaggactctgcccagaccacacgtagcccccaggctgctggacacgtcggacagcgaagtatccccgacaggacgggcttgggcttccatttgtgtgtgtgcaagtgtgtatgtgcgtgtgtgcaagtgtctgtgtgcaagtgtgtgcacatgtgtgcgtgtgcgtgcatgtgcacttgcacgcccatgtgtgagtgtgtgcaagtatgtgagtgtgtccaagtgtgtgtgcgtgtgtccatgtgtgtgcaagtgtgtgcatgtgtgcgagtgtgtgcatgtgtgtgctcaggggcgtgtggctcacgtgtgtgactcagatgtctctggcgtgtgggtaggtgacggcagcgtagcctctccggcagaagggaactgcctgggctcccttgtgcgtgggtgaagccgctgctgggttttcctccgggagaggggacggtcaatcctgtgggtgaagacagagggaaacacagcagcttctctccactgaaagaagtgggacttcccgtcgcctgcgagcctgcggcctgctggagcctgcgcagcttggatggagactccatgagaagccgtgggtggaaccaggaacctcctccacaccagcgctgatgcccaataaagatgcccactgaggaatgatgaagcttcctttctggattcatttattatttcaatgtgactttaattttttggatggataagcttgtctatggtacaaaaatcacaaggcattcaagtgtacagtgaaaagtctccctttccagatattcaagtcacctccttaaaggtagtcaagattgtgttttgaggtttccttcagacagattccaggcgatgtgcaagtgtatgcacgtgtgcacacacaccacacatacacacacacaagcttttttacacaaatggtagcatactttatattggtctgtatcttgctttttttcaccaatatttctcagacatcggttcatattaagacataaattactttttcattcttttataccgctgcatagtattccattgtgtgagtgtaccataatgtatttaaccagtcttcttttgatatactattttcattctcttgttattgcatcaatgctgagttaataaatcaaatatatgtcatttttgcatatatgtaaggataa

SEQ ID NO: 14031 - DNA, 3459 bp, Artificial Sequence
  derived and/or modified sequence
atggccctgcgggtgctgctgctgacagccctgaccctgtgccacggcttcaacctggacacagaaaatgccatgaccttccaggagaatgcccggggcttcggccagagcgtggtgcagctgcagggcagccgggtggtggtgggcgccccccaggagatcgtggccgccaaccagaggggcagcctgtaccagtgtgactacagcacaggcagctgtgagcccatccggctgcaggtgcctgtggaggccgtgaacatgagcctgggcctgagcctggccgccaccaccagccccccccagctgctggcctgtggccccaccgtgcaccagacctgcagcgagaacacctacgtgaagggcctgtgcttcctgtttggcagcaacctgcggcagcagccccagaagtttcctgaggccctgcggggctgcccccaggaggacagcgacatcgccttcctgattgatggcagcggcagcatcatcccccatgacttccggaggatgaaggagtttgtgtccacagtgatggagcagctgaagaagagcaagaccctcttcagcctgatgcagtacagcgaggagttccgcatccacttcaccttcaaggagttccagaacaaccccaaccccaggagcctggtgaagcccatcacccagctgctgggccgcacccacacagccaccggcatcaggaaggtggtgcgggagctgttcaacatcaccaatggagccaggaagaatgccttcaagatcctggtggtgatcacagatggagagaagtttggagaccccctgggctatgaagatgtgattcctgaggccgaccgggagggcgtcatccgctacgtgattggagtgggagatgccttccgctctgagaagagccggcaggagctgaacaccatcgccagcaagccaccccgggaccacgtgttccaggtgaacaactttgaggccctgaagaccatccagaaccagctgcgggagaagatctttgccatcgagggcacccagacaggcagcagcagcagctttgagcacgagatgagccaggagggcttctctgctgccatcaccagcaatggccccctgctgagcacagtgggcagctatgactgggccggcggcgtcttcctgtacaccagcaaggagaagagcaccttcatcaacatgaccagggtggacagcgacatgaatgatgcctacctgggctatgctgctgccatcatcctgaggaacagagtgcagagcctggtgctgggcgccccccgctaccagcacatcggcctggtggccatgttccggcagaacacaggcatgtgggagagcaatgccaacgtgaagggcacccagattggagcctactttggagccagcctgtgcagcgtggatgtggacagcaatggcagcacagacctggtgctgattggagccccccactactatgagcagacccggggcggccaggtgtctgtgtgccccctgccccggggccgggcccgctggcagtgtgatgctgtgctgtatggagagcagggccagccctggggccgctttggagctgccctgactgtgctgggagatgtgaatggagacaagctgacagatgtggccatcggggcccctggagaggaggacaacagaggagctgtgtacctgttccacggcaccagcggcagcggcatcagccccagccacagccagagaattgctggcagcaagctgagcccccggctgcagtacttcggccagagcctgagcggcggccaggacctgaccatggatggcctggtggacctgactgtgggcgcccagggccacgtgctgctgctgcggagccagcctgtgctgcgggtgaaggccatcatggagttcaacccccgggaggtggccagaaatgtgtttgaatgtaatgaccaggtggtgaagggcaaggaggccggggaggtgcgggtgtgcctgcacgtgcagaagagcacccgggaccggctgcgggagggccagatccagagcgtggtgacctatgacctggccctggacagcggccggccccacagcagagctgtgttcaatgagaccaagaacagcacccggcggcagacccaggtgctgggcctgacccagacctgtgagaccctgaagctgcagctgcccaactgcattgaagatcctgtgagccccatcgtgctgcggctgaacttcagcctggtgggcacccccctgagcgcctttggaaacctgcggcctgtgctggccgaggatgcccagaggctcttcaccgccctcttcccctttgagaagaactgtggaaatgacaacatctgccaggatgacctgagcatcaccttctccttcatgagcctggactgcctggtggtgggcggcccccgggagttcaacgtgacagtgacagtgagaaatgatggagaagattcctaccgcacccaggtgaccttcttcttccccctggacctgagctacaggaaggtgtccaccctgcagaaccagaggagccagaggtcctggaggctggcctgtgagagcgccagcagcacagaggtgtctggggccctgaagagcaccagctgcagcatcaaccaccccatcttcccagaaaattctgaggtgaccttcaacatcacctttgatgtggacagcaaggccagcctgggcaacaagctgctgctgaaggccaacgtgaccagcgagaacaacatgcccaggaccaacaagacagagttccagctggagctgcctgtgaagtatgctgtgtacatggtggtgaccagccacggcgtgtccaccaagtacctgaacttcaccgccagcgagaacaccagccgggtgatgcagcaccagtaccaggtgagcaacctgggccagaggagcctgcccatcagcctggtgttcctggtgcctgtgcggctgaaccagaccgtcatctgggaccggccccaggtgaccttcagcgagaacctgagcagcacctgccacaccaaggagcggctgcccagccacagcgacttcctggccgagctgaggaaggcccctgtggtgaactgcagcattgctgtgtgccagaggatccagtgtgacatccccttcttcggcatccaggaggagttcaatgccaccctgaagggcaacctgagctttgactggtacatcaagaccagccacaaccacctgctgattgtgtccacagctgagatcctcttcaatgattctgtgttcaccctgctgcccggccagggcgcctttgtgcgcagccagacagagaccaaggtggagccctttgaggtgcccaaccccctgcccctgattgtgggcagctctgtgggcggcctgctgctgctggccctgatcacagctgccctgtacaagctgggcttcttcaagaggcagtacaaggacatgatgtctgagggcggccccccaggagctgagccccagtag

SEQ ID NO: 14032 - DNA, 3459 bp, Artificial Sequence
  derived and/or modified sequence
atggccctgcgggtgctgctgctgaccgccctgaccctgtgccacggttttaatctggacaccgaaaacgcaatgacattccaggaaaatgcccgggggttcggtcagagcgtggttcaactacagggaagcagagtggtagtgggggccccccaggagattgtggctgcgaaccagagggggtcattatatcagtgcgactatagtaccgggtcttgcgagccaattagattacaggttccagtggaggctgtgaacatgagcctgggactctcactggcggccaccacttcccccccccagctgttagcatgcggccccaccgtccatcagacttgctctgagaacacctatgtcaagggcctctgttttctgttcggtagtaatctgcgccagcagcctcaaaagtttccggaggcccttagaggatgccctcaggaagatagcgatattgccttcctgatagacggatccgggtcaatcatcccacatgactttagaaggatgaaggagttcgtgagcaccgttatggagcagcttaaaaagagcaagaccctcttctccctgatgcaatacagtgaggagttcagaatccacttcacttttaaggagtttcaaaacaatcctaatccacggtctcttgtgaaaccaataacacagttgctcggcaggacgcataccgctacaggcatacggaaggtggtgcgagagctgttcaacattaccaacggcgcccgaaagaatgcattcaagatcctggtggttatcactgacggagagaagttcggagatccactcggctatgaggatgtgataccagaggcggatagagaaggggtaatccgttatgttatcggggtgggtgatgccttcaggtctgaaaagagccgtcaggaactcaacaccatcgccagcaaacccccccgcgatcacgtatttcaggtgaataatttcgaagcactcaagactatccaaaatcagctgcgcgagaagattttcgctattgaaggtacacagaccgggtccagctccagtttcgagcatgaaatgtcccaagaaggtttctctgcagctataactagtaatggcccgttattaagtactgtgggttcctacgattgggcagggggagtctttttatataccagcaaagagaaaagtacttttatcaacatgactcgggtggactccgatatgaatgacgcatatctcggatacgcggctgccatcatactccgcaatcgagtgcaatctctggtcctcggggcaccacgctatcagcacataggccttgttgctatgttccgccagaacacaggcatgtgggaaagtaatgccaatgtgaagggaacccagattggagcttacttcggcgcttccctctgctcggttgacgttgactcaaacggttccactgatctggtcctgatcggagccccccactattatgagcagacccgaggcgggcaagtctccgtgtgtcccttgccaaggggcagagccagatggcagtgcgacgctgtcctgtacggcgaacagggacaaccatgggggaggttcggcgccgctttgacagtgcttggggacgtaaacggcgataaactgaccgacgttgccatcggcgccccaggcgaagaggataataggggcgcagtgtacctttttcacggcacttctgggtccggcatatcgccctctcattcacagcgaattgccggctctaagttgtcaccacggctccagtacttcggacaatcactatctggcggccaggatcttacaatggacggccttgtggatctcacagtgggagctcagggccacgtactgttgcttcgatcacagccagtgctcagggtgaaggccatcatggagttcaacccaagagaagtggcacgtaatgtattcgaatgcaacgatcaggtggtaaagggcaaagaagccggtgaggtgcgagtctgccttcatgtgcagaaatccacccgggaccggcttagagaaggacagatccagagcgtggtgacctatgacttggctctagactctggccgtccacactctcgcgccgttttcaacgagacaaaaaactctacccgccgtcagactcaagttctgggcttgacacagacgtgtgagaccctgaagttacagctccctaattgcattgaggaccctgtgtctcctattgtgttgcgcctgaacttttcacttgtgggtactccgctgagcgctttcgggaacttgcgtcccgttctggcagaggacgcgcagcgcctttttaccgcattgtttcctttcgaaaaaaattgtggcaacgacaacatttgtcaggatgacctgtccataacctttagctttatgagcttggactgcttggtggtggggggaccccgggagtttaacgtcaccgtcaccgttcggaatgacggcgaggattcttatagaacacaggtcacattttttttcccgctggatctctcttaccgcaaagtgtctacactgcagaatcagcgctcccaacgatcatggaggttagcttgcgagagcgcctcatccacagaggtgtcaggggcacttaagagcacaagttgtagcataaatcaccccatttttcctgaaaacagcgaagtgacatttaacatcaccttcgacgtggacagcaaggcttccttgggaaataaactccttttgaaagcaaacgtaacaagcgagaacaatatgcctaggactaacaaaacagagtttcaactcgagctgcctgtgaagtatgccgtctacatggtcgttacatcgcatggtgtatctactaaatacctcaactttacggctagcgaaaacacttctagggttatgcagcaccaatatcaagtgtcaaatttgggccagcgatcgttgcctatctctctcgtgttcttggtacctgtgcgtcttaatcagacagtgatatgggacaggccccaagtcacctttagcgagaacctgagcagtacctgtcatacaaaagagaggctgcctagtcacagtgacttcctggcagaactgagaaaagctcctgtggtgaattgttcgattgcggtctgccagcgtatccaatgcgacattcccttcttcggcattcaggaggagtttaacgccactttgaaaggtaatctcagtttcgattggtatattaaaacgtcccataaccatcttttgattgtgtcgacagccgagatactattcaatgacagcgtgtttaccctgttacctggtcagggggcttttgtgaggagccaaactgagacgaaggtcgagccttttgaagtgcccaacccattaccactgatcgttggtagcagcgtcggaggactgctgcttctggcactaattaccgccgccctgtacaagttaggcttcttcaaaagacaatacaaggatatgatgtccgaaggaggcccccccggcgcagaacctcaatag

SEQ ID NO: 14033 - DNA, 3459 bp, Artificial Sequence
  derived and/or modified sequence
atggcgctgagagtgcttctgcttacagcactcaccctgtgccacggattcaatttggatacagaaaacgccatgacttttcaagagaatgcccgaggctttggacagtccgtggtccagttgcaggggagcagagtggtggtcggcgctccacaggagattgtcgcagctaaccagagaggaagcctttatcagtgcgactatagcaccggaagctgtgaaccgataagactgcaggtgccggttgaagcggtgaatatgagccttggactctccctggccgcaaccacatctcctccacagctactcgcatgcggtccgacggtacaccagacgtgttctgaaaatacttacgtcaaggggctgtgctttctgttcgggagtaaccttagacaacagccacagaaattcccagaagcacttcgcggatgtcctcaggaggactcagatattgccttcttgatcgacggctccggaagcatcattccacatgattttaggagaatgaaagaatttgtttcaaccgtgatggagcagctcaagaaatctaagaccctcttcagtctgatgcaatattccgaggaattcagaatccattttacgtttaaggaattccagaacaaccccaacccacggtcgctcgtcaagcccataacgcagttactcgggaggacacacactgccaccggaattcggaaggttgtgagagagttgttcaacatcactaacggagcgcgaaagaatgcgttcaagatcctcgtcgtgatcaccgacggcgaaaaatttggggatccactgggatacgaagatgtaatcccagaagctgacagagagggagtgataagatatgtcatcggggttggtgacgcctttcgctcggagaagtcaaggcaggagctcaacaccatagcaagcaaaccaccgagagaccacgtttttcaggttaataattttgaggcattgaaaaccatccagaaccaactgcgggagaaaatcttcgcgatcgagggaacccagacaggtagttcttcatcctttgagcatgagatgagtcaggaggggttttccgccgcaatcacatcaaatggaccacttctgagcaccgtcgggtcatacgattgggcaggaggagtatttttgtacacatccaaagaaaagtcaaccttcatcaacatgacacgggtcgactctgacatgaacgacgcctatttagggtatgctgctgcaataattctgagaaatagggtccagtccctggtgcttggcgcacctcgctaccagcacatagggctcgtggcgatgtttcggcagaataccggaatgtgggagtcaaacgcaaacgtgaagggaacacaaataggagcgtacttcggagccagcttgtgttctgtggacgtggacagtaacggctctactgacctcgttcttattggggctcctcactattacgaacaaacacgcggtgggcaagtgagtgtgtgtccactgccacggggaagagctaggtggcagtgcgacgccgtgctgtatggcgagcagggacagccctgggggcgtttcggcgctgcgcttacagtcctgggggatgtgaatggagacaaattgacagacgtggctataggggcacctggcgaggaggataacagaggagctgtctaccttttccacggcaccagcggttccgggatttctccatcacatagccagcgcattgctggaagcaagttatctccaaggttacaatatttcggtcagagcctttcaggcggacaggacctgacgatggacggtctggtggacctgacagtcggagcccaagggcacgtgctccttctgcgctcccagccggtcctaagagtgaaagctatcatggaatttaaccccagggaagtggccaggaacgtctttgaatgcaacgaccaggttgtgaaaggtaaagaggctggcgaggttcgtgtgtgtcttcatgtacagaagagcaccagggatcgactgagagaaggccagattcagtctgtagtgacttatgatctggcacttgattctggtagaccccacagccgagcagtctttaatgagactaaaaactctaccaggaggcagacgcaggttctggggctgacccagacttgcgagaccctcaagcttcaacttccaaattgcattgaagaccctgtgtcccctattgtactccgattaaattttagcctggttgggacaccactgtctgcgttcggtaacctcagacccgttctagcagaggacgcacagcggctcttcacagccctgttcccatttgaaaagaattgtggcaacgacaatatttgccaggacgatctgagcatcacgttttcattcatgtccctggactgtctggtggttgggggacctagagagttcaatgtgaccgtgaccgtgcgcaatgacggtgaggacagttaccggacccaggtcactttcttcttccccttggacctgtcttatcggaaggtctcgacccttcaaaatcaacggtcacagaggagttggaggttagcctgtgaaagcgcgagttctacggaagtttctggggctctcaaaagcaccagctgcagtataaatcaccctatcttcccggagaattctgaggtaacctttaacattacatttgatgttgactctaaggcgagtctagggaacaaattgctgttaaaagctaatgttacatctgaaaataatatgcccaggactaataaaactgagttccaactggagcttcctgtgaagtatgccgtatatatggtagtgaccagccatggcgtgtctacaaaatatctgaactttactgcgagcgaaaacactagccgcgtgatgcagcaccagtatcaggtaagtaacctggggcagcggagtcttccaatttctttagtgtttctagtaccggtgagactcaaccagacagtcatttgggaccggcctcaggtgaccttctcggagaatctgtcttcaacatgccacacgaaagagaggttaccttcccattccgattttttagctgagttaagaaaggcccctgtcgtgaattgttcaattgctgtgtgccagcgcatccagtgcgatataccttttttcggtattcaagaggaatttaatgccacactgaagggcaatctaagtttcgactggtatataaagacaagccataatcacctcttgattgtgagcaccgctgaaatcctgttcaacgactctgtctttactctgttacctggtcagggtgcattcgttcggtcccagacggaaaccaaagtggaacccttcgaggttcctaatccactgcccctgatcgtgggcagcagtgtgggaggcctcctgcttctagctctgattactgctgctctttacaagcttggcttttttaagagacagtacaaggatatgatgagcgagggtggccctcccggtgctgagccccagtag

SEQ ID NO: 14034 - DNA, 3459 bp, Artificial Sequence
  derived and/or modified sequence
atggccctgagagtgctgctgctgaccgccctgaccctgtgccacggcttcaacctggacaccgagaacgccatgaccttccaggagaacgccagaggcttcggccagagcgtggtgcagctgcagggcagcagagtggtggtgggcgccccccaggagatcgtggccgccaaccagagaggcagcctgtaccagtgcgactacagcaccggcagctgcgagcccatcagactgcaggtgcccgtggaggccgtgaacatgagcctgggcctgagcctggccgccaccaccagccccccccagctgctggcctgcggccccaccgtgcaccagacctgcagcgagaacacctacgtgaagggcctgtgcttcctgttcggcagcaacctgagacagcagccccagaagttccccgaggccctgagaggctgcccccaggaggacagcgacatcgccttcctgatcgacggcagcggcagcatcatcccccacgacttcagaagaatgaaggagttcgtgagcaccgtgatggagcagctgaagaagagcaagaccctgttcagcctgatgcagtacagcgaggagttcagaatccacttcaccttcaaggagttccagaacaaccccaaccccagaagcctggtgaagcccatcacccagctgctgggcagaacccacaccgccaccggcatcagaaaggtggtgagagagctgttcaacatcaccaacggcgccagaaagaacgccttcaagatcctggtggtgatcaccgacggcgagaagttcggcgaccccctgggctacgaggacgtgatccccgaggccgacagagagggcgtgatcagatacgtgatcggcgtgggcgacgccttcagaagcgagaagagcagacaggagctgaacaccatcgccagcaagccccccagagaccacgtgttccaggtgaacaacttcgaggccctgaagaccatccagaaccagctgagagagaagatcttcgccatcgagggcacccagaccggcagcagcagcagcttcgagcacgagatgagccaggagggcttcagcgccgccatcaccagcaacggccccctgctgagcaccgtgggcagctacgactgggccggcggcgtgttcctgtacaccagcaaggagaagagcaccttcatcaacatgaccagagtggacagcgacatgaacgacgcctacctgggctacgccgccgccatcatcctgagaaacagagtgcagagcctggtgctgggcgcccccagataccagcacatcggcctggtggccatgttcagacagaacaccggcatgtgggagagcaacgccaacgtgaagggcacccagatcggcgcctacttcggcgccagcctgtgcagcgtggacgtggacagcaacggcagcaccgacctggtgctgatcggcgccccccactactacgagcagaccagaggcggccaggtgagcgtgtgccccctgcccagaggcagagccagatggcagtgcgacgccgtgctgtacggcgagcagggccagccctggggcagattcggcgccgccctgaccgtgctgggcgacgtgaacggcgacaagctgaccgacgtggccatcggcgcccccggcgaggaggacaacagaggcgccgtgtacctgttccacggcaccagcggcagcggcatcagccccagccacagccagagaatcgccggcagcaagctgagccccagactgcagtacttcggccagagcctgagcggcggccaggacctgaccatggacggcctggtggacctgaccgtgggcgcccagggccacgtgctgctgctgagaagccagcccgtgctgagagtgaaggccatcatggagttcaaccccagagaggtggccagaaacgtgttcgagtgcaacgaccaggtggtgaagggcaaggaggccggcgaggtgagagtgtgcctgcacgtgcagaagagcaccagagacagactgagagagggccagatccagagcgtggtgacctacgacctggccctggacagcggcagaccccacagcagagccgtgttcaacgagaccaagaacagcaccagaagacagacccaggtgctgggcctgacccagacctgcgagaccctgaagctgcagctgcccaactgcatcgaggaccccgtgagccccatcgtgctgagactgaacttcagcctggtgggcacccccctgagcgccttcggcaacctgagacccgtgctggccgaggacgcccagagactgttcaccgccctgttccccttcgagaagaactgcggcaacgacaacatctgccaggacgacctgagcatcaccttcagcttcatgagcctggactgcctggtggtgggcggccccagagagttcaacgtgaccgtgaccgtgagaaacgacggcgaggacagctacagaacccaggtgaccttcttcttccccctggacctgagctacagaaaggtgagcaccctgcagaaccagagaagccagagaagctggagactggcctgcgagagcgccagcagcaccgaggtgagcggcgccctgaagagcaccagctgcagcatcaaccaccccatcttccccgagaacagcgaggtgaccttcaacatcaccttcgacgtggacagcaaggccagcctgggcaacaagctgctgctgaaggccaacgtgaccagcgagaacaacatgcccagaaccaacaagaccgagttccagctggagctgcccgtgaagtacgccgtgtacatggtggtgaccagccacggcgtgagcaccaagtacctgaacttcaccgccagcgagaacaccagcagagtgatgcagcaccagtaccaggtgagcaacctgggccagagaagcctgcccatcagcctggtgttcctggtgcccgtgagactgaaccagaccgtgatctgggacagaccccaggtgaccttcagcgagaacctgagcagcacctgccacaccaaggagagactgcccagccacagcgacttcctggccgagctgagaaaggcccccgtggtgaactgcagcatcgccgtgtgccagagaatccagtgcgacatccccttcttcggcatccaggaggagttcaacgccaccctgaagggcaacctgagcttcgactggtacatcaagaccagccacaaccacctgctgatcgtgagcaccgccgagatcctgttcaacgacagcgtgttcaccctgctgcccggccagggcgccttcgtgagaagccagaccgagaccaaggtggagcccttcgaggtgcccaaccccctgcccctgatcgtgggcagcagcgtgggcggcctgctgctgctggccctgatcaccgccgccctgtacaagctgggcttcttcaagagacagtacaaggacatgatgagcgagggcggcccccccggcgccgagccccagtag

SEQ ID NO: 14035 - protein, 239 aa, Artificial Sequence
  derived and/or modified sequence
MAHAGRTGYDNREIVMKYIHYKLSQRGYEWDAGDVGAAPPGAAPAPGIFSSQPGHTPHPAASRDPVARTSPLQTPAAPGAAAGPALSPVPPVVHLTLRQAGDDFSRRYRRDFAEMSSQLHLTPFTARGRFATVVEELFRDGVNWGRIVAFFEFGGVMCVESVNREMSPLVDNIALWMTEYLNRHLHTWIQDNGGWDAFVELYGPSMRPLFDFSWLSLKTLLSLALVGACITLGAYLGHK

SEQ ID NO: 14036 - DNA, 720 bp, Artificial Sequence
  derived and/or modified sequence
atggctcatgcggggcgtaccggatatgacaatagagaaatcgtgatgaaatatatccattacaaactctcccagaggggatatgagtgggacgccggagatgtcggagccgcaccccccggggccgcgccggcccccgggattttcagctcccagcctggccataccccacaccctgccgcatctcgcgatccagttgcgcgaacatctcctctccagaccccagcagccccaggagccgcagcaggtcctgccctctccccggtccctccagttgtgcacttgacactccggcaggctggagacgatttctcccgtcgctaccggcgcgattttgccgagatgtcttcccagctccatctcactccattcactgccagaggcaggtttgccaccgtcgtcgaagaattattccgcgacggagtcaactggggacgcatcgtggccttctttgaatttggaggagtgatgtgtgtggagagtgtgaatcgagagatgtcacctctggtggataatatagctctctggatgactgaatatctgaataggcatctgcacacttggatccaagacaacgggggatgggatgctttcgtggagctgtacggtccgtcgatgagaccactctttgacttctcctggctctcccttaagactctgctgagcctggccctcgtaggtgcatgtattactttaggcgcttacctaggccacaagtag

SEQ ID NO: 14037 - DNA, 720 bp, Artificial Sequence
  derived and/or modified sequence
atggcccacgccggcaggactggctacgacaaccgagagattgtaatgaagtacatacactacaaactcagccagcgggggtacgagtgggatgccggcgatgtaggggcagctcctcccggggcggctccagctcccggaattttttcaagtcagcccggccacactcctcaccccgcggctagcagggacccagtggctaggaccagtcctcttcagacgccagctgcacctggggccgccgctggtccagccctttcgcccgtgccccctgtggtccacctcacccttaggcaagctggggacgacttctcacggagatataggagggactttgccgagatgagctcacaactgcatctgaccccattcaccgcaaggggccgattcgcaactgtcgtggaggagctgttccgggacggagtcaattggggccgcattgttgcgttcttcgagttcggcggggttatgtgtgtggagtccgtgaaccgagaaatgtcgccactcgttgataacattgcgctctggatgactgagtatctgaacaggcatctccatacgtggattcaagacaacggtgggtgggatgctttcgtcgagctttatggacccagtatgcggccattgttcgacttctcttggttatctttgaagactcttctgtccctcgcactcgttggagcttgtattaccctgggcgcctatctcggccataagtag

SEQ ID NO: 14038 - DNA, 720 bp, Artificial Sequence
  derived and/or modified sequence
atggcccacgccggccgcacaggctatgacaaccgggagatcgtgatgaagtacatccactacaagctgagccagaggggctatgagtgggatgctggagatgtgggcgccgcccctcctggggccgccccagcccctggcatcttcagcagccagcccggccacaccccccaccctgctgccagccgggaccctgtggcccggaccagccccctgcagaccccagctgcccctggagctgctgctggccctgccctgagccctgtgccccctgtggtgcacctgaccctgcggcaggccggagatgacttcagccgccgctacagaagagactttgctgagatgagcagccagctgcacctgacccccttcaccgcccggggccgctttgccaccgtggtggaggagctgttcagagatggagtgaactggggcagaattgtggccttctttgaatttggaggagtgatgtgtgtggagagcgtgaaccgggagatgagccccctggtggacaacatcgccctgtggatgacagagtacctgaacagacacctgcacacctggatccaggacaatggaggctgggatgcctttgtggagctgtatggccccagcatgaggcccctgtttgacttctcctggctgagcctgaagaccctgctgagcctggccctggtgggcgcctgcatcaccctgggcgcctacctgggccacaagtag

SEQ ID NO: 14039 - DNA, 720 bp, Artificial Sequence
  derived and/or modified sequence
atggcccacgccggccggaccggctacgacaaccgggagatcgtgatgaagtacattcattacaaactctctcagcgcggctatgaatgggacgcaggggacgtgggagccgcgccccccggagctgcgcccgcgcccggaatattcagcagccagccagggcacacaccgcatcccgccgcttcccgcgaccccgtagctagaacttcaccgctgcagacacccgccgcccctggcgcagctgcgggcccggcgctgagccctgtgcctcccgtcgtgcatttgacactgaggcaggcaggcgacgactttagcaggcgttatcggcgggattttgccgaaatgtcttcacagctacatctcaccccatttactgccaggggtaggttcgccaccgtagtcgaggagctgttcagggatggagtaaattggggtcgtatcgttgccttttttgagttcgggggcgtgatgtgcgttgaaagcgtgaacagggaaatgtccccgttggtcgacaacattgctctgtggatgacggaatatctaaacagacacttgcacacctggatccaagataacggaggctgggatgctttcgtcgaactctatggcccaagtatgaggccactttttgatttcagctggctctcactgaagacccttctgtccctcgccctagtgggggcttgtattaccttaggagcctatctcggccataagtag

SEQ ID NO: 14040 - DNA, 720 bp, Artificial Sequence
  derived and/or modified sequence
atggcccacgccggccggaccggctacgacaaccgggagatcgtgatgaaatacattcactacaaactatcacagaggggatatgagtgggatgccggcgacgttggcgccgctcctcctggcgcagcccccgctccgggcatcttttcctcccaacccggccacactccacaccctgccgcatcacgggatcctgttgccaggacctctccattgcagacacctgccgcccctggggccgcggccggcccggcattaagccctgtacctccggtggtacatctcacactacgacaggccggggacgatttcagccggcgctacaggagagacttcgccgaaatgtcctcgcaactgcacttgaccccttttacggcgcggggacggttcgccaccgtggtggaagaattgtttcgggatggcgtcaactggggacgtattgtggcgtttttcgaatttggaggagtgatgtgcgtggaatccgtgaaccgggaaatgtcgcctcttgtggataacatcgcgctgtggatgaccgagtaccttaacaggcacctgcacacatggatacaggataacggaggctgggatgcatttgtggagctatacggaccatccatgcgaccactgttcgacttctcgtggctcagtctcaaaactttattgtctttagcgttggtcggagcatgcatcaccctgggcgcttatctagggcacaagtag

SEQ ID NO: 14041 - DNA, 720 bp, Artificial Sequence
  derived and/or modified sequence
atggcccacgcaggacggactggctacgataaccgtgagattgtgatgaaatatatccactacaagctgagccagagaggatatgagtgggatgccggtgacgtgggagccgcacctccaggggctgcacctgcccctggcatcttctcttctcagccaggacataccccccaccccgcagcgtcacgtgaccccgtcgctcgtacatcgccactgcagacgccagctgctccaggcgcagccgcaggacccgctctgagcccggttccgcctgtggtgcatctgacgctgaggcaggccggagacgacttctcaaggagatataggagggactttgctgagatgagctcccagttgcacctcactccattcaccgctcggggtagatttgccacagtagtggaggagttgtttcgcgatggtgtgaactggggcagaattgtggcgtttttcgaatttgggggagtgatgtgcgtggagagcgtaaatcgcgagatgtccccactcgtcgacaatatcgctctgtggatgaccgagtacctgaacagacacctccacacgtggattcaagacaatggcggttgggacgcattcgtggagctatatggtcccagtatgaggccactattcgatttttcatggctgagcctgaagaccttattatccctggccctggtgggcgcatgcatcacccttggagcttaccttggccataagtag

SEQ ID NO: 14042 - DNA, 720 bp, Artificial Sequence
  derived and/or modified sequence
atggcccacgccggacggacaggatatgataatcgagagattgtgatgaaatatatccactataagctttcccagaggggatacgaatgggatgccggagatgtgggtgccgctcccccaggagcagcgccagctccgggtatctttagttctcagcccggacataccccacatccggcagcaagtcgcgacccggtcgcccgaactagcccacttcagacacccgcagcgccaggagccgctgctggacctgcgctctccccggtcccacccgtcgtgcatttaacactaaggcaagctggcgacgatttctcgcgacgctaccgaagagatttcgccgaaatgtcctctcaactccacctcacaccctttacagctagaggcagatttgctaccgtggtcgaagaactgttccgggacggagtgaattggggacggatcgtcgcctttttcgaatttggcggtgtaatgtgcgtggagtcggtgaaccgcgagatgtcgccactggtggacaacatcgcactctggatgaccgagtacctcaacaggcacctccacacctggattcaggataacgggggttgggatgctttcgtggagctgtacggtccttctatgagaccgctctttgatttttcatggcttagtttgaagacacttctgtccttggctctcgttggagcctgtataaccctcggcgcttatttaggccacaagtag

SEQ ID NO: 14043 - DNA, 720 bp, Artificial Sequence
  derived and/or modified sequence
atggctcacgccggtaggacgggatacgataacagggagatcgtgatgaaatacatacactataagctctcccagaggggctatgaatgggacgccggagatgtgggtgctgcgccgccgggagctgccccagcccctggaatcttttcttctcaacccggccacactccgcaccccgctgcctctcgcgatcccgttgcaagaacgagccctcttcaaactccagccgcccccggagccgccgcgggtccagccctgtcaccggttccgcccgtagttcatttaacactgagacaggcaggagatgatttttcaagaagatacagacgggattttgcagagatgagcagccaattgcacttaaccccattcacggccaggggcagatttgctacagtggtagaagagttgttccgagacggcgttaactggggaaggattgtcgcattcttcgagttcggtggagtgatgtgcgttgaatccgttaatcgtgaaatgtcacccctcgtagacaatatcgctctgtggatgaccgaatacttgaatagacatctgcacacctggattcaggataacgggggatgggacgcctttgtggagttatacggacccagcatgagacccctgtttgacttttcttggttgagcttgaagaccctactttctcttgcccttgtgggggcctgcatcactctgggcgcctatttggggcacaagtag

SEQ ID NO: 14044 - DNA, 720 bp, Artificial Sequence
  derived and/or modified sequence
atggcacatgccggccgaacaggttatgacaatcgcgagattgtgatgaaatacattcattacaaattgtctcagcggggctatgagtgggatgcaggcgacgttggtgccgctcccccgggcgcagctcccgcccccgggatattctcatcacagccgggccataccccccacccagcagcttctagagatcccgttgctcgcactagcccattacagactcccgcggcccccggagcggccgccggccccgccctgtcccccgtgccccccgtggttcacctgactctcagacaggctggggacgacttctctcgccgttatagacgcgacttcgccgagatgtcctctcagctccacttaacaccctttacagcacgcggacggttcgccaccgtcgtggaagaactgttcagagatggtgtcaactggggacgtatagtggcattttttgaatttggaggggttatgtgtgtcgaaagtgtgaaccgagaaatgagcccgctcgtcgataatatagccctgtggatgaccgaatacctaaaccgtcatctccacacctggatccaagacaacggcggatgggacgccttcgtggaattatacggaccaagcatgcggcctctgtttgatttcagttggttgagcctgaaaacgctgctctccttagcgctggtaggcgcttgcatcacccttggggcctacttagggcataagtag

SEQ ID NO: 14045 - DNA, 720 bp, Artificial Sequence
  derived and/or modified sequence
atggctcacgcaggtagaaccggctacgacaaccgcgaaattgttatgaagtacatccactataaactgagtcagcgtggctacgaatgggatgccggggacgttggcgcggctccacctggcgccgcccccgctcccggaatcttcagcagccagcccggccacactcctcatccagccgcttccagagaccctgtggcaagaacctctcctctgcagactccagccgctccaggcgcagctgccgggccggccttgtcccctgtcccccccgtggttcatttaactcttcggcaagccggagatgatttttcaagaagatacagacgggattttgcagagatgagcagccaattgcacttaaccccattcacggccaggggcagatttgctacagtggtagaagagttgttccgagacggcgttaactggggaaggattgtcgcattcttcgagttcggtggagtgatgtgcgttgaatccgttaatcgtgaaatgtcacccctcgtagacaatatcgctctgtggatgaccgaatacttgaatagacatctgcacacctggattcaggataacgggggatgggacgcctttgtggagttgtacggaccaagcatgcgccccttatttgactttagctggctgagccttaaaactttgctgtcattagccctcgtcggcgcctgcatcaccctcggagcttatttaggccataaatag

SEQ ID NO: 14046 - DNA, 720 bp, Artificial Sequence
  derived and/or modified sequence
atggcacatgcaggacggaccggctacgacaatcgagaaattgttatgaaatatattcactataaactgagccagagaggatatgaatgggacgctggcgacgttggcgctgctccccctggcgctgctcctgctccagggattttttcctcccaaccgggtcatactccacatcccgcagcatcacgcgatcccgtagctcgtacttccccactgcagacgcccgccgcccccggcgccgccgcggggcccgccctcagccctgtgcccccagtagttcacctcacgctccgccaggcgggcgacgatttctcacgacgctacaggcgggactttgcagagatgagtagccaattacacttgacgccgtttaccgcaagaggaaggtttgcgacagttgtggaagaactgttcagagatggggtgaactgggggaggatcgtggcgttttttgagttcggaggagtgatgtgcgtggaaagcgtcaatcgggagatgagccctctcgtagacaatattgccttgtggatgactgaatacctcaacaggcatctacatacatggattcaggacaatgggggctgggacgcttttgttgagctatacgggccttcaatgagacccttgttcgacttttcatggctttcgcttaagacactcctcagcctcgcactggtcggggcctgcataactttaggagcctatttggggcacaagtag

SEQ ID NO: 14047 - DNA, 6492 bp, Artificial Sequence
  derived and/or modified sequence
tttctgtgaagcagaagtctgggaatcgatctggaaatcctcctaatttttactccctctccccgcgactcctgattcattgggaagtttcaaatcagctataactggagagtgctgaagattgatgggatcgttgccttatgcatttgttttggttttacaaaaaggaaacttgacagaggatcatgctgtacttaaaaaatacaacatcacagaggaagtagactgatattaacaatacttactaataataacgtgcctcatgaaataaagatccgaaaggaattggaataaaaatttcctgcatctcatgccaagggggaaacaccagaatcaagtgttccgcgtgattgaagacaccccctcgtccaagaatgcaaagcacatccaataaaatagctggattataactcctcttctttctctgggggccgtggggtgggagctggggcgagaggtgccgttggcccccgttgcttttcctctgggaaggatggcgcacgctgggagaacagggtacgataaccgggagatagtgatgaagtacatccattataagctgtcgcagaggggctacgagtgggatgcgggagatgtgggcgccgcgcccccgggggccgcccccgcaccgggcatcttctcctcccagcccgggcacacgccccatccagccgcatcccgggacccggtcgccaggacctcgccgctgcagaccccggctgcccccggcgccgccgcggggcctgcgctcagcccggtgccacctgtggtccacctgaccctccgccaggccggcgacgacttctcccgccgctaccgccgcgacttcgccgagatgtccagccagctgcacctgacgcccttcaccgcgcggggacgctttgccacggtggtggaggagctcttcagggacggggtgaactgggggaggattgtggccttctttgagttcggtggggtcatgtgtgtggagagcgtcaaccgggagatgtcgcccctggtggacaacatcgccctgtggatgactgagtacctgaaccggcacctgcacacctggatccaggataacggaggctgggatgcctttgtggaactgtacggccccagcatgcggcctctgtttgatttctcctggctgtctctgaagactctgctcagtttggccctggtgggagcttgcatcaccctgggtgcctatctgggccacaagtgaagtcaacatgcctgccccaaacaaatatgcaaaaggttcactaaagcagtagaaataatatgcattgtcagtgatgtaccatgaaacaaagctgcaggctgtttaagaaaaaataacacacatataaacatcacacacacagacagacacacacacacacaacaattaacagtcttcaggcaaaacgtcgaatcagctatttactgccaaagggaaatatcatttattttttacattattaagaaaaaaagatttatttatttaagacagtcccatcaaaactcctgtctttggaaatccgaccactaattgccaagcaccgcttcgtgtggctccacctggatgttctgtgcctgtaaacatagattcgctttccatgttgttggccggatcaccatctgaagagcagacggatggaaaaaggacctgatcattggggaagctggctttctggctgctggaggctggggagaaggtgttcattcacttgcatttctttgccctgggggctgtgatattaacagagggagggttcctgtggggggaagtccatgcctccctggcctgaagaagagactctttgcatatgactcacatgatgcatacctggtgggaggaaaagagttgggaacttcagatggacctagtacccactgagatttccacgccgaaggacagcgatgggaaaaatgcccttaaatcataggaaagtatttttttaagctaccaattgtgccgagaaaagcattttagcaatttatacaatatcatccagtaccttaagccctgattgtgtatattcatatattttggatacgcaccccccaactcccaatactggctctgtctgagtaagaaacagaatcctctggaacttgaggaagtgaacatttcggtgacttccgcatcaggaaggctagagttacccagagcatcaggccgccacaagtgcctgcttttaggagaccgaagtccgcagaacctgcctgtgtcccagcttggaggcctggtcctggaactgagccggggccctcactggcctcctccagggatgatcaacagggcagtgtggtctccgaatgtctggaagctgatggagctcagaattccactgtcaagaaagagcagtagaggggtgtggctgggcctgtcaccctggggccctccaggtaggcccgttttcacgtggagcatgggagccacgacccttcttaagacatgtatcactgtagagggaaggaacagaggccctgggcccttcctatcagaaggacatggtgaaggctgggaacgtgaggagaggcaatggccacggcccattttggctgtagcacatggcacgttggctgtgtggccttggcccacctgtgagtttaaagcaaggctttaaatgactttggagagggtcacaaatcctaaaagaagcattgaagtgaggtgtcatggattaattgacccctgtctatggaattacatgtaaaacattatcttgtcactgtagtttggttttatttgaaaacctgacaaaaaaaaagttccaggtgtggaatatgggggttatctgtacatcctggggcattaaaaaaaaaatcaatggtggggaactataaagaagtaacaaaagaagtgacatcttcagcaaataaactaggaaatttttttttcttccagtttagaatcagccttgaaacattgatggaataactctgtggcattattgcattatataccatttatctgtattaactttggaatgtactctgttcaatgtttaatgctgtggttgatatttcgaaagctgctttaaaaaaatacatgcatctcagcgtttttttgtttttaattgtatttagttatggcctatacactatttgtgagcaaaggtgatcgttttctgtttgagatttttatctcttgattcttcaaaagcattctgagaaggtgagataagccctgagtctcagctacctaagaaaaacctggatgtcactggccactgaggagctttgtttcaaccaagtcatgtgcatttccacgtcaacagaattgtttattgtgacagttatatctgttgtccctttgaccttgtttcttgaaggtttcctcgtccctgggcaattccgcatttaattcatggtattcaggattacatgcatgtttggttaaacccatgagattcattcagttaaaaatccagatggcaaatgaccagcagattcaaatctatggtggtttgacctttagagagttgctttacgtggcctgtttcaacacagacccacccagagccctcctgccctccttccgcgggggctttctcatggctgtccttcagggtcttcctgaaatgcagtggtgcttacgctccaccaagaaagcaggaaacctgtggtatgaagccagacctccccggcgggcctcagggaacagaatgatcagacctttgaatgattctaatttttaagcaaaatattattttatgaaaggtttacattgtcaaagtgatgaatatggaatatccaatcctgtgctgctatcctgccaaaatcattttaatggagtcagtttgcagtatgctccacgtggtaagatcctccaagctgctttagaagtaacaatgaagaacgtggacgtttttaatataaagcctgttttgtcttttgttgttgttcaaacgggattcacagagtatttgaaaaatgtatatatattaagaggtcacgggggctaattgctggctggctgccttttgctgtggggttttgttacctggttttaataacagtaaatgtgcccagcctcttggccccagaactgtacagtattgtggctgcacttgctctaagagtagttgatgttgcattttccttattgttaaaaacatgttagaagcaatgaatgtatataaaagcctcaactagtcatttttttctcctcttcttttttttcattatatctaattattttgcagttgggcaacagagaaccatccctattttgtattgaagagggattcacatctgcatcttaactgctctttatgaatgaaaaaacagtcctctgtatgtactcctctttacactggccagggtcagagttaaatagagtatatgcactttccaaattggggacaagggctctaaaaaaagccccaaaaggagaagaacatctgagaacctcctcggccctcccagtccctcgctgcacaaatactccgcaagagaggccagaatgacagctgacagggtctatggccatcgggtcgtctccgaagatttggcaggggcagaaaactctggcaggcttaagatttggaataaagtcacagaattaaggaagcacctcaatttagttcaaacaagacgccaacattctctccacagctcacttacctctctgtgttcagatgtggccttccatttatatgtgatctttgttttattagtaaatgcttatcatctaaagatgtagctctggcccagtgggaaaaattaggaagtgattataaatcgagaggagttataataatcaagattaaatgtaaataatcagggcaatcccaacacatgtctagctttcacctccaggatctattgagtgaacagaattgcaaatagtctctatttgtaattgaacttatcctaaaacaaatagtttataaatgtgaacttaaactctaattaattccaactgtacttttaaggcagtggctgtttttagactttcttatcacttatagttagtaatgtacacctactctatcagagaaaaacaggaaaggctcgaaatacaagccattctaaggaaattagggagtcagttgaaattctattctgatcttattctgtggtgtcttttgcagcccagacaaatgtggttacacactttttaagaaatacaattctacattgtcaagcttatgaaggttccaatcagatctttattgttattcaatttggatctttcagggattttttttttaaattattatgggacaaaggacatttgttggaggggtgggagggaggaagaatttttaaatgtaaaacattcccaagtttggatcagggagttggaagttttcagaataaccagaactaagggtatgaaggacctgtattggggtcgatgtgatgcctctgcgaagaaccttgtgtgacaaatgagaaacattttgaagtttgtggtacgacctttagattccagagacatcagcatggctcaaagtgcagctccgtttggcagtgcaatggtataaatttcaagctggatatgtctaatgggtatttaaacaataaatgtgcagttttaactaacaggatatttaatgacaaccttctggttggtagggacatctgtttctaaatgtttattatgtacaatacagaaaaaaattttataaaattaagcaatgtgaaactgaattggagagtgataatacaagtcctttagtcttacccagtgaatcattctgttccatgtctttggacaaccatgaccttggacaatcatgaaatatgcatctcactggatgcaaagaaaatcagatggagcatgaatggtactgtaccggttcatctggactgccccagaaaaataacttcaagcaaacatcctatcaacaacaaggttgttctgcataccaagctgagcacagaagatgggaacactggtggaggatggaaaggctcgctcaatcaagaaaattctgagactattaataaataagactgtagtgtagatactgagtaaatccatgcacctaaaccttttggaaaatctgccgtgggccctccagatagctcatttcattaagtttttccctccaaggtagaatttgcaagagtgacagtggattgcatttcttttggggaagctttcttttggtggttttgtttattataccttcttaagttttcaaccaaggtttgcttttgttttgagttactggggttatttttgttttaaataaaaataagtgtacaataagtgtttttgtattgaaagcttttgttatcaagattttcatacttttaccttccatggctctttttaagattgatacttttaagaggtggctgatattctgcaacactgtacacataaaaaatacggtaaggatactttacatggttaaggtaaagtaagtctccagttggccaccattagctataatggcactttgtttgtgttgttggaaaaagtcacattgccattaaactttccttgtctgtctagttaatattgtgaagaaaaataaagtacagtgtgagatactg

SEQ ID NO: 14048 - DNA, 7461 bp, Artificial Sequence
  derived and/or modified sequence
gcgcccgcccctccgcgccgcctgcccgcccgcccgccgcgctcccgcccgccgctctccgtggccccgccgcgctgccgccgccgccgctgccagcgaaggtgccggggctccgggccctccctgccggcggccgtcagcgctcggagcgggctgcgcggcgggagctccgggaggcggccgtagccagcgccgccgcgcaggaccaggaggaggagaaagggtgcgcagcccggaggcggggtgcgccggtggggtgcagcggaagagggggtccaggggggagaacttcgtagcagtcatcctttttaggaaaagagggaaaaaataaaaccctcccccaccacctccttctccccacccctcgccgcaccacacacagcgcgggcttctagcgctcggcaccggcgggccaggcgcgtcctgccttcatttatccagcagcttttcggaaaatgcatttgctgttcggagtttaatcagaagaggattcctgcctccgtccccggctccttcatcgtcccctctcccctgtctctctcctggggaggcgtgaagcggtcccgtggatagagattcatgcctgtgcccgcgcgtgtgtgcgcgcgtgtaaattgccgagaaggggaaaacatcacaggacttctgcgaataccggactgaaaattgtaattcatctgccgccgccgctgccttttttttttctcgagctcttgagatctccggttgggattcctgcggattgacatttctgtgaagcagaagtctgggaatcgatctggaaatcctcctaatttttactccctctccccgcgactcctgattcattgggaagtttcaaatcagctataactggagagtgctgaagattgatgggatcgttgccttatgcatttgttttggttttacaaaaaggaaacttgacagaggatcatgctgtacttaaaaaatacaagtaagttctctgcacaggaaattggtttaatgtaactttcaatggaaacctttgagattttttacttaaagtgcattcgagtaaatttaatttccaggcagcttaatacattctttttagccgtgttacttgtagtgtgtatgccctgctttcactcagtgtgtacagggaaacgcacctgattttttacttattagtttgttttttctttaacctttcagcatcacagaggaagtagactgatattaacaatacttactaataataacgtgcctcatgaaataaagatccgaaaggaattggaataaaaatttcctgcatctcatgccaagggggaaacaccagaatcaagtgttccgcgtgattgaagacaccccctcgtccaagaatgcaaagcacatccaataaaatagctggattataactcctcttctttctctgggggccgtggggtgggagctggggcgagaggtgccgttggcccccgttgcttttcctctgggaaggatggcgcacgctgggagaacagggtacgataaccgggagatagtgatgaagtacatccattataagctgtcgcagaggggctacgagtgggatgcgggagatgtgggcgccgcgcccccgggggccgcccccgcaccgggcatcttctcctcccagcccgggcacacgccccatccagccgcatcccgggacccggtcgccaggacctcgccgctgcagaccccggctgcccccggcgccgccgcggggcctgcgctcagcccggtgccacctgtggtccacctgaccctccgccaggccggcgacgacttctcccgccgctaccgccgcgacttcgccgagatgtccagccagctgcacctgacgcccttcaccgcgcggggacgctttgccacggtggtggaggagctcttcagggacggggtgaactgggggaggattgtggccttctttgagttcggtggggtcatgtgtgtggagagcgtcaaccgggagatgtcgcccctggtggacaacatcgccctgtggatgactgagtacctgaaccggcacctgcacacctggatccaggataacggaggctgggatgcctttgtggaactgtacggccccagcatgcggcctctgtttgatttctcctggctgtctctgaagactctgctcagtttggccctggtgggagcttgcatcaccctgggtgcctatctgggccacaagtgaagtcaacatgcctgccccaaacaaatatgcaaaaggttcactaaagcagtagaaataatatgcattgtcagtgatgtaccatgaaacaaagctgcaggctgtttaagaaaaaataacacacatataaacatcacacacacagacagacacacacacacacaacaattaacagtcttcaggcaaaacgtcgaatcagctatttactgccaaagggaaatatcatttattttttacattattaagaaaaaaagatttatttatttaagacagtcccatcaaaactcctgtctttggaaatccgaccactaattgccaagcaccgcttcgtgtggctccacctggatgttctgtgcctgtaaacatagattcgctttccatgttgttggccggatcaccatctgaagagcagacggatggaaaaaggacctgatcattggggaagctggctttctggctgctggaggctggggagaaggtgttcattcacttgcatttctttgccctgggggctgtgatattaacagagggagggttcctgtggggggaagtccatgcctccctggcctgaagaagagactctttgcatatgactcacatgatgcatacctggtgggaggaaaagagttgggaacttcagatggacctagtacccactgagatttccacgccgaaggacagcgatgggaaaaatgcccttaaatcataggaaagtatttttttaagctaccaattgtgccgagaaaagcattttagcaatttatacaatatcatccagtaccttaagccctgattgtgtatattcatatattttggatacgcaccccccaactcccaatactggctctgtctgagtaagaaacagaatcctctggaacttgaggaagtgaacatttcggtgacttccgcatcaggaaggctagagttacccagagcatcaggccgccacaagtgcctgcttttaggagaccgaagtccgcagaacctgcctgtgtcccagcttggaggcctggtcctggaactgagccggggccctcactggcctcctccagggatgatcaacagggcagtgtggtctccgaatgtctggaagctgatggagctcagaattccactgtcaagaaagagcagtagaggggtgtggctgggcctgtcaccctggggccctccaggtaggcccgttttcacgtggagcatgggagccacgacccttcttaagacatgtatcactgtagagggaaggaacagaggccctgggcccttcctatcagaaggacatggtgaaggctgggaacgtgaggagaggcaatggccacggcccattttggctgtagcacatggcacgttggctgtgtggccttggcccacctgtgagtttaaagcaaggctttaaatgactttggagagggtcacaaatcctaaaagaagcattgaagtgaggtgtcatggattaattgacccctgtctatggaattacatgtaaaacattatcttgtcactgtagtttggttttatttgaaaacctgacaaaaaaaaagttccaggtgtggaatatgggggttatctgtacatcctggggcattaaaaaaaaaatcaatggtggggaactataaagaagtaacaaaagaagtgacatcttcagcaaataaactaggaaatttttttttcttccagtttagaatcagccttgaaacattgatggaataactctgtggcattattgcattatataccatttatctgtattaactttggaatgtactctgttcaatgtttaatgctgtggttgatatttcgaaagctgctttaaaaaaatacatgcatctcagcgtttttttgtttttaattgtatttagttatggcctatacactatttgtgagcaaaggtgatcgttttctgtttgagatttttatctcttgattcttcaaaagcattctgagaaggtgagataagccctgagtctcagctacctaagaaaaacctggatgtcactggccactgaggagctttgtttcaaccaagtcatgtgcatttccacgtcaacagaattgtttattgtgacagttatatctgttgtccctttgaccttgtttcttgaaggtttcctcgtccctgggcaattccgcatttaattcatggtattcaggattacatgcatgtttggttaaacccatgagattcattcagttaaaaatccagatggcaaatgaccagcagattcaaatctatggtggtttgacctttagagagttgctttacgtggcctgtttcaacacagacccacccagagccctcctgccctccttccgcgggggctttctcatggctgtccttcagggtcttcctgaaatgcagtggtgcttacgctccaccaagaaagcaggaaacctgtggtatgaagccagacctccccggcgggcctcagggaacagaatgatcagacctttgaatgattctaatttttaagcaaaatattattttatgaaaggtttacattgtcaaagtgatgaatatggaatatccaatcctgtgctgctatcctgccaaaatcattttaatggagtcagtttgcagtatgctccacgtggtaagatcctccaagctgctttagaagtaacaatgaagaacgtggacgtttttaatataaagcctgttttgtcttttgttgttgttcaaacgggattcacagagtatttgaaaaatgtatatatattaagaggtcacgggggctaattgctggctggctgccttttgctgtggggttttgttacctggttttaataacagtaaatgtgcccagcctcttggccccagaactgtacagtattgtggctgcacttgctctaagagtagttgatgttgcattttccttattgttaaaaacatgttagaagcaatgaatgtatataaaagcctcaactagtcatttttttctcctcttcttttttttcattatatctaattattttgcagttgggcaacagagaaccatccctattttgtattgaagagggattcacatctgcatcttaactgctctttatgaatgaaaaaacagtcctctgtatgtactcctctttacactggccagggtcagagttaaatagagtatatgcactttccaaattggggacaagggctctaaaaaaagccccaaaaggagaagaacatctgagaacctcctcggccctcccagtccctcgctgcacaaatactccgcaagagaggccagaatgacagctgacagggtctatggccatcgggtcgtctccgaagatttggcaggggcagaaaactctggcaggcttaagatttggaataaagtcacagaattaaggaagcacctcaatttagttcaaacaagacgccaacattctctccacagctcacttacctctctgtgttcagatgtggccttccatttatatgtgatctttgttttattagtaaatgcttatcatctaaagatgtagctctggcccagtgggaaaaattaggaagtgattataaatcgagaggagttataataatcaagattaaatgtaaataatcagggcaatcccaacacatgtctagctttcacctccaggatctattgagtgaacagaattgcaaatagtctctatttgtaattgaacttatcctaaaacaaatagtttataaatgtgaacttaaactctaattaattccaactgtacttttaaggcagtggctgtttttagactttcttatcacttatagttagtaatgtacacctactctatcagagaaaaacaggaaaggctcgaaatacaagccattctaaggaaattagggagtcagttgaaattctattctgatcttattctgtggtgtcttttgcagcccagacaaatgtggttacacactttttaagaaatacaattctacattgtcaagcttatgaaggttccaatcagatctttattgttattcaatttggatctttcagggattttttttttaaattattatgggacaaaggacatttgttggaggggtgggagggaggaagaatttttaaatgtaaaacattcccaagtttggatcagggagttggaagttttcagaataaccagaactaagggtatgaaggacctgtattggggtcgatgtgatgcctctgcgaagaaccttgtgtgacaaatgagaaacattttgaagtttgtggtacgacctttagattccagagacatcagcatggctcaaagtgcagctccgtttggcagtgcaatggtataaatttcaagctggatatgtctaatgggtatttaaacaataaatgtgcagttttaactaacaggatatttaatgacaaccttctggttggtagggacatctgtttctaaatgtttattatgtacaatacagaaaaaaattttataaaattaagcaatgtgaaactgaattggagagtgataatacaagtcctttagtcttacccagtgaatcattctgttccatgtctttggacaaccatgaccttggacaatcatgaaatatgcatctcactggatgcaaagaaaatcagatggagcatgaatggtactgtaccggttcatctggactgccccagaaaaataacttcaagcaaacatcctatcaacaacaaggttgttctgcataccaagctgagcacagaagatgggaacactggtggaggatggaaaggctcgctcaatcaagaaaattctgagactattaataaataagactgtagtgtagatactgagtaaatccatgcacctaaaccttttggaaaatctgccgtgggccctccagatagctcatttcattaagtttttccctccaaggtagaatttgcaagagtgacagtggattgcatttcttttggggaagctttcttttggtggttttgtttattataccttcttaagttttcaaccaaggtttgcttttgttttgagttactggggttatttttgttttaaataaaaataagtgtacaataagtgtttttgtattgaaagcttttgttatcaagattttcatacttttaccttccatggctctttttaagattgatacttttaagaggtggctgatattctgcaacactgtacacataaaaaatacggtaaggatactttacatggttaaggtaaagtaagtctccagttggccaccattagctataatggcactttgtttgtgttgttggaaaaagtcacattgccattaaactttccttgtctgtctagttaatattgtgaagaaaaataaagtacagtgtgagatactg

SEQ ID NO: 14049 - DNA, 720 bp, Artificial Sequence
  derived and/or modified sequence
atggcccacgccggcagaaccggctacgacaacagagagatcgtgatgaagtacatccactacaagctgagccagagaggctacgagtgggacgccggcgacgtgggcgccgccccccccggcgccgcccccgcccccggcatcttcagcagccagcccggccacaccccccaccccgccgccagcagagaccccgtggccagaaccagccccctgcagacccccgccgcccccggcgccgccgccggccccgccctgagccccgtgccccccgtggtgcacctgaccctgagacaggccggcgacgacttcagcagaagatacagaagagacttcgccgagatgagcagccagctgcacctgacccccttcaccgccagaggcagattcgccaccgtggtggaggagctgttcagagacggcgtgaactggggcagaatcgtggccttcttcgagttcggcggcgtgatgtgcgtggagagcgtgaacagagagatgagccccctggtggacaacatcgccctgtggatgaccgagtacctgaacagacacctgcacacctggatccaggacaacggcggctgggacgccttcgtggagctgtacggccccagcatgagacccctgttcgacttcagctggctgagcctgaagaccctgctgagcctggccctggtgggcgcctgcatcaccctgggcgcctacctgggccacaagtag

SEQ ID NO: 14050 - RNA, 720 nt, Artificial Sequence
  derived and/or modified sequence
auggcucacgccgguaggacgggauacgauaacagggagaucgugaugaaauacauacacuauaagcucucccagaggggcuaugaaugggacgccggagaugugggugcugcgccgccgggagcugccccagccccuggaaucuuuucuucucaacccggccacacuccgcaccccgcugccucucgcgaucccguugcaagaacgagcccucuucaaacuccagccgcccccggagccgccgcggguccagcccugucaccgguuccgcccguaguucauuuaacacugagacaggcaggagaugauuuuucaagaagauacagacgggauuuugcagagaugagcagccaauugcacuuaaccccauucacggccaggggcagauuugcuacagugguagaagaguuguuccgagacggcguuaacuggggaaggauugucgcauucuucgaguucgguggagugaugugcguugaauccguuaaucgugaaaugucaccccucguagacaauaucgcucuguggaugaccgaauacuugaauagacaucugcacaccuggauucaggauaacgggggaugggacgccuuuguggaguuauacggacccagcaugagaccccuguuugacuuuucuugguugagcuugaagacccuacuuucucuugcccuugugggggccugcaucacucugggcgccuauuuggggcacaaguag

SEQ ID NO: 14051 - RNA, 720 nt, Artificial Sequence
  derived and/or modified sequence
auggcacaugccggccgaacagguuaugacaaucgcgagauugugaugaaauacauucauuacaaauugucucagcggggcuaugagugggaugcaggcgacguuggugccgcucccccgggcgcagcucccgcccccgggauauucucaucacagccgggccauaccccccacccagcagcuucuagagaucccguugcucgcacuagcccauuacagacucccgcggcccccggagcggccgccggccccgcccugucccccgugccccccgugguucaccugacucucagacaggcuggggacgacuucucucgccguuauagacgcgacuucgccgagauguccucucagcuccacuuaacacccuuuacagcacgcggacgguucgccaccgucguggaagaacuguucagagauggugucaacuggggacguauaguggcauuuuuugaauuuggagggguuaugugugucgaaagugugaaccgagaaaugagcccgcucgucgauaauauagcccuguggaugaccgaauaccuaaaccgucaucuccacaccuggauccaagacaacggcggaugggacgccuucguggaauuauacggaccaagcaugcggccucuguuugauuucaguugguugagccugaaaacgcugcucuccuuagcgcugguaggcgcuugcaucacccuuggggccuacuuagggcauaaguag

SEQ ID NO: 14052 - RNA, 720 nt, Artificial Sequence
  derived and/or modified sequence
auggcucacgcagguagaaccggcuacgacaaccgcgaaauuguuaugaaguacauccacuauaaacugagucagcguggcuacgaaugggaugccggggacguuggcgcggcuccaccuggcgccgcccccgcucccggaaucuucagcagccagcccggccacacuccucauccagccgcuuccagagacccuguggcaagaaccucuccucugcagacuccagccgcuccaggcgcagcugccgggccggccuuguccccugucccccccgugguucauuuaacucuucggcaagccggagaugauuuuucaagaagauacagacgggauuuugcagagaugagcagccaauugcacuuaaccccauucacggccaggggcagauuugcuacagugguagaagaguuguuccgagacggcguuaacuggggaaggauugucgcauucuucgaguucgguggagugaugugcguugaauccguuaaucgugaaaugucaccccucguagacaauaucgcucuguggaugaccgaauacuugaauagacaucugcacaccuggauucaggauaacgggggaugggacgccuuuguggaguuguacggaccaagcaugcgccccuuauuugacuuuagcuggcugagccuuaaaacuuugcugucauuagcccucgucggcgccugcaucacccucggagcuuauuuaggccauaaauag

SEQ ID NO: 14053 - RNA, 720 nt, Artificial Sequence
  derived and/or modified sequence
auggcacaugcaggacggaccggcuacgacaaucgagaaauuguuaugaaauauauucacuauaaacugagccagagaggauaugaaugggacgcuggcgacguuggcgcugcucccccuggcgcugcuccugcuccagggauuuuuuccucccaaccgggucauacuccacaucccgcagcaucacgcgaucccguagcucguacuuccccacugcagacgcccgccgcccccggcgccgccgcggggcccgcccucagcccugugcccccaguaguucaccucacgcuccgccaggcgggcgacgauuucucacgacgcuacaggcgggacuuugcagagaugaguagccaauuacacuugacgccguuuaccgcaagaggaagguuugcgacaguuguggaagaacuguucagagauggggugaacugggggaggaucguggcguuuuuugaguucggaggagugaugugcguggaaagcgucaaucgggagaugagcccucucguagacaauauugccuuguggaugacugaauaccucaacaggcaucuacauacauggauucaggacaaugggggcugggacgcuuuuguugagcuauacgggccuucaaugagacccuuguucgacuuuucauggcuuucgcuuaagacacuccucagccucgcacuggucggggccugcauaacuuuaggagccuauuuggggcacaaguag

SEQ ID NO: 14054 - protein, 350 aa, Artificial Sequence
  derived and/or modified sequence
MSNITDPQMWDFDDLNFTGMPPADEDYSPCMLETETLNKYVVIIAYALVFLLSLLGNSLVMLVILYSRVGRSVTDVYLLNLALADLLFALTLPIWAASKVNGWIFGTFLCKVVSLLKEVNFYSGILLLACISVDRYLAIVHATRTLTQKRHLVKFVCLGCWGLSMNLSLPFFLFRQAYHPNNSSPVCYEVLGNDTAKWRMVLRILPHTFGFIVPLFVMLFCYGFTLRTLFKAHMGQKHRAMRVIFAVVLIFLLCWLPYNLVLLADTLMRTQVIQESCERRNNIGRALDATEILGFLHSCLNPIIYAFIGQNFRHGFLKILAMHGLVSKEFLARHRVTSYTSSSVNVSSNL

SEQ ID NO: 14055 - protein, 294 aa, Artificial Sequence
  derived and/or modified sequence
MSNITDPQMWDFDDLNFTGMPPADEDYSPCMLETETLNKYVVIIAYALVFLLSLLGNSLVMLVILYSRVGRSVTDVYLLNLAIVHATRTLTQKRHLVKFVCLGCWGLSMNLSLPFFLFRQAYHPNNSSPVCYEVLGNDTAKWRMVLRILPHTFGFIVPLFVMLFCYGFTLRTLFKAHMGQKHRAMRVIFAVVLIFLLCWLPYNLVLLADTLMRTQVIQESCERRNNIGRALDATEILGFLHSCLNPIIYAFIGQNFRHGFLKILAMHGLVSKEFLARHRVTSYTSSSVNVSSNL

SEQ ID NO: 14056 - DNA, 1053 bp, Artificial Sequence
  derived and/or modified sequence
atgtccaacattacggacccacagatgtgggattttgacgatcttaattttaccggcatgccgcccgcagatgaggactattctccttgcatgttggaaacagagactctgaacaagtacgtggtgattatcgcctatgccctggtgttcctactgtcacttctgggaaatagcttggtgatgctggtgatactgtactctagagtaggtcggtccgtgaccgacgtgtaccttctgaacctggcgcttgcggacctcctgtttgcactcactctgcccatttgggcagcatccaaagttaacggctggatctttggaaccttcctctgcaaggttgtcagcttgttaaaggaggttaatttctattctgggatactactgttggcctgcatctccgtggatcggtacctcgctattgtgcatgcgactcgcacactgacgcagaagagacacctagtcaagttcgtgtgcctgggatgctggggtttgagtatgaatttgagcctcccattcttcctttttcgacaggcctatcaccccaacaactcctctcctgtgtgctatgaggtcctcggaaatgacacagccaaatggcgtatggtgctaaggatccttcctcacaccttcggattcatcgtcccactgttcgtaatgctcttttgttacggcttcaccttgcgcactctgtttaaggcccatatgggccagaaacatagagcgatgcgcgtgatcttcgccgttgttctcatctttttgttgtgctggctgccatacaatcttgtgctgttagcagacactctgatgaggactcaggtgattcaagagagctgtgaaaggaggaacaatattggccgcgccctcgacgcgacggagatcctgggctttttgcatagttgcctgaatccaatcatttatgcttttattggccagaactttcggcatgggttcttgaagattctggccatgcacggactcgtaagtaaggagtttctggcccgacaccgagtgactagttacacttccagctctgtgaacgtatcatcgaatttgtag

SEQ ID NO: 14057 - DNA, 885 bp, Artificial Sequence
  derived and/or modified sequence
atgagcaacattactgatccccagatgtgggacttcgacgatctcaacttcacggggatgcctcctgctgacgaggactatagcccgtgtatgctggaaactgagactctgaataaatacgtagtcatcatcgcctacgctctggtgttcttactcagtctgctcggaaactctcttgtgatgctcgtgattctctactcaagggtgggcaggagtgtgaccgatgtgtacctactgaacctggccatcgtccacgctactcggaccctgacgcagaaacggcatctcgttaaattcgtttgcttaggctgctgggggttaagcatgaaccttagtcttcctttcttcctcttccgccaggcttaccacccaaacaatagttcgcctgtatgctacgaggtactgggtaatgacactgcaaaatggcgaatggtgctgcgcatcttgccgcatacctttggctttatagtgcccctttttgtgatgctgttctgttatggctttaccctgcgcaccctctttaaggcacacatgggccaaaagcatagagctatgagagtaatctttgcagtggtgctgatcttcctgctgtgctggctgccttacaaccttgtgctgctggctgacactctcatgcgcacccaagtgatccaagagtcttgcgaacgacgcaataacatcggacgcgcactagatgccaccgaaatccttgggttcctccactcatgccttaaccccattatatacgcattcattggtcagaacttccgacatggctttcttaagatcctggcaatgcatgggctggtttccaaggagttcttagcccgtcatcgggtcacgtcatacacctcctcttctgtgaacgtctcatccaacctttag

SEQ ID NO: 14058 - DNA, 1053 bp, Artificial Sequence
  derived and/or modified sequence
atgagcaacatcacagacccccagatgtgggactttgatgacctgaacttcaccggcatgcccccagcagatgaggactacagcccctgcatgctggagacagagaccctgaacaagtatgtggtgatcatcgcctatgccctggtgttcctgctgagcctgctgggcaacagcctggtgatgctggtgatcctgtacagccgggtgggccgctctgtgacagatgtgtacctgctgaacctggccctggccgacctgctgtttgccctgaccctgcccatctgggccgccagcaaggtgaatggctggatcttcggcaccttcctgtgcaaggtggtgtccctgctgaaggaggtgaacttctacagcggcatcctgctgctggcctgcatctctgtggaccgctacctggccatcgtgcacgccaccaggaccctgacccagaagaggcacctggtgaagtttgtgtgcctgggctgctggggcctgtccatgaacctgagcctgcccttcttcctgttccggcaggcctaccaccccaacaacagcagccctgtgtgctatgaggtgctgggcaatgacacagccaagtggaggatggtgctgcgcatcctgccccacaccttcggcttcatcgtgcccctgtttgtgatgctgttctgctacggcttcaccctgcggaccctcttcaaggcccacatgggccagaagcaccgggccatgagggtcatctttgctgtggtgctgatcttcctgctgtgctggctgccctacaacctggtgctgctggccgacaccctgatgaggacccaggtgatccaggagagctgtgaaagaagaaacaacatcggccgggccctggatgccacagagatcctgggcttcctgcacagctgcctgaaccccatcatctatgccttcatcggccagaacttccgccacggcttcctgaagatcctggccatgcacggcctggtgtccaaggagttcctggcccggcaccgggtgaccagctacaccagcagctctgtgaatgtgagcagcaacctgtag

SEQ ID NO: 14059 - DNA, 885 bp, Artificial Sequence
  derived and/or modified sequence
atgagcaacatcacagacccccagatgtgggactttgatgacctgaacttcaccggcatgcccccagcagatgaggactacagcccctgcatgctggagacagagaccctgaacaagtatgtggtgatcatcgcctatgccctggtgttcctgctgagcctgctgggcaacagcctggtgatgctggtgatcctgtacagccgggtgggccgctctgtgacagatgtgtacctgctgaacctggccatcgtgcacgccaccaggaccctgacccagaagaggcacctggtgaagtttgtgtgcctgggctgctggggcctgtccatgaacctgagcctgcccttcttcctgttccggcaggcctaccaccccaacaacagcagccctgtgtgctatgaggtgctgggcaatgacacagccaagtggaggatggtgctgcgcatcctgccccacaccttcggcttcatcgtgcccctgtttgtgatgctgttctgctacggcttcaccctgcggaccctcttcaaggcccacatgggccagaagcaccgggccatgagggtcatctttgctgtggtgctgatcttcctgctgtgctggctgccctacaacctggtgctgctggccgacaccctgatgaggacccaggtgatccaggagagctgtgaaagaagaaacaacatcggccgggccctggatgccacagagatcctgggcttcctgcacagctgcctgaaccccatcatctatgccttcatcggccagaacttccgccacggcttcctgaagatcctggccatgcacggcctggtgtccaaggagttcctggcccggcaccgggtgaccagctacaccagcagctctgtgaatgtgagcagcaacctgtag

SEQ ID NO: 14060 - DNA, 1053 bp, Artificial Sequence
  derived and/or modified sequence
atgagcaacatcaccgacccccagatgtgggacttcgacgacctgaattttactggtatgcccccagccgacgaagactactcaccctgcatgctagaaactgaaaccctcaataaatacgtggtgataatcgcgtacgctctggtgttcctgctgagcttattgggcaattctctggttatgctggtcatcctttactcgagggtggggcggtctgtgactgacgtttacctgttaaacctggcactggccgatctcctgttcgctctaaccctcccaatctgggccgccagcaaggtgaacggatggatctttggaacttttctctgtaaagtggtgagcctgctgaaagaggttaacttttatagcggcattctcttactggcctgtataagcgtcgaccgttacctggccatcgtccacgcgactcgcacacttacccaaaagaggcacctcgtcaaatttgtttgcttggggtgttggggactgagtatgaatctttcgctgccctttttcttgttccgccaggcttaccatccaaacaactcgtctccggtctgctatgaagtcctcggaaacgacacagccaagtggcgtatggtcttacggatcctcccacacacttttggcttcattgtccctctattcgtcatgctgttttgctatggattcactctgaggactctatttaaggcccacatgggccagaagcaccgcgccatgcgcgtcatcttcgccgtagtgctcatttttcttctctgttggctgccatacaatcttgtgcttcttgccgacactctaatgcgcacccaggtgattcaagaatcctgcgaaaggagaaacaacatcggacgtgcactggacgcaacggagatcttaggattcctccacagttgtttgaaccccatcatctatgcttttatcgggcagaactttagacatggatttttaaaaatcttggccatgcatggcctcgtgtcaaaagaattcctggcccggcaccgcgtgacttcttatacttcctctagcgtgaacgtgtcttccaacttatag

SEQ ID NO: 14061 - DNA, 885 bp, Artificial Sequence
  derived and/or modified sequence
atgagcaacatcaccgacccccagatgtgggacttcgacgacctgaatttcaccgggatgccaccagcagacgaagactatagcccttgtatgctcgagaccgagactctaaataagtacgtggtgattattgcctacgccctggtattcctcttatctttgttgggcaactcactggtgatgctggtcattctctattctcgggttgggcggagtgtcaccgacgtgtatttgctaaatctagccattgtccacgcgactcgcactctcacgcagaagcgccacttggtaaagttcgtgtgccttggatgctggggactgagcatgaatttgtctctgccctttttcctcttcagacaggcataccaccccaacaactcttcacccgtttgctatgaggttctggggaatgacaccgccaaatggaggatggtactgaggattttgccccatactttcggcttcattgttcccttatttgtgatgctcttctgttacggattcacactcagaaccctgttcaaggcacatatggggcaaaaacaccgcgcaatgagggtcatcttcgccgtagtcttgatctttttattgtgttggctaccctataatctcgtcctgctggcagatacgcttatgaggacgcaggtcatccaagagtcctgtgagagaaggaacaatattggcagggcgcttgatgctaccgagatcctcggattcctgcactcatgtctaaatccgattatctacgcttttattggccagaacttccgccacggttttttaaaaattctggcgatgcacggactggtatcaaaggaattccttgcccgccaccgcgtaacatcctatactagcagctctgtgaacgtgtcatccaacctctag

SEQ ID NO: 14062 - DNA, 1053 bp, Artificial Sequence
  derived and/or modified sequence
atgtctaacatcacagacccacagatgtgggatttcgatgatcttaattttacgggcatgccgcctgctgacgaagactactctccctgtatgttggaaaccgaaaccctaaacaaatatgttgtaatcatcgcttacgccttggtgtttctgttgagcctcctgggcaattctctggtaatgctggttattttgtattcaagggtgggacgctcagtgacagacgtttatctgctgaatctggctctcgctgacctcttgtttgccctgactctgcccatttgggccgcttcgaaggtcaacggctggatatttggaacttttctctgtaaagtggtctccttgctcaaggaagttaatttctacagtgggattctcctcctggcatgtatctcagtcgataggtacctggctatcgtacatgccacccgtaccctcactcaaaagaggcacttggtgaaatttgtatgtctcggatgctgggggctttcaatgaacctgtccttacctttctttctgttccggcaggcataccatcctaataactcttcccctgtctgttacgaagtcctggggaatgatacagccaagtggagaatggtgttacgcatcttgccccacacctttggatttatcgttccccttttcgtcatgctcttttgttacggtttcacgctgcgcactctgttcaaggcccacatgggccagaagcacagagcaatgagagtgatctttgctgtggtactgatctttctgttgtgctggctgccatacaacttggtgctgctcgccgatacgcttatgcggactcaggtaatacaggaaagctgcgaaaggcgtaacaacatcggcagggctctggacgcgacagagatccttggattcctgcatagttgtctcaaccctatcatctatgctttcattggccagaattttaggcatgggtttctcaagatcctcgccatgcacgggttagtgtccaaagaattcctcgccagacacagggtgacctcttacacctcttcatccgtaaatgttagctcaaatctatag

SEQ ID NO: 14063 - DNA, 885 bp, Artificial Sequence
  derived and/or modified sequence
atgtctaacatcactgacccacagatgtgggatttcgacgacctgaactttacaggtatgccacctgcagacgaggattactcaccctgtatgctggaaacagagacactgaacaagtacgtcgtgatcatcgcgtatgccttggtttttctcctctctcttttggggaactcactcgtgatgctggtcatattgtacagcagagtggggaggagcgtcaccgacgtgtatctcttaaaccttgccatcgtgcatgcaacaagaactctgacccagaaaaggcacctggtgaaattcgtatgcctgggatgctggggtttgtctatgaatcttagtctgccttttttcctgtttaggcaggcttatcatccaaacaactccagcccggtctgctacgaagttctaggtaacgacacggcaaaatggcgaatggtacttcggatccttcctcacaccttcggcttcattgtgcccttattcgtgatgcttttctgctacgggttcacactgagaacactcttcaaagcacatatgggccagaagcacagggctatgagggtgatcttcgctgtagtattgatcttcctcttgtgttggctgccctacaacctggtgctgctggcagataccctcatgaggactcaggtgattcaggagagttgtgagcgcaggaataatattggtagagcgctcgacgctacagaaattctcggcttcctgcattcctgcctgaatccaatcatctatgctttcatcggacaaaactttcgtcacggattcctaaagatactagccatgcacggccttgtgtctaaagagttcctcgccagacaccgggtgaccagttacacgagcagtagtgtgaacgtgtcgagcaacctctag

SEQ ID NO: 14064 - DNA, 2488 bp, Artificial Sequence
  derived and/or modified sequence
tttattcatcaagtgccctctagctgttaagtcactctgatctctgactgcagctcctactgttggacacacctggccggtgcttcagttagatcaaaccattgctgaaactgaagaggacatgtcaaatattacagatccacagatgtgggattttgatgatctaaatttcactggcatgccacctgcagatgaagattacagcccctgtatgctagaaactgagacactcaacaagtatgttgtgatcatcgcctatgccctagtgttcctgctgagcctgctgggaaactccctggtgatgctggtcatcttatacagcagggtcggccgctccgtcactgatgtctacctgctgaacctggccttggccgacctactctttgccctgaccttgcccatctgggccgcctccaaggtgaatggctggatttttggcacattcctgtgcaaggtggtctcactcctgaaggaagtcaacttctacagtggcatcctgctgttggcctgcatcagtgtggaccgttacctggccattgtccatgccacacgcacactgacccagaagcgtcacttggtcaagtttgtttgtcttggctgctggggactgtctatgaatctgtccctgcccttcttccttttccgccaggcttaccatccaaacaattccagtccagtttgctatgaggtcctgggaaatgacacagcaaaatggcggatggtgttgcggatcctgcctcacacctttggcttcatcgtgccgctgtttgtcatgctgttctgctatggattcaccctgcgtacactgtttaaggcccacatggggcagaagcaccgagccatgagggtcatctttgctgtcgtcctcatcttcctgctttgctggctgccctacaacctggtcctgctggcagacaccctcatgaggacccaggtgatccaggagagctgtgagcgccgcaacaacatcggccgggccctggatgccactgagattctgggatttctccatagctgcctcaaccccatcatctacgccttcatcggccaaaattttcgccatggattcctcaagatcctggctatgcatggcctggtcagcaaggagttcttggcacgtcatcgtgttacctcctacacttcttcgtctgtcaatgtctcttccaacctctgaaaaccatcgatgaaggaatatctcttctcagaaggaaagaataaccaacaccctgaggttgtgtgtggaaggtgatctggctctggacaggcactatctgggttttggggggacgctataggatgtggggaagttaggaactggtgtcttcaggggccacaccaaccttctgaggagctgttgaggtacctccaaggaccggcctttgcacctccatggaaacgaagcaccatcattcccgttgaacgtcacatctttaacccactaactggctaattagcatggccacatctgagccccgaatctgacattagatgagagaacagggctgaagctgtgtcctcatgagggctggatgctctcgttgaccctcacaggagcatctcctcaactctgagtgttaagcgttgagccaccaagctggtggctctgtgtgctctgatccgagctcaggggggtggttttcccatctcaggtgtgttgcagtgtctgctggagacattgaggcaggcactgccaaaacatcaacctgccagctggccttgtgaggagctggaaacacatgttccccttgggggtggtggatgaacaaagagaaagagggtttggaagccagatctatgccacaagaaccccctttacccccatgaccaacatcgcagacacatgtgctggccacctgctgagccccaagtggaacgagacaagcagcccttagcccttcccctctgcagcttccaggctggcgtgcagcatcagcatccctagaaagccatgtgcagccaccagtccattgggcaggcagatgttcctaataaagcttctgttccgtgcttgtccctgtggaagtatcttggttgtgacagagtcaagggtgtgtgcagcattgttggctgttcctgcagtagaatgggggcagcacctcctaagaaggcacctctctgggttgaagggcagtgttccctggggctttaactcctgctagaacagtctcttgaggcacagaaactcctgttcatgcccatacccctggccaaggaagatccctttgtccacaagtaaaaggaaatgctcctccagggagtctcagcttcaccctgaggtgagcatcatcttctgggttaggccttgcctaggcatagccctgcctcaagctatgtgagctcaccagtccctccccaaatgctttccatgagttgcagttttttcctagtctgttttccctccttggagacagggccctgtcggtttattcactgtatgtccttggtgcctggagcctactaaatgctcaataaataatgatcacaggaa

SEQ ID NO: 14065 - DNA, 1402 bp, Artificial Sequence
  derived and/or modified sequence
atttccgtttattcatcaagtgccctctagctgttaagtcactctgatctctgactgcagctcctactgttggacacacctggccggtgcttcagttagatcaaaccattgctgaaactgaagaggacatgtcaaatattacagatccacagatgtgggattttgatgatctaaatttcactggcatgccacctgcagatgaagattacagcccctgtatgctagaaactgagacactcaacaagtatgttgtgatcatcgcctatgccctagtgttcctgctgagcctgctgggaaactccctggtgatgctggtcatcttatacagcagggtcggccgctccgtcactgatgtctacctgctgaacctggccattgtccatgccacacgcacactgacccagaagcgtcacttggtcaagtttgtttgtcttggctgctggggactgtctatgaatctgtccctgcccttcttccttttccgccaggcttaccatccaaacaattccagtccagtttgctatgaggtcctgggaaatgacacagcaaaatggcggatggtgttgcggatcctgcctcacacctttggcttcatcgtgccgctgtttgtcatgctgttctgctatggattcaccctgcgtacactgtttaaggcccacatggggcagaagcaccgagccatgagggtcatctttgctgtcgtcctcatcttcctgctttgctggctgccctacaacctggtcctgctggcagacaccctcatgaggacccaggtgatccaggagagctgtgagcgccgcaacaacatcggccgggccctggatgccactgagattctgggatttctccatagctgcctcaaccccatcatctacgccttcatcggccaaaattttcgccatggattcctcaagatcctggctatgcatggcctggtcagcaaggagttcttggcacgtcatcgtgttacctcctacacttcttcgtctgtcaatgtctcttccaacctctgaaaaccatcgatgaaggaatatctcttctcagaaggaaagaataaccaacaccctgaggttgtgtgtggaaggtgatctggctctggacaggcactatctgggttttggggggacgctataggatgtggggaagttaggaactggtgtcttcaggggccacaccaaccttctgaggagctgttgaggtacctccaaggaccggcctttgcacctccatggaaacgaagcaccatcattcccgttgaacgtcacatctttaacccactaactggctaattagcatggccacatctgagccccgaatctgacattagatgagagaacagggctgaagctgtgtcctcatgagggctggatgctctcgttgaccctcacaggagcatctcctc

SEQ ID NO: 14066 - DNA, 1053 bp, Artificial Sequence
  derived and/or modified sequence
atgagcaacatcaccgacccccagatgtgggacttcgacgacctgaacttcaccggcatgccccccgccgacgaggactacagcccctgcatgctggagaccgagaccctgaacaagtacgtggtgatcatcgcctacgccctggtgttcctgctgagcctgctgggcaacagcctggtgatgctggtgatcctgtacagcagagtgggcagaagcgtgaccgacgtgtacctgctgaacctggccctggccgacctgctgttcgccctgaccctgcccatctgggccgccagcaaggtgaacggctggatcttcggcaccttcctgtgcaaggtggtgagcctgctgaaggaggtgaacttctacagcggcatcctgctgctggcctgcatcagcgtggacagatacctggccatcgtgcacgccaccagaaccctgacccagaagagacacctggtgaagttcgtgtgcctgggctgctggggcctgagcatgaacctgagcctgcccttcttcctgttcagacaggcctaccaccccaacaacagcagccccgtgtgctacgaggtgctgggcaacgacaccgccaagtggagaatggtgctgagaatcctgccccacaccttcggcttcatcgtgcccctgttcgtgatgctgttctgctacggcttcaccctgagaaccctgttcaaggcccacatgggccagaagcacagagccatgagagtgatcttcgccgtggtgctgatcttcctgctgtgctggctgccctacaacctggtgctgctggccgacaccctgatgagaacccaggtgatccaggagagctgcgagagaagaaacaacatcggcagagccctggacgccaccgagatcctgggcttcctgcacagctgcctgaaccccatcatctacgccttcatcggccagaacttcagacacggcttcctgaagatcctggccatgcacggcctggtgagcaaggagttcctggccagacacagagtgaccagctacaccagcagcagcgtgaacgtgagcagcaacctgtag

SEQ ID NO: 14067 - DNA, 885 bp, Artificial Sequence
  derived and/or modified sequence
atgagcaacatcaccgacccccagatgtgggacttcgacgacctgaacttcaccggcatgccccccgccgacgaggactacagcccctgcatgctggagaccgagaccctgaacaagtacgtggtgatcatcgcctacgccctggtgttcctgctgagcctgctgggcaacagcctggtgatgctggtgatcctgtacagcagagtgggcagaagcgtgaccgacgtgtacctgctgaacctggccatcgtgcacgccaccagaaccctgacccagaagagacacctggtgaagttcgtgtgcctgggctgctggggcctgagcatgaacctgagcctgcccttcttcctgttcagacaggcctaccaccccaacaacagcagccccgtgtgctacgaggtgctgggcaacgacaccgccaagtggagaatggtgctgagaatcctgccccacaccttcggcttcatcgtgcccctgttcgtgatgctgttctgctacggcttcaccctgagaaccctgttcaaggcccacatgggccagaagcacagagccatgagagtgatcttcgccgtggtgctgatcttcctgctgtgctggctgccctacaacctggtgctgctggccgacaccctgatgagaacccaggtgatccaggagagctgcgagagaagaaacaacatcggcagagccctggacgccaccgagatcctgggcttcctgcacagctgcctgaaccccatcatctacgccttcatcggccagaacttcagacacggcttcctgaagatcctggccatgcacggcctggtgagcaaggagttcctggccagacacagagtgaccagctacaccagcagcagcgtgaacgtgagcagcaacctgtag

SEQ ID NO: 14068 - protein, 723 aa, Artificial Sequence
  derived and/or modified sequence
MQNSEGGADSPASVALRPSAAAPPVPASPQRVLVQAASSNPKGAQMQPISLPRVQQVPQQVQPVQHVYPAQVQYVEGGDAVYTNGAIRTAYTYNPEPQMYAPSSTASYFEAPGGAQVTVAASSPPAVPSHSMVGITMDVGGSPIVSSAGAYLIHGGMDSTRHSLAHTSRSSPATLEMAIENLQKSEGITSHKSGLLNSHLQWLLDNYETAEGVSLPRSSLYNHYLRHCQEHKLDPVNAASFGKLIRSVFMGLRTRRLGTRGNSKYHYYGIRLKPDSPLNRLQEDTQYMAMRQQPMHQKPRYRPAQKTDSLGDSGSHSGLHSTPEQTMAVQSQHHQQYIDVSHVFPEFPAPDLGSFLLQDGVTLHDVKALQLVYRRHCEATVDVVMNLQFHYIEKLWLSFWNSKASSSDGPTSLPASDEDPEGAVLPKDKLISLCQCDPILRWMRSCDHILYQALVEILIPDVLRPVPSTLTQAIRNFAKSLEGWLTNAMSDFPQQVIQTKVGVVSAFAQTLRRYTSLNHLAQAARAVLQNTSQINQMLSDLNRVDFANVQEQASWVCQCEESVVQRLEQDFKLTLQQQSSLDQWASWLDSVVTQVLKQHAGSPSFPKAARQFLLKWSFYSSMVIRDLTLRSAASFGSFHLIRLLYDEYMFYLVEHRVAEATGETPIAVMGEFNDLASLSLTLLDKDDMGDEQRGSEAGPDARSLGEPLVKRERSDPNHSLQGI

SEQ ID NO: 14069 - DNA, 4114 bp, Artificial Sequence
  derived and/or modified sequence
gcgagcgtgggcgggccgttaggaaggtggggcgcggagcctggtaaccgttgccggtaacaacgccccgccccgtcgggcgggcgggctgcgcgaggctggctggcggcgggagccggaggaggagcggccgccgccgccaccgccgccgccatagagactgtagccgtggagactgttacttaccaacggggaccaacacgcagcagccgctgccgccgccgcgggagccgctgcccgaactcccggcccgaactccagacctgagcatgcagaattccgagggtggagcggattcgccagcgtccgtggctctgcgtccctcggcggcagccccgcctgtgccagcctccccgcagagggtgttggtccaggcagccagctccaatcccaaaggggcccagatgcagccgatctccctccccagagttcagcaggtaccccagcaggtgcagccggtgcagcacgtgtatcctgcccaggtgcagtacgtggaagggggagacgccgtctacaccaatggagccatacgaacagcctacacctacaaccccgagcctcagatgtacgcccccagcagcacggcttcttacttcgaggccccaggcggtgcccaggtgaccgtggcagcctcgtccccgccagcggtcccctcccacagcatggtgggcatcaccatggatgtcggggggagccccatcgtctccagcgcgggagcctatctcatccacggggggatggacagcaccagacactccctggcccacacctcccgctcatcgcccgccacgcttgaaatggcgattgaaaacctccaaaaaagcgaaggaatcacatcacacaaaagcggtttactcaacagccatctccagtggctgttggataattatgaaacagcggaaggtgtgagtctccccagaagttctctttacaaccactaccttcggcactgccaggagcacaagctagacccagtgaacgccgcctccttcgggaaactgatccgttctgtgtttatggggctgagaacgcggcggctgggcaccaggggcaactcgaagtaccattactatgggattcgtctgaagccggactcaccactgaaccggctgcaggaggacacgcagtacatggccatgcggcagcagcccatgcaccagaagcccaggtaccggccagcccagaagacggacagcctcggggacagcggctcccacagcggcctgcacagcactccggaacagaccatggccgtgcagagccagcaccaccagcagtacatagatgtctcccacgtcttccccgagttcccagcgcccgacctgggcagcttcctgctgcaggacggcgtcacactgcacgacgtcaaggccctgcagctggtgtacagacggcactgcgaggcaactgtagatgtggtgatgaacctccagttccactacatcgagaagctgtggctctccttctggaactctaaggcctcctccagcgacggccccacctctcttcctgccagtgacgaagaccccgagggcgccgtcctgcccaaggacaagcttatctccctgtgtcagtgcgaccccatcctcaggtggatgaggagctgcgaccacatcctctaccaggcgctggtggagattctcatccccgacgtgctgaggccggtccccagtaccttgacacaggccatccgtaactttgccaagagcttggaaggctggttgacaaatgccatgagtgacttcccacaacaggtcatccagaccaaggtgggcgtcgtcagtgccttcgcccagacgctgcggcgctacacgtccctcaaccacctggcgcaggcggcccgggcggtgctgcagaacacgtcccagatcaaccagatgctcagcgacctcaaccgcgtggactttgccaacgtgcaggagcaggcctcgtgggtgtgccagtgcgaggagagtgtggtgcagcggctggagcaggatttcaagctgaccctgcagcagcagagctccctggaccagtgggccagctggctggacagtgtggtcacccaggtcctgaagcagcatgccggcagccccagcttccccaaggccgcccggcagttcttgctgaaatggtccttttacagctccatggtgatccgggacctgaccctgcgcagcgctgccagcttcggctccttccacctcatccgcctgctctacgacgagtacatgttctacctggtggagcaccgcgtcgcggaggccaccggagagacgccgatcgctgtgatgggagagttcaacgatctcgcctctctgtcgctgacgctgctcgacaaagatgacatgggcgatgagcagcgtggcagcgaggcgggcccagacgcccgcagcctgggtgagcccctggtaaagcgggagcgcagtgaccccaaccactccctgcagggcatctagcagccccggccggcgcctcctcgaggttccaaaagatgccgcctggtcactctgggaacctggatttcaccggctccaccaaattagtgcctcttagatgatgtgatgtttactttgactcaagcgggggctcccggggtcagtgttcaagaaggaaagcagttgttgaagctacagaagcccaggccagggctcccactggctgtagctgtgctctgggtccccaggtccctgcgcagccaccagggccccaccagaccatgggttccttattctggacaaaccctcctctgctggaaccctggactttggccccagtccctttaagagctgaaagggctgtgctgagagcactggcctctgcactcaactggaaccaattttcaccatgattttaaaaattaaaaaaacctggcagagcccgactagaaagggacggcctctcccctcctacctgccaccgctggggaggcacagagctcgccagcgtccctggagtcccctcaggaatggaaagtggagtgcccttgtctggtagcaccatgtgggagggacccagctgggcgcagcgccctgtggccttttagatccagacctccctgccggatgccccgaggcgggaggccggctgtgctgcaggaacccatctccagatgccaaaggacttgaggggcagctgacaatcgctgtgtcccggcagatccgcagctcgaaaaagaacaagccacagaaacgggctcgctcgtgccaggacacagcagtgtctttcaaaaaatcaaaaccagaagttttatcagcagcaggaaggatgtgggactctgtccaagttcaccgtcaccatcaagccactggctgtggaaggagtttgtccaacagggtcagtgtcacagccacaacttcagaaagcagccatcccgcgtgtcgtccaaacagcagtgcctgcgtcccgctccacggagtcttccagaacacctccctctgaactaatcccggagcaccccacccccagcgagtcccacctggacctcttcaaagtcaaaactcttctctcgggacaaacaaatattcgggactttcgaagccctgaacttgagacaccaagtttgtctccatggaaacacgtagccgctgcagttggacagctgcgtgctggagttctgtccccaaaccaactgcagagaagaaagacgagcctcggcccaggacgcgatttctaacgaaatgcaatagttttctctttttggaaaaatgtttataccaatagttttgtgcgctaattgttattagaacgtttcttatgaatgtgtacattgcagtatattcagtcccaaatgttttgttctcattcacacagaaggtactaatgtcagctcacgtggcctttaaaaacctacttccccgcccgcaggagctcagagcatcgctgggcctgcgccagagtgaggggtgcaggaagacaaagacgcgtgctcactttagaaacgaaaagctgggaataatcacactgtttgtctggtcgtatagcccaaaccttagttgaaatcagacagaaagaatgtctttaaaatatacatctcctctccttggagacactgaagctcacagttaacggattgtaatgcccggcttttcctcactcctggtaaccaatacaagctggtttctgccttaaa

SEQ ID NO: 14070 - DNA, 2172 bp, Artificial Sequence
  derived and/or modified sequence
atgcagaattctgaagggggagcagactcccccgcatctgtggccctgaggccgtcagccgcagctccacccgtccctgctagtccacagcgtgttctcgtccaggcagcctcctctaatcccaagggagcccagatgcaacccatctctctgcctcgggtgcagcaagttccacagcaggtacagcccgttcagcacgtctacccggcacaggtccagtatgtggaggggggagatgccgtctacactaacggagctataaggaccgcctacacctacaaccccgaacctcagatgtacgcaccatcctccaccgcaagctatttcgaggccccaggtggagcacaggttaccgtggcagcctcctctccacccgctgttccaagccactctatggtcgggataacaatggatgtcggcggatctcccattgtttcctcagccggggcatacctcatacacggtgggatggattccaccaggcactcccttgcacacacgagcaggtcgtctcccgccactttggagatggccatcgagaacctccagaagtccgaaggcatcacaagtcataagagcggtcttttgaactcgcatctgcagtggctcctggacaactacgagacggccgagggtgtttcattgcctagatcatcactgtataatcattatctgagacattgtcaggagcataaactggatccggtgaacgccgcttcctttggtaagctcattcgatccgtgttcatggggctgcgaactcggagactgggaacacgcggaaactcaaagtatcattattacgggatcagactgaagccggactcccccctgaataggcttcaggaagacacccagtatatggcgatgagacagcagcccatgcaccagaaacccagataccgccctgcccagaaaactgattcacttggtgattcggggagccattccgggctgcactccacccctgagcagaccatggccgtgcagagccagcatcatcagcagtacatcgatgtctcacatgtttttcctgagttcccagcccccgacctcggatctttcctcttgcaagatggtgtcaccctccatgacgtgaaagcactccaattagtgtaccgcaggcactgtgaagccacagtggatgtggtgatgaacctgcagttccactacatcgagaaactttggctcagcttttggaattctaaggccagctcatcagatggtccgacatccctgccagcaagtgacgaggatcctgagggcgccgtattgccgaaggacaaactgatttcattatgtcagtgtgaccccatcttaaggtggatgcgttcctgcgaccatatcctgtatcaagcactggtcgagattctgatacctgacgtgctgcgccccgtgccgtcaaccctgacacaggcaataaggaatttcgctaagtccctggaagggtggttgaccaacgccatgtctgatttccctcagcaagtgattcagactaaagtgggcgtcgtatccgcttttgcccagaccctccggaggtatacatcactgaatcacctggcacaggcagctagagccgtgctgcagaacacttcacagatcaaccagatgctatccgatttaaacagggtggacttcgccaatgtgcaggagcaagctagctgggtatgccagtgcgaagaaagtgttgtccagaggctcgaacaggactttaagctgaccctgcagcagcagtcctcccttgatcagtgggcttcatggttagactccgtggtgacccaagtgctgaagcagcacgccggctctcccagtttccccaaagccgcccggcaatttctgctcaagtggagtttctattcttccatggtgattagagacctgaccctccgctccgctgcaagcttcggctcctttcatctcatccgccttctgtatgacgagtacatgttttacctggtcgaacaccgcgtcgccgaagccactggagagactccaattgccgtaatgggagagttcaatgacctcgcatccctcagtcttacccttctggacaaggatgacatgggggatgaacagagagggtcagaggccggaccagacgctcgctcgctgggggaacctctggttaagcgcgagaggtctgatcccaatcatagcctccagggcatctag

SEQ ID NO: 14071 - DNA, 2172 bp, Artificial Sequence
  derived and/or modified sequence
atgcagaacagcgagggcggcgctgacagccctgcctctgtggccctgcggcccagcgctgctgcccctcctgtgcctgccagcccccagagggtgctggtgcaggccgccagcagcaaccccaagggggcccagatgcagcccatcagcctgccccgggtgcagcaggtgccccagcaggtgcagcctgtgcagcacgtgtacccagcccaggtgcagtatgtggagggcggagatgctgtgtacaccaacggggccatcagaacagcctacacctacaaccctgagccccagatgtatgcccccagcagcacagccagctactttgaggcccctgggggcgcccaggtgacagtggccgccagcagccccccagctgtgcccagccacagcatggtgggcatcaccatggatgtgggcggcagccccatcgtgtcctctgctggggcctacctgatccacggcggcatggacagcaccaggcacagcctggcccacaccagccgcagcagccctgccaccctggagatggccatcgagaacctgcagaagtctgagggcatcaccagccacaagagcggcctgctgaacagccacctgcagtggctgctggacaactatgaaacagctgagggcgtgtccctgcccaggagcagcctgtacaaccactacctgcggcactgccaggagcacaagctggaccctgtgaatgctgccagctttgggaagctgatccgctctgtgttcatgggcctgcggacccggcggctgggcacccggggcaacagcaagtaccactactacggcatccggctgaagccagacagccccctgaaccggctgcaggaggacacccagtacatggccatgaggcagcagcccatgcaccagaagccccgctacagacctgcccagaagacagacagcctgggggacagcggcagccacagcggcctgcacagcaccccagagcagaccatggctgtgcagagccagcaccaccagcagtacattgatgtgagccacgtgtttcctgagttccctgccccagacctgggcagcttcctgctgcaggatggagtgaccctgcatgatgtgaaggccctgcagctggtgtaccgccgccactgtgaggccaccgtggatgtggtgatgaacctgcagttccactacatcgagaagctgtggctgtccttctggaacagcaaggccagcagcagtgatggccccaccagcctgcctgccagtgatgaggaccctgagggcgctgtgctgcccaaggacaagctgatcagcctgtgccagtgtgaccccatcctgcgctggatgaggagctgtgaccacatcctgtaccaggccctggtggagatcctgatcccagatgtgctgcggcctgtgcccagcaccctgacccaggccatccggaactttgccaagagcctggagggctggctgaccaatgccatgtctgacttcccccagcaggtgatccagaccaaggtgggcgtggtgtctgcctttgcccagaccctgcggcgctacaccagcctgaaccacctggcccaggccgcccgggctgtgctgcagaacaccagccagatcaaccagatgctgagtgacctgaacagagtggactttgccaacgtgcaggagcaggcctcctgggtgtgccagtgtgaggagagcgtggtgcagaggctggagcaggacttcaagctgaccctgcagcagcagagcagcctggaccagtgggcctcctggctggacagcgtggtgacccaggtgctgaagcagcacgccggcagccccagcttccccaaggccgcccggcagttcctgctgaagtggagcttctacagctccatggtgatccgggacctgaccctgcggtctgctgccagctttggcagcttccacctgatccggctgctgtatgatgagtacatgttctacctggtggagcaccgggtggccgaggccactggagagacccccatcgctgtgatgggagagttcaatgacctggccagcctgagcctgaccctgctggacaaggatgacatgggagatgagcagaggggcagcgaggccggcccagatgcccggagcctgggggagcccctggtgaagcgggagaggagtgaccccaaccacagcctgcagggcatctag

SEQ ID NO: 14072 - DNA, 2172 bp, Artificial Sequence
  derived and/or modified sequence
atgcagaacagcgagggcggcgccgacagccccgccagcgtggccctgcgtccatctgcagccgcccccccagtacctgcttccccacaaagggtgctcgtgcaagcggcgagttctaatcctaagggcgcccagatgcaacccatttccttacctcgtgtgcagcaggtccctcagcaggtccagccggtgcaacatgtttatcccgcccaggttcagtacgtcgaggggggtgacgcggtttacacaaatggcgccatccgtaccgcttacacctataatccagaacctcaaatgtacgcaccatcttcgacagccagttattttgaggcccctggaggcgcccaggtgacggtcgccgcatcaagtcctcccgccgtgccctctcacagcatggtggggattactatggacgtcggcgggagccccatcgtaagcagcgctggtgcgtacttaatccacggggggatggactcaacaaggcattcacttgcacatacctcccggagctctccggccacattagagatggcaattgaaaatttgcagaagtcagaagggatcacctctcataagagcggattacttaactcccacctgcagtggctgctggataattatgaaactgcggagggagtgtccctccccaggagctctttgtacaaccactatttgagacattgtcaggaacacaaactggaccccgtcaacgctgccagtttcggtaagctcattcgtagcgtgttcatgggtctgcgtactagaaggttgggcaccagaggaaacagcaaataccactactatggaatacgactgaagccagactcgcccctgaataggctgcaagaggatactcagtacatggcaatgagacagcagcccatgcaccagaaacctaggtaccgcccagcgcagaagacagattccttgggtgacagcggctcacattccggtcttcattccactccggaacagaccatggcggtccaatcacagcaccatcagcaatacatcgatgtgtcccatgttttccccgaatttcctgcacccgacttaggcagtttcctgctgcaggacggcgtgaccttgcacgacgtgaaggcgcttcagctggtttaccgacgacactgcgaagccacagtcgatgtcgtgatgaacttacagttccattatatcgagaagctgtggctgagtttctggaacagcaaggcgagttcaagcgacggacctacttccctgcccgcttccgacgaggatccggagggtgcagtcctcccaaaagacaagctgatcagtctctgtcaatgtgaccctattttgaggtggatgaggtcatgcgaccacatactgtatcaggcccttgtcgaaatcttaatccctgacgtgctgagacccgtgccctcaaccctgacacaggccattcgtaattttgcgaagagtctagagggatggctgacaaatgcaatgtctgacttcccccagcaggtgattcaaacaaaggtaggtgtagtatcagccttcgctcagactctgagacgctacacgtccttgaaccatctagcccaggcagcgagagccgttcttcagaatacaagccagatcaaccaaatgctctcagacctcaacagagtagacttcgcaaatgtccaggaacaggcctcatgggtgtgtcagtgcgaggaaagtgtcgttcaaaggcttgagcaggactttaagctcaccctgcagcagcagtccagcttggatcagtgggctagctggttagactccgtcgtgacccaagtgttaaagcagcatgcagggagtccctccttcccaaaggctgcgcggcagtttttgcttaaatggtctttctactcatctatggtgatacgtgacctgactctgcgcagtgctgcttccttcggctcattccacctcataagacttctgtatgacgaatatatgttttacctggttgaacacagagtcgccgaggccaccggagagacaccaatcgctgtgatgggagagttcaatgatctggcatctctgtccctgactctcttggataaggacgacatgggggatgagcaaaggggaagtgaggcgggtcctgatgcaagatcactcggtgagcccctagtgaaacgggagagatcggaccctaatcacagccttcaggggatctag

SEQ ID NO: 14073 - DNA, 2172 bp, Artificial Sequence
  derived and/or modified sequence
atgcagaatagtgaaggcggtgccgacagccctgcctccgtggccctgcgcccttccgcagccgcaccgcctgtgcctgcttcaccacagcgtgtactcgtccaagcagcttcctccaaccctaagggggctcagatgcaacccattagcctaccaagggtgcagcaggtgcctcaacaggttcaacccgtgcagcacgtttatcctgcccaggtccagtatgttgagggaggggacgcagtttacacgaatggtgccattcggactgcttatacatacaatccggagcctcaaatgtatgccccttcgagtaccgcctcctacttcgaggcccctggtggagctcaagttactgtcgccgcatccagcccgccagcagtcccatcccattctatggtgggtatcacgatggacgttggcggatctccaatcgtgagcagtgccggagcctacctaattcacgggggaatggatagcacccggcactctttggcccacacaagtcggagtagccccgctactctcgagatggcaatagaaaacttacagaaatctgaaggtatcacatcacacaaatctggactgctcaacagccacctacagtggctcctcgacaactatgaaactgcggaaggcgtgtccctgccgagatccagcctttacaatcactacctccgtcactgccaagagcataagctggaccccgtgaatgccgcttcttttggcaaattgattagatcagtatttatggggctgagaacacgtagactgggcactcgcggaaattcaaagtaccactactatggcatcagactgaagcctgactcccctcttaatcgacttcaagaagatacccagtacatggctatgcgccaacaacccatgcaccagaaacctaggtatcgaccggcacaaaagactgactccctaggggatagtggatcccactctgggttacattccactccagagcagaccatggccgtccaatctcagcaccaccagcaatatatcgatgtaagtcacgtgttccccgagttcccagcacccgatctcgggagtttccttctgcaggatggggtaacactgcacgacgtaaaagctctgcagttagtctataggagacactgtgaagcaacagtggacgttgtgatgaacctgcagtttcattacatcgagaaactttggttgagcttctggaattccaaagcatcttcctcagatggaccaacctcattacctgcctcagacgaggaccctgagggtgctgtgttaccaaaggacaaactaatctcgctttgccagtgcgacccaattctgcgctggatgcggtcctgcgatcacatcctttatcaggccctagtcgagatccttatccccgacgttctcaggccagttccctctactctgacacaggccatccgcaactttgccaaatctctggaaggttggctgacgaatgctatgtcagattttccccagcaggtgatccaaactaaggtgggcgtagtgagcgcattcgctcagacactgcgacggtacacttccttaaaccatcttgcccaggctgcaagggctgttctgcagaatacgtcccagatcaatcaaatgttatctgatctaaatagggttgattttgccaacgtgcaagagcaagctagttgggtgtgccagtgcgaggaaagcgtcgtacagaggttggaacaggacttcaagctgactttgcagcaacaatcctctcttgatcagtgggccagttggctagacagcgtcgttacacaggttctcaagcaacatgctggatctccttccttccctaaagctgccagacaatttctattgaagtggtccttctactcttccatggtaattcgggacctgacactgcgctcagcggcttcatttgggagctttcatctcattcgcctgctgtatgatgagtatatgttctatttagtcgagcacagggttgctgaggcaactggtgaaacccccatcgctgttatgggcgagttcaacgatttagcttctctcagcttaactttgctcgacaaggatgacatgggagacgagcaacgcggatccgaggctggtccagatgcccgatctctgggcgaacctttggtcaagagagagagaagcgatccgaaccatagcttgcaggggatctag

SEQ ID NO: 14074 - DNA, 4112 bp, Artificial Sequence
  derived and/or modified sequence
gcgagcgtgggcgggccgttaggaaggtggggcgcggagcctggtaaccgttgccggtaacaacgccccgccccgtcgggcgggcgggctgcgcgaggctggctggcggcgggagccggaggaggagcggccgccgccgccaccgccgccgccatagagactgtagccgtggagactgttacttaccaacggggaccaacacgcagcagccgctgccgccgccgcgggagccgctgcccgaactcccggcccgaactccagacctgagcatgcagaattccgagggtggagcggattcgccagcgtccgtggctctgcgtccctcggcggcagccccgcctgtgccagcctccccgcagagggtgttggtccaggcagccagctccaatcccaaaggggcccagatgcagccgatctccctccccagagttcagcaggtaccccagcaggtgcagccggtgcagcacgtgtatcctgcccaggtgcagtacgtggaagggggagacgccgtctacaccaatggagccatacgaacagcctacacctacaaccccgagcctcagatgtacgcccccagcagcacggcttcttacttcgaggccccaggcggtgcccaggtgaccgtggcagcctcgtccccgccagcggtcccctcccacagcatggtgggcatcaccatggatgtcggggggagccccatcgtctccagcgcgggagcctatctcatccacggggggatggacagcaccagacactccctggcccacacctcccgctcatcgcccgccacgcttgaaatggcgattgaaaacctccaaaaaagcgaaggaatcacatcacacaaaagcggtttactcaacagccatctccagtggctgttggataattatgaaacagcggaaggtgtgagtctccccagaagttctctttacaaccactaccttcggcactgccaggagcacaagctagacccagtgaacgccgcctccttcgggaaactgatccgttctgtgtttatggggctgagaacgcggcggctgggcaccaggggcaactcgaagtaccattactatgggattcgtctgaagccggactcaccactgaaccggctgcaggaggacacgcagtacatggccatgcggcagcagcccatgcaccagaagcccaggtaccggccagcccagaagacggacagcctcggggacagcggctcccacagcggcctgcacagcactccggaacagaccatggccgtgcagagccagcaccaccagcagtacatagatgtctcccacgtcttccccgagttcccagcgcccgacctgggcagcttcctgctgcaggacggcgtcacactgcacgacgtcaaggccctgcagctggtgtacagacggcactgcgaggcaactgtagatgtggtgatgaacctccagttccactacatcgagaagctgtggctctccttctggaactctaaggcctcctccagcgacggccccacctctcttcctgccagtgacgaagaccccgagggcgccgtcctgcccaaggacaagcttatctccctgtgtcagtgcgaccccatcctcaggtggatgaggagctgcgaccacatcctctaccaggcgctggtggagattctcatccccgacgtgctgaggccggtccccagtaccttgacacaggccatccgtaactttgccaagagcttggaaggctggttgacaaatgccatgagtgacttcccacaacaggtcatccagaccaaggtgggcgtcgtcagtgccttcgcccagacgctgcggcgctacacgtccctcaaccacctggcgcaggcggcccgggcggtgctgcagaacacgtcccagatcaaccagatgctcagcgacctcaaccgcgtggactttgccaacgtgcaggagcaggcctcgtgggtgtgccagtgcgaggagagtgtggtgcagcggctggagcaggatttcaagctgaccctgcagcagcagagctccctggaccagtgggccagctggctggacagtgtggtcacccaggtcctgaagcagcatgccggcagccccagcttccccaaggccgcccggcagttcttgctgaaatggtccttttacagctccatggtgatccgggacctgaccctgcgcagcgctgccagcttcggctccttccacctcatccgcctgctctacgacgagtacatgttctacctggtggagcaccgcgtcgcggaggccaccggagagacgccgatcgctgtgatgggagagttcaacgatctcgcctctctgtcgctgacgctgctcgacaaagatgacatgggcgatgagcagcgtggcagcgaggcgggcccagacgcccgcagcctgggtgagcccctggtaaagcgggagcgcagtgaccccaaccactccctgcagggcatctagcagccccggccggcgcctcctcgaggttccaaaagatgccgcctggtcactctgggaacctggatttcaccggctccaccaaattagtgcctcttagatgatgtgatgtttactttgactcaagcgggggctcccggggtcagtgttcaagaaggaaagcagttgttgaagctacagaagcccaggccagggctcccactggctgtagctgtgctctgggtccccaggtccctgcgcagccaccagggccccaccagaccatgggttccttattctggacaaaccctcctctgctggaaccctggactttggccccagtccctttaagagctgaaagggctgtgctgagagcactggcctctgcactcaactggaaccaattttcaccatgattttaaaaattaaaaaaacctggcagagcccgactagaaagggacggcctctcccctcctacctgccaccgctggggaggcacagagctcgccagcgtccctggagtcccctcaggaatggaaagtggagtgcccttgtctggtagcaccatgtgggagggacccagctgggcgcagcgccctgtggccttttagatccagacctccctgccggatgccccgaggcgggaggccggctgtgctgcaggaacccatctccagatgccaaaggacttgaggggcagctgacaatcgctgtgtcccggcagatccgcagctcgaaaaagaacaagccacagaaacgggctcgctcgtgccaggacacagcagtgtctttcaaaaaatcaaaaccagaagttttatcagcagcaggaaggatgtgggactctgtccaagttcaccgtcaccatcaagccactggctgtggaaggagtttgtccaacagggtcagtgtcacagccacaacttcagaaagcagccatcccgcgtgtcgtccaaacagcagtgcctgcgtcccgctccacggagtcttccagaacacctccctctgaactaatcccggagcaccccacccccagcgagtcccacctggacctcttcaaagtcaaaactcttctctcgggacaaacaaatattcgggactttcgaagccctgaacttgagacaccaagtttgtctccatggaaacacgtagccgctgcagttggacagctgcgtgctggagttctgtccccaaaccaactgcagagaagaaagacgagcctcggcccaggacgcgatttctaacgaaatgcaatagttttctctttttggaaaaatgtttataccaatagttttgtgcgctaattgttattagaacgtttcttatgaatgtgtacattgcagtatattcagtcccaaatgttttgttctcattcacacagaaggtactaatgtcagctcacgtggcctttaaaaacctacttccccgcccgcaggagctcagagcatcgctgggcctgcgccagagtgaggggtgcaggaagacaaagacgcgtgctcactttagaaacgaaaagctgggaataatcacactgtttgtctggtcgtatagcccaaaccttagttgaaatcagacagaaagaatgtctttaaaatatacatctcctctccttggagacactgaagctcacagttaacggattgtaatgcccggcttttcctcactcctggtaaccaatacaagctggtttctgcctta

SEQ ID NO: 14075 - DNA, 2172 bp, Artificial Sequence
  derived and/or modified sequence
atgcagaacagcgagggcggcgccgacagccccgccagcgtggccctgagacccagcgccgccgccccccccgtgcccgccagcccccagagagtgctggtgcaggccgccagcagcaaccccaagggcgcccagatgcagcccatcagcctgcccagagtgcagcaggtgccccagcaggtgcagcccgtgcagcacgtgtaccccgcccaggtgcagtacgtggagggcggcgacgccgtgtacaccaacggcgccatcagaaccgcctacacctacaaccccgagccccagatgtacgcccccagcagcaccgccagctacttcgaggcccccggcggcgcccaggtgaccgtggccgccagcagcccccccgccgtgcccagccacagcatggtgggcatcaccatggacgtgggcggcagccccatcgtgagcagcgccggcgcctacctgatccacggcggcatggacagcaccagacacagcctggcccacaccagcagaagcagccccgccaccctggagatggccatcgagaacctgcagaagagcgagggcatcaccagccacaagagcggcctgctgaacagccacctgcagtggctgctggacaactacgagaccgccgagggcgtgagcctgcccagaagcagcctgtacaaccactacctgagacactgccaggagcacaagctggaccccgtgaacgccgccagcttcggcaagctgatcagaagcgtgttcatgggcctgagaaccagaagactgggcaccagaggcaacagcaagtaccactactacggcatcagactgaagcccgacagccccctgaacagactgcaggaggacacccagtacatggccatgagacagcagcccatgcaccagaagcccagatacagacccgcccagaagaccgacagcctgggcgacagcggcagccacagcggcctgcacagcacccccgagcagaccatggccgtgcagagccagcaccaccagcagtacatcgacgtgagccacgtgttccccgagttccccgcccccgacctgggcagcttcctgctgcaggacggcgtgaccctgcacgacgtgaaggccctgcagctggtgtacagaagacactgcgaggccaccgtggacgtggtgatgaacctgcagttccactacatcgagaagctgtggctgagcttctggaacagcaaggccagcagcagcgacggccccaccagcctgcccgccagcgacgaggaccccgagggcgccgtgctgcccaaggacaagctgatcagcctgtgccagtgcgaccccatcctgagatggatgagaagctgcgaccacatcctgtaccaggccctggtggagatcctgatccccgacgtgctgagacccgtgcccagcaccctgacccaggccatcagaaacttcgccaagagcctggagggctggctgaccaacgccatgagcgacttcccccagcaggtgatccagaccaaggtgggcgtggtgagcgccttcgcccagaccctgagaagatacaccagcctgaaccacctggcccaggccgccagagccgtgctgcagaacaccagccagatcaaccagatgctgagcgacctgaacagagtggacttcgccaacgtgcaggagcaggccagctgggtgtgccagtgcgaggagagcgtggtgcagagactggagcaggacttcaagctgaccctgcagcagcagagcagcctggaccagtgggccagctggctggacagcgtggtgacccaggtgctgaagcagcacgccggcagccccagcttccccaaggccgccagacagttcctgctgaagtggagcttctacagcagcatggtgatcagagacctgaccctgagaagcgccgccagcttcggcagcttccacctgatcagactgctgtacgacgagtacatgttctacctggtggagcacagagtggccgaggccaccggcgagacccccatcgccgtgatgggcgagttcaacgacctggccagcctgagcctgaccctgctggacaaggacgacatgggcgacgagcagagaggcagcgaggccggccccgacgccagaagcctgggcgagcccctggtgaagagagagagaagcgaccccaaccacagcctgcagggcatctag

SEQ ID NO: 14076 - protein, 522 aa, Artificial Sequence
  derived and/or modified sequence
MALLPRALSAGAGPSWRRAARAFRGFLLLLPEPAALTRALSRAMACRQEPQPQGPPPAAGAVASYDYLVIGGGSGGLASARRAAELGARAAVVESHKLGGTCVNVGCVPKKVMWNTAVHSEFMHDHADYGFPSCEGKFNWRVIKEKRDAYVSRLNAIYQNNLTKSHIEIIRGHAAFTSDPKPTIEVSGKKYTAPHILIATGGMPSTPHESQIPGASLGITSDGFFQLEELPGRSVIVGAGYIAVEMAGILSALGSKTSLMIRHDKVLRSFDSMISTNCTEELENAGVEVLKFSQVKEVKKTLSGLEVSMVTAVPGRLPVMTMIPDVDCLLWAIGRVPNTKDLSLNKLGIQTDDKGHIIVDEFQNTNVKGIYAVGDVCGKALLTPVAIAAGRKLAHRLFEYKEDSKLDYNNIPTVVFSHPPIGTVGLTEDEAIHKYGIENVKTYSTSFTPMYHAVTKRKTKCVMKMVCANKEEKVVGIHMQGLGCDEMLQGFAVAVKMGATKADFDNTVAIHPTSSEELVTLR

SEQ ID NO: 14077 - protein, 479 aa, Artificial Sequence
  derived and/or modified sequence
MACRQEPQPQGPPPAAGAVASYDYLVIGGGSGGLASARRAAELGARAAVVESHKLGGTCVNVGCVPKKVMWNTAVHSEFMHDHADYGFPSCEGKFNWRVIKEKRDAYVSRLNAIYQNNLTKSHIEIIRGHAAFTSDPKPTIEVSGKKYTAPHILIATGGMPSTPHESQIPGASLGITSDGFFQLEELPGRSVIVGAGYIAVEMAGILSALGSKTSLMIRHDKVLRSFDSMISTNCTEELENAGVEVLKFSQVKEVKKTLSGLEVSMVTAVPGRLPVMTMIPDVDCLLWAIGRVPNTKDLSLNKLGIQTDDKGHIIVDEFQNTNVKGIYAVGDVCGKALLTPVAIAAGRKLAHRLFEYKEDSKLDYNNIPTVVFSHPPIGTVGLTEDEAIHKYGIENVKTYSTSFTPMYHAVTKRKTKCVMKMVCANKEEKVVGIHMQGLGCDEMLQGFAVAVKMGATKADFDNTVAIHPTSSEELVTLR

SEQ ID NO: 14078 - DNA, 1569 bp, Artificial Sequence
  derived and/or modified sequence
atggccctgctgcccagagccctgagcgccggcgccggccccagctggagaagagccgccagagccttcagaggcttcctgctgctgctgcccgagcccgccgccctgaccagagccctgagcagagccatggcctgcagacaggagccccagccccagggccccccccccgccgccggcgccgtggccagctacgactacctggtgatcggcggcggcagcggcggcctggccagcgccagaagagccgccgagctgggcgccagagccgccgtggtggagagccacaagctgggcggcacctgcgtgaacgtgggctgcgtgcccaagaaggtgatgtggaacaccgccgtgcacagcgagttcatgcacgaccacgccgactacggcttccccagctgcgagggcaagttcaactggagagtgatcaaggagaagagagacgcctacgtgagcagactgaacgccatctaccagaacaacctgaccaagagccacatcgagatcatcagaggccacgccgccttcaccagcgaccccaagcccaccatcgaggtgagcggcaagaagtacaccgccccccacatcctgatcgccaccggcggcatgcccagcaccccccacgagagccagatccccggcgccagcctgggcatcaccagcgacggcttcttccagctggaggagctgcccggcagaagcgtgatcgtgggcgccggctacatcgccgtggagatggccggcatcctgagcgccctgggcagcaagaccagcctgatgatcagacacgacaaggtgctgagaagcttcgacagcatgatcagcaccaactgcaccgaggagctggagaacgccggcgtggaggtgctgaagttcagccaggtgaaggaggtgaagaagaccctgagcggcctggaggtgagcatggtgaccgccgtgcccggcagactgcccgtgatgaccatgatccccgacgtggactgcctgctgtgggccatcggcagagtgcccaacaccaaggacctgagcctgaacaagctgggcatccagaccgacgacaagggccacatcatcgtggacgagttccagaacaccaacgtgaagggcatctacgccgtgggcgacgtgtgcggcaaggccctgctgacccccgtggccatcgccgccggcagaaagctggcccacagactgttcgagtacaaggaggacagcaagctggactacaacaacatccccaccgtggtgttcagccacccccccatcggcaccgtgggcctgaccgaggacgaggccatccacaagtacggcatcgagaacgtgaagacctacagcaccagcttcacccccatgtaccacgccgtgaccaagagaaagaccaagtgcgtgatgaagatggtgtgcgccaacaaggaggagaaggtggtgggcatccacatgcagggcctgggctgcgacgagatgctgcagggcttcgccgtggccgtgaagatgggcgccaccaaggccgacttcgacaacaccgtggccatccaccccaccagcagcgaggagctggtgaccctgagatag

SEQ ID NO: 14079 - DNA, 1569 bp, Artificial Sequence
  derived and/or modified sequence
atggctctcctcccccgagcactatcagccggtgccggacctagctggcggcgcgcagcccgggctttccgcgggttcctgttgcttctccccgagcccgcagctctgacaagagcactctccagggccatggcctgtcgacaggaacctcagccacagggtcctcctcccgccgctggggcggtggcttcgtacgattacctcgtgatcggaggcggcagcggagggctcgcctcagcgaggcgtgccgccgagctgggcgcccgtgcagctgtcgtagagagtcataagctcggtgggacatgtgtgaacgtggggtgtgtccctaaaaaggtgatgtggaataccgccgtgcactctgagtttatgcatgatcatgccgattacggctttccttcctgcgaaggaaagtttaactggcgggtgatcaaggaaaagcgggatgcgtacgtcagccgcctcaacgccatctaccagaataatcttactaaatcccatattgaaatcatcagaggtcatgctgcatttacgtctgatcccaagccaactatcgaggttagcggaaagaagtacacggctccacacattctgatcgcgactggggggatgccaagcaccccacatgaaagccagatcccgggagcttctcttggaatcacatccgacggctttttccagctcgaagaacttcccggtaggtctgtgattgtgggggccggttacatagctgtggaaatggctggtatacttagcgctctggggtccaaaaccagcctcatgatcagacatgacaaggtcctccgaagttttgattccatgattagtaccaactgtacagaagaactggagaacgccggcgtggaagtgttgaagttctcacaagtcaaggaggtgaagaaaaccctatcagggctcgaggtgagtatggtgacggctgttcccggtagactgcccgtgatgaccatgatccctgacgtggattgcctgctgtgggccattggacgcgtcccgaacaccaaagacctgtcgctgaacaagctaggaatccagactgacgataaaggccatatcattgtggatgagttccagaataccaatgtcaaaggaatttatgccgtaggcgacgtgtgcggaaaggctttgctgaccccagtggccatagctgccggtaggaagttagcccacaggttgtttgagtataaagaggactcaaaactggactacaacaatattcctactgttgtcttcagccatccacctatcggcacagttggactgacagaagatgaagctatccataaatatggcatcgagaacgttaagacctactcaacttcttttacaccaatgtaccacgctgtcaccaaaaggaagacaaaatgcgtaatgaagatggtctgcgctaacaaggaggagaaggtcgtcggcattcatatgcagggcctgggctgcgacgaaatgctgcaaggcttcgctgtcgccgtaaagatgggagcgactaaagccgacttcgataacactgtggccatacaccccacatccagcgaggagcttgtgacgctgcggtag

SEQ ID NO: 14080 - DNA, 1569 bp, Artificial Sequence
  derived and/or modified sequence
atggccctgctgccccgggccctgtctgctggggccggccccagctggaggagagctgcccgggccttccggggcttcctgctgctgctgcctgagcctgctgccctgacccgggccctgagccgggccatggcctgccggcaggagccccagccccagggccccccacctgctgctggagctgtggccagctatgactacctggtgattggaggcggcagcggcggcctggccagcgccaggagagctgctgagctgggcgcccgggctgctgtggtggagagccacaagctgggcggcacctgtgtgaatgtgggctgtgtgcccaagaaggtgatgtggaacacagctgtgcacagcgagttcatgcatgaccatgctgactatggcttccccagctgtgagggcaagttcaactggagggtcatcaaggagaagagagatgcctacgtgtcccggctgaatgccatctaccagaacaacctgaccaagagccacatcgagatcatccggggccacgccgccttcaccagtgaccccaagcccaccatcgaggtgtctgggaagaagtacacagccccccacatcctgattgccaccggcggcatgcccagcacccctcatgagagccagatccctggggccagcctgggcatcaccagtgatggcttcttccagctggaggagctgcccggccgcagcgtcatcgtgggcgccggctacatcgctgtggagatggccggcatcctgagcgccctgggcagcaagaccagcctgatgatcagacatgacaaggtgctgcggagctttgacagcatgatcagcaccaactgcacagaggagctggagaatgccggcgtggaggtgctgaagttcagccaggtgaaggaggtgaagaagaccctgagcggcctggaggtgtccatggtgacagctgtgcccggccgcctgcctgtgatgaccatgatcccagatgtggactgcctgctgtgggccatcggccgggtgcccaacaccaaggacctgagcctgaacaagctgggcatccagacagatgacaagggccacatcatcgtggatgagttccagaacaccaacgtgaagggcatctatgctgtgggagatgtgtgtgggaaggccctgctgacccctgtggccatcgctgctggcaggaagctggcccaccggctgtttgagtacaaggaggacagcaagctggactacaacaacatccccaccgtggtgttcagccacccccccatcggcaccgtgggcctgacagaagatgaggccatccacaagtatggaattgaaaatgtgaagacctacagcaccagcttcacccccatgtaccacgctgtgaccaagaggaagaccaagtgtgtgatgaagatggtgtgtgccaacaaggaggagaaggtggtgggcatccacatgcagggcctgggctgtgatgagatgctgcagggctttgctgtggccgtgaagatgggcgccaccaaggctgactttgacaacacagtggccatccaccccaccagcagcgaggagctggtgaccctgaggtag

SEQ ID NO: 14081 - DNA, 1569 bp, Artificial Sequence
  derived and/or modified sequence
atggccctgctgccccgggccctgagcgccggcgccggccccagctggagaagggccgcaagggcgttcagaggattcctgctgttattgccagaaccggctgccctgacgcgagcactttcccgcgcaatggcgtgtaggcaggagcctcagccacaagggcccccgcctgctgcgggcgcagttgcgtcctacgattacttagttattggcggaggcagcgggggactcgcctcggctcggcgcgccgctgagctgggcgcgagggcggctgttgttgagtcccataagctgggggggacatgtgttaatgtggggtgcgttccaaagaaggtgatgtggaacaccgccgtgcattctgaatttatgcacgaccatgcagattatggatttccctcatgcgaagggaagtttaactggcgtgtcataaaggaaaaaagagacgcttacgtcagccgcttgaacgcgatctaccaaaacaacctcactaagagtcatatcgaaatcataaggggtcacgccgcgtttacaagtgatcccaaacctaccatcgaggtgtcaggtaaaaaatatacggcaccacacatccttatcgcgaccggcgggatgccgtccacgccccacgaaagccaaattccgggtgcatccttaggaatcacaagcgacggattcttccaattggaagaactgcccggacggagcgttatcgtgggtgccggttatatcgctgtagaaatggcaggtattcttagtgcactcgggtcaaaaacaagtttgatgattagacacgataaagtcctgcgaagttttgactcgatgatcagtacaaactgtaccgaggaactcgagaatgctggagtggaagtgctaaaattctctcaagtgaaggaggtcaagaagaccttgtctggtcttgaggtaagtatggttaccgccgtcccaggccgtctcccagtgatgacaatgatccctgacgtagactgtttactgtgggcaattggccgggttcctaacaccaaggatctgtctttgaacaaactcggcatacagacagatgacaaagggcatatcattgtggacgagtttcagaacacaaacgtgaagggcatctacgcagtgggagacgtctgtggaaaggcactgctcacacctgttgccatcgctgcagggagaaagctggcccacaggcttttcgagtacaaggaagactctaaactggactataataacatccccacagttgtattttctcacccccccattggaactgttggcctcaccgaggacgaagctatccacaagtacgggatcgaaaacgtcaaaacgtactccacatctttcacaccaatgtatcacgcagtgaccaaaagaaagactaagtgcgtaatgaaaatggtatgcgcaaataaggaagagaaggttgtggggatacacatgcaggggttagggtgtgatgagatgctacaaggattcgccgtagccgtgaagatgggcgcaactaaggcagatttcgataatacagtggccatccatccgacatcatctgaggaattggtaactcttcgatag

SEQ ID NO: 14082 - DNA, 1569 bp, Artificial Sequence
  derived and/or modified sequence
atggcgcttctgccacgtgcgctgtcagcaggggctgggccatcctggagacgcgcagcacgcgctttccggggattcctcttactcctacctgaacccgctgccctcaccagggctctgtccagggctatggcgtgcagacaggagccccagccacagggaccccctccagccgcaggggcagtcgccagctatgactatctggtgataggaggcggttcgggagggctggccagtgccagacgggcagctgaattgggagccagggccgctgtcgtggagagtcataaactaggaggtacgtgtgtgaatgtaggatgtgtgccaaaaaaagttatgtggaacactgctgtgcattctgaattcatgcacgaccatgcagattacggctttcccagctgcgagggtaagtttaactggcgcgtgatcaaggagaagcgagacgcttacgtgtctaggctgaatgcaatctatcagaataaccttaccaagtcacatatcgaaataatccgcggacacgcagcctttacctctgaccccaaacctaccattgaagtgtccggcaaaaagtacacggctccccacattctgatcgctacagggggaatgccttctactccccatgaatcacagatacccggtgcctcgctcggcatcacctccgatgggttctttcagctggaggagctccctgggaggtccgttatagtgggcgcaggctatatcgccgttgaaatggcagggatactgtctgccttaggcagcaaaacctctctgatgatccgacatgataaagtgctaagatctttcgatagcatgatctccaccaattgtacagaagagctggagaacgcaggcgttgaggttttgaagttcagccaggtcaaagaggtgaaaaaaacattgtctggcttggaggtgtcaatggtcaccgcggtccctggccgactgccagttatgacaatgattccagacgttgattgcctgctgtgggccatcggacgagttcctaacaccaaagatctgtcgctaaataagctcgggattcagactgacgataagggacacatcatcgtggacgaatttcagaacacaaacgtgaaaggaatctatgcagttggagacgtgtgcggcaaggcactccttacaccagtcgccattgctgcagggcgtaagttggctcaccgcttgttcgaatacaaagaagactctaaactcgattacaataacatccctactgtcgtgttctcccatcctcctatcggaactgtcggtctcactgaggacgaggcgatacacaaatacgggatcgagaacgtgaagacttactctacgagcttcacccccatgtatcacgcggtgacaaagagaaagacgaagtgtgtcatgaagatggtgtgcgccaataaggaggagaaggttgtcgggatccacatgcaggggttgggctgtgatgagatgctccaggggtttgcggttgcggtcaagatgggagccaccaaggcagattttgataacactgtcgcgatccatcccacaagttctgaagagctggtgactcttcggtag

SEQ ID NO: 14083 - DNA, 1440 bp, Artificial Sequence
  derived and/or modified sequence
atggcttgccgccaggaaccccaacctcagggaccaccccctgccgctggagccgttgcctcgtatgactatctggtcatcgggggcgggtccggcggactggccagcgctcgccgggctgcagaattgggagccagggccgccgtcgttgagagccacaaactgggcggcacgtgcgtaaacgtcggttgcgttcccaagaaggttatgtggaacacagcagtccattccgaattcatgcatgaccacgccgactacggctttccaagttgtgagggcaagtttaattggagagttattaaggaaaagagggatgcatatgttagcaggctcaatgcgatctatcagaacaacttaaccaagtctcacattgagattattagggggcacgccgcctttactagcgatcccaaaccaaccatcgaggtgtcaggtaaaaaatacaccgctccccacattctgatcgccaccggaggcatgccctcaactcctcacgaatcccagatcccaggggcaagtttgggcattacatccgacgggtttttccagttggaagagctgcccgggcgctctgtgattgtaggcgcaggttacattgctgttgaaatggcagggatactcagcgccttgggatcaaagacctctttgatgatccggcatgataaggtcttgcgctctttcgacagtatgatttcgaccaattgtaccgaggagttggagaacgcaggtgttgaagtcctcaaattcagccaagtgaaagaggtgaagaagaccctgagcggtttggaagtttccatggttaccgccgtgccagggcgcctgcctgtgatgactatgattcccgacgtggattgcctgttatgggccattggccgggtgcctaacaccaaggacctgagtttgaataaactgggtattcagacagacgacaaagggcacatcatcgtcgatgagtttcagaataccaatgtgaagggaatctacgcagttggtgatgtatgcggaaaggccctgctaacgcctgtggccatcgctgccggtagaaagctggcacaccggcttttcgagtacaaggaagatagtaagctggattataacaatattcccacagtggtcttctcccacccccccattggcactgtcggactaactgaggatgaagccatccacaagtacggtatagagaatgtcaaaacctacagtacttcgtttacaccaatgtatcatgctgttaccaaacggaaaactaaatgtgtcatgaagatggtttgtgcaaacaaagaggaaaaagtggtcgggatacacatgcagggactcggctgtgacgaaatgctgcaaggctttgctgtcgcggtcaagatgggggccaccaaagctgatttcgataataccgtggcaattcatcctacctcttctgaggagctagtgacactccgctag

SEQ ID NO: 14084 - DNA, 3114 bp, Artificial Sequence
  derived and/or modified sequence
gtgaggctgcgcttgcccggggcccgcgcccccctaccccggggaccgcccccgggccgcccgccccacttggcgcgccacttccgcgtgcatggccctgctgccccgagccctgagcgccggcgcgggaccgagctggcggcgggcggcgcgcgccttccgaggcttcctgctgcttctgcccgagcccgcggccctcacgcgcgccctctcccgtgccatggcctgcaggcaggagccgcagccgcagggcccgccgcccgctgctggcgccgtggcctcctatgactacctggtgatcgggggcggctcgggcgggctggccagcgcgcgcagggcggccgagctgggtgccagggccgccgtggtggagagccacaagctgggtggcacttgcgtgaatgttggatgtgtacccaaaaaggtaatgtggaacacagctgtccactctgaattcatgcatgatcatgctgattatggctttccaagttgtgagggtaaattcaattggcgtgttattaaggaaaagcgggatgcctatgtgagccgcctgaatgccatctatcaaaacaatctcaccaagtcccatatagaaatcatccgtggccatgcagccttcacgagtgatcccaagcccacaatagaggtcagtgggaaaaagtacaccgccccacacatcctgatcgccacaggtggtatgccctccacccctcatgagagccagatccccggtgccagcttaggaataaccagcgatggattttttcagctggaagaattgcccggccgcagcgtcattgttggtgcaggttacattgctgtggagatggcagggatcctgtcagccctgggttctaagacatcactgatgatacggcatgataaggtacttagaagttttgattcaatgatcagcaccaactgcacggaggagctggagaacgctggcgtggaggtgctgaagttctcccaggtcaaggaggttaaaaagactttgtcgggcttggaagtcagcatggttactgcagttcccggtaggctaccagtcatgaccatgattccagatgttgactgcctgctctgggccattgggcgggtcccgaataccaaggacctgagtttaaacaaactggggattcaaaccgatgacaagggtcatatcatcgtagacgaattccagaataccaacgtcaaaggcatctatgcagttggggatgtatgtggaaaagctcttcttactccagttgcaatagctgctggccgaaaacttgcccatcgactttttgaatataaggaagattccaaattagattataacaacatcccaactgtggtcttcagccacccccctattgggacagtgggactcacggaagatgaagccattcataaatatggaatagaaaatgtgaagacctattcaacgagctttaccccgatgtatcacgcagttaccaaaaggaaaacaaaatgtgtgatgaaaatggtctgtgctaacaaggaagaaaaggtggttgggatccatatgcagggacttgggtgtgatgaaatgctgcagggttttgctgttgcagtgaagatgggagcaacgaaggcagactttgacaacacagtcgccattcaccctacctcttcagaagagctggtcacacttcgttgagaaccaggagacacgtgtggcgggcagtgggacccatagatcttctgaaatgaaacaaataatcacattgacttactgtttgagttttatgtatttctttattttaatcaggatcttctgatagtggaaatttttagtacataatagaacttatttatggagttagaaatttgtagtgttatccaggattgattttcatttgatcacatctcacagtaattaatattttcaagttttttttttattaacagctctgtgctagttttttttttctgttttagcctcatcccaaatataaagctttgtgaagtacaattaacttaatgtacttgaatgaatagaacttgctactttttttttttttttttttgagacagagttttgctctcattgcccaggctggagtgcggtggtgctatttcagctcaccacaacctctgcctcctgggttcaagtgattctcctgccttagcctcccgaatagctggaattacaggcacgcaccaccatgcctgactaattttgtatttttagtagacatggggtttctccatgttggtcaggctggtctcaaactcccaccttcaggtgatccgcccacctcggcctcctgaggtgctgagattacaggcgtgagccactgtgccagcttgctaattttcacagaagttgatggcaattcttcacatgtaaacagtgccagtgcacagaacctttatatattttttgaagccagtactgtgctctgcatataacaaagctgcttcaaggatgagacctttttctaaaagcatgtaatgtgagaagccggcctgccttattttcttttttcttttttaatgattaaaaatagtttgtggcaaggcacggtggctcaggcctgtaattctagcactttgggaggccgaggcaggaggattacttgagcctacaagtttgaggccagcatgcacagcatagcaagactgcatctctacagagagtaaaaaaaattacccgagtgtggtgatgtgcatctgtaatctcagctacttgggaggctgaggtgagaggatcacttgagcttgggtgaggtgaggctgcagtgagtcctgatcatgctgctgcactcaatcttggacaacagagcaagaccctgtctcaaaaaaaaaaaaaaaaaatatatatatatatatatattatttttatgaggtgaagtgcatcaaacttgggaaagatttgaggaggctgggaacctcctggaaaaccactccttgaagaaagatatgagagacatttagaagtgattcctgctttcagaaggaggtggattcaaatacatcaaaagtcccttcctctgctaagtgtttatagttcaatgaataatttcaatatttgtatgtgttcttgtcattttatttttttctgaaaaacttccaaaaatttgaaaataaaattacagccttttcttctta

SEQ ID NO: 14085 - DNA, 2893 bp, Artificial Sequence
  derived and/or modified sequence
atggcctgcaggcaggagccgcagccgcagggcccgccgcccgctgctggcgccgtggcctcctatgactacctggtgatcgggggcggctcgggcgggctggccagcgcgcgcagggcggccgagctgggtgccagggccgccgtggtggagagccacaagctgggtggcacttgcgtgaatgttggatgtgtacccaaaaaggtaatgtggaacacagctgtccactctgaattcatgcatgatcatgctgattatggctttccaagttgtgagggtaaattcaattggcgtgttattaaggaaaagcgggatgcctatgtgagccgcctgaatgccatctatcaaaacaatctcaccaagtcccatatagaaatcatccgtggccatgcagccttcacgagtgatcccaagcccacaatagaggtcagtgggaaaaagtacaccgccccacacatcctgatcgccacaggtggtatgccctccacccctcatgagagccagatccccggtgccagcttaggaataaccagcgatggattttttcagctggaagaattgcccggccgcagcgtcattgttggtgcaggttacattgctgtggagatggcagggatcctgtcagccctgggttctaagacatcactgatgatacggcatgataaggtacttagaagttttgattcaatgatcagcaccaactgcacggaggagctggagaacgctggcgtggaggtgctgaagttctcccaggtcaaggaggttaaaaagactttgtcgggcttggaagtcagcatggttactgcagttcccggtaggctaccagtcatgaccatgattccagatgttgactgcctgctctgggccattgggcgggtcccgaataccaaggacctgagtttaaacaaactggggattcaaaccgatgacaagggtcatatcatcgtagacgaattccagaataccaacgtcaaaggcatctatgcagttggggatgtatgtggaaaagctcttcttactccagttgcaatagctgctggccgaaaacttgcccatcgactttttgaatataaggaagattccaaattagattataacaacatcccaactgtggtcttcagccacccccctattgggacagtgggactcacggaagatgaagccattcataaatatggaatagaaaatgtgaagacctattcaacgagctttaccccgatgtatcacgcagttaccaaaaggaaaacaaaatgtgtgatgaaaatggtctgtgctaacaaggaagaaaaggtggttgggatccatatgcagggacttgggtgtgatgaaatgctgcagggttttgctgttgcagtgaagatgggagcaacgaaggcagactttgacaacacagtcgccattcaccctacctcttcagaagagctggtcacacttcgttgagaaccaggagacacgtgtggcgggcagtgggacccatagatcttctgaaatgaaacaaataatcacattgacttactgtttgagttttatgtatttctttattttaatcaggatcttctgatagtggaaatttttagtacataatagaacttatttatggagttagaaatttgtagtgttatccaggattgattttcatttgatcacatctcacagtaattaatattttcaagttttttttttattaacagctctgtgctagttttttttttctgttttagcctcatcccaaatataaagctttgtgaagtacaattaacttaatgtacttgaatgaatagaacttgctactttttttttttttttttttgagacagagttttgctctcattgcccaggctggagtgcggtggtgctatttcagctcaccacaacctctgcctcctgggttcaagtgattctcctgccttagcctcccgaatagctggaattacaggcacgcaccaccatgcctgactaattttgtatttttagtagacatggggtttctccatgttggtcaggctggtctcaaactcccaccttcaggtgatccgcccacctcggcctcctgaggtgctgagattacaggcgtgagccactgtgccagcttgctaattttcacagaagttgatggcaattcttcacatgtaaacagtgccagtgcacagaacctttatatattttttgaagccagtactgtgctctgcatataacaaagctgcttcaaggatgagacctttttctaaaagcatgtaatgtgagaagccggcctgccttattttcttttttcttttttaatgattaaaaatagtttgtggcaaggcacggtggctcaggcctgtaattctagcactttgggaggccgaggcaggaggattacttgagcctacaagtttgaggccagcatgcacagcatagcaagactgcatctctacagagagtaaaaaaaattacccgagtgtggtgatgtgcatctgtaatctcagctacttgggaggctgaggtgagaggatcacttgagcttgggtgaggtgaggctgcagtgagtcctgatcatgctgctgcactcaatcttggacaacagagcaagaccctgtctcaaaaaaaaaaaaaaaaaatatatatatatatatatattatttttatgaggtgaagtgcatcaaacttgggaaagatttgaggaggctgggaacctcctggaaaaccactccttgaagaaagatatgagagacatttagaagtgattcctgctttcagaaggaggtggattcaaatacatcaaaagtcccttcctctgctaagtgtttatagttcaatgaataatttcaatatttgtatgtgttcttgtcattttatttttttctgaaaaacttccaaaaatttgaaaataaaattacagccttttcttctt

SEQ ID NO: 14086 - DNA, 1440 bp, Artificial Sequence
  derived and/or modified sequence
atggcctgccggcaggagccccagccccagggccccccacctgctgctggagctgtggccagctatgactacctggtgattggaggcggcagcggcggcctggccagcgcccggcgggctgctgagctgggcgcccgggctgctgtggtggagagccacaagctgggcggcacctgtgtgaatgtgggctgtgtgcccaagaaggtgatgtggaacacagctgtgcacagcgagttcatgcatgaccacgccgactatggcttccccagctgtgagggcaagttcaactggagggtcatcaaggagaagagagatgcctacgtgtcccggctgaatgccatctaccagaacaacctgaccaagagccacatcgagatcatccggggccatgctgccttcaccagtgaccccaagcccaccatcgaggtgtctgggaagaagtacacagccccccacatcctgattgccactggaggcatgcccagcacccctcatgagagccagatccctggggccagcctgggcatcaccagtgatggcttcttccagctggaggagctgcccggccgctctgtgattgtgggcgccggctacatcgctgtggagatggccggcatcctgagcgccctgggcagcaagaccagcctgatgatcagacatgacaaggtgctgcggagctttgacagcatgatcagcaccaactgcacagaggagctggagaatgctggggtggaggtgctgaagttcagccaggtgaaggaggtgaagaagaccctgagcggcctggaggtgtccatggtgacagctgtgcccggccgcctgcctgtgatgaccatgatcccagatgtggactgcctgctgtgggccatcggccgggtgcccaacaccaaggacctgagcctgaacaagctgggcatccagacagatgacaagggccacatcatcgtggatgagttccagaacaccaacgtgaagggcatctatgctgtgggagatgtgtgtgggaaggccctgctgacccctgtggccatcgccgccggcaggaagctggcccaccggctgtttgagtacaaggaggacagcaagctggactacaacaacatccccaccgtggtgttcagccacccccccatcggcaccgtgggcctgacagaagatgaggccatccacaagtatggaattgaaaatgtgaagacctacagcaccagcttcacccccatgtaccacgctgtgaccaagaggaagaccaagtgtgtgatgaagatggtgtgtgccaacaaggaggagaaggtggtgggcatccacatgcagggcctgggctgtgatgagatgctgcagggctttgctgtggccgtgaagatgggcgccaccaaggctgactttgacaacacagtggccatccaccccaccagcagcgaggagctggtgaccctgaggtag

SEQ ID NO: 14087 - DNA, 1440 bp, Artificial Sequence
  derived and/or modified sequence
atggcctgccggcaggagccccagccccagggccccccccccgccgctggagcggtggcctcgtatgattacctggtcattgggggggggagtggaggtttggcctctgcgcgccgcgcggcagaactgggcgcccgcgctgccgtagtcgaaagccataaactcgggggcacctgcgtcaacgtgggatgcgtccccaaaaaggtcatgtggaacaccgccgttcacagtgagttcatgcatgaccacgcggactacgggttcccaagttgtgaggggaagttcaactggagggttataaaggaaaaaagggatgcctacgtttcaagacttaacgccatttaccagaataacctgacaaagtctcacatagaaattatccgcgggcacgctgcctttaccagcgaccctaagccaacaatagaggtaagcgggaaaaaatataccgccccccacatcctcatagctactggaggaatgccctccaccccacatgagtcgcagattccaggcgcctctctcggtatcactagtgacggattctttcaacttgaagagctgcccggacggtccgttattgtcggtgccggctacattgctgtcgaaatggcagggatactgagtgctcttggatccaagacctccctcatgattagacacgataaggtactgcgcagctttgactcaatgatttcaaccaactgcaccgaagagctggagaatgccggtgtggaggtgctgaagttctcacaagtcaaggaggtgaaaaaaacgctttccggcctggaagtgagtatggtcactgccgtgcctgggaggctgcctgtcatgaccatgatccctgacgtggattgtctgctgtgggccatagggcgggtacctaatacaaaggatctgtcgctaaataaactcggaattcaaacagatgataaaggacatattattgtcgatgaatttcagaacaccaatgtgaagggcatttacgcggttggagatgtgtgcggcaaggccttgctaactcctgtggccatcgccgcgggtcggaagctcgctcaccgtttgtttgagtataaagaagactccaagctggactataacaatatccctacggtggtgttttcccacccaccgattggcactgtcggtcttactgaggatgaggcaatacacaagtacggcattgagaacgttaaaacctattctacttcttttacaccaatgtaccacgctgtcactaagcgaaagacaaagtgtgtaatgaagatggtctgtgcgaataaggaggaaaaggtggtaggcatccacatgcaaggtctgggttgtgacgaaatgcttcaggggttcgccgtggctgtaaagatgggtgcaaccaaggccgattttgacaatactgtggccatccatcctacatcatcagaggagcttgtgacccttcggtag

SEQ ID NO: 14088 - DNA, 1440 bp, Artificial Sequence
  derived and/or modified sequence
atggcctgccggcaagagcctcagcctcaaggccctccccctgccgcaggagccgtcgcctcgtacgattacttggtcatcggaggcggatccggcggtctggcaagcgctaggcgcgcagccgagctgggagccagggcagcagtcgttgagtcgcataagttagggggaacctgtgtcaacgtgggttgtgtcccaaaaaaggtgatgtggaacaccgccgtccatagcgaattcatgcacgaccacgctgactacgggtttcccagttgtgaaggcaaattcaactggagagtaatcaaggaaaaacgtgacgcctatgtcagtcggctcaatgcaatctaccaaaataatctgactaagagtcatatcgagatcattcgcggtcacgctgcttttacgagcgatcccaaacctacgatcgaggttagcggtaagaaatacacagcgccacacatcctcatcgctaccggcggaatgccttccactccacacgagtctcagatccctggggcttcgctgggcatcacaagcgacggcttcttccagttggaggaactgcccggtaggagcgttattgtgggagccggttacatcgccgtggaaatggcgggtatccttagcgctctcggttccaagaccagcttgatgattcgacacgataaggtcctgcgatcctttgatagtatgatcagcaccaattgtaccgaggaattagagaatgctggcgtcgaagtcctgaaatttagtcaggtcaaggaggttaagaaaaccctaagcggactcgaggtgtcaatggtgacagccgtccccggacggctgccagtgatgacaatgattccagatgttgactgcctgttgtgggccatagggcgagtgcccaatacaaaggatttaagcctcaacaagctcggcattcagactgacgataaagggcacatcatagtcgacgagtttcaaaacacaaatgtgaaaggcatttacgctgtcggcgatgtctgcggcaaggccttgctcactcccgttgcgatcgctgcaggacgaaagttggcccataggctgttcgaatataaggaagactctaaactggactataacaatatacccacggtcgtcttttctcaccccccaattgggaccgtcggcctgactgaggacgaggccattcacaagtacggaatagagaacgttaagacatacagcactagctttacccctatgtaccatgcagtgaccaagaggaaaaccaagtgtgtgatgaagatggtctgtgcaaataaggaggaaaaagtagtaggaattcatatgcagggcctgggatgcgacgagatgctgcaaggttttgcagttgccgtaaagatgggagccacaaaggctgactttgacaacaccgtggccatccaccccacaagctctgaggaattggtcactctccgttag

SEQ ID NO: 14089 - DNA, 1440 bp, Artificial Sequence
  derived and/or modified sequence
atggcctgcagacaggagccccagccccagggccccccccccgccgccggcgccgtggccagctacgactacctggtgatcggcggcggcagcggcggcctggccagcgccagaagagccgccgagctgggcgccagagccgccgtggtggagagccacaagctgggcggcacctgcgtgaacgtgggctgcgtgcccaagaaggtgatgtggaacaccgccgtgcacagcgagttcatgcacgaccacgccgactacggcttccccagctgcgagggcaagttcaactggagagtgatcaaggagaagagagacgcctacgtgagcagactgaacgccatctaccagaacaacctgaccaagagccacatcgagatcatcagaggccacgccgccttcaccagcgaccccaagcccaccatcgaggtgagcggcaagaagtacaccgccccccacatcctgatcgccaccggcggcatgcccagcaccccccacgagagccagatccccggcgccagcctgggcatcaccagcgacggcttcttccagctggaggagctgcccggcagaagcgtgatcgtgggcgccggctacatcgccgtggagatggccggcatcctgagcgccctgggcagcaagaccagcctgatgatcagacacgacaaggtgctgagaagcttcgacagcatgatcagcaccaactgcaccgaggagctggagaacgccggcgtggaggtgctgaagttcagccaggtgaaggaggtgaagaagaccctgagcggcctggaggtgagcatggtgaccgccgtgcccggcagactgcccgtgatgaccatgatccccgacgtggactgcctgctgtgggccatcggcagagtgcccaacaccaaggacctgagcctgaacaagctgggcatccagaccgacgacaagggccacatcatcgtggacgagttccagaacaccaacgtgaagggcatctacgccgtgggcgacgtgtgcggcaaggccctgctgacccccgtggccatcgccgccggcagaaagctggcccacagactgttcgagtacaaggaggacagcaagctggactacaacaacatccccaccgtggtgttcagccacccccccatcggcaccgtgggcctgaccgaggacgaggccatccacaagtacggcatcgagaacgtgaagacctacagcaccagcttcacccccatgtaccacgccgtgaccaagagaaagaccaagtgcgtgatgaagatggtgtgcgccaacaaggaggagaaggtggtgggcatccacatgcagggcctgggctgcgacgagatgctgcagggcttcgccgtggccgtgaagatgggcgccaccaaggccgacttcgacaacaccgtggccatccaccccaccagcagcgaggagctggtgaccctgagatag

SEQ ID NO: 14090 - protein, 478 aa, Artificial Sequence
  derived and/or modified sequence
MAPLRPLLILALLAWVALADQESCKGRCTEGFNVDKKCQCDELCSYYQSCCTDYTAECKPQVTRGDVFTMPEDEYTVYDDGEEKNNATVHEQVGGPSLTSDLQAQSKGNPEQTPVLKPEEEAPAPEVGASKPEGIDSRPETLHPGRPQPPAEEELCSGKPFDAFTDLKNGSLFAFRGQYCYELDEKAVRPGYPKLIRDVWGIEGPIDAAFTRINCQGKTYLFKGSQYWRFEDGVLDPDYPRNISDGFDGIPDNVDAALALPAHSYSGRERVYFFKGKQYWEYQFQHQPSQEECEGSSLSAVFEHFAMMQRDSWEDIFELLFWGRTSAGTRQPQFISRDWHGVPGQVDAAMAGRIYISGMAPRPSLAKKQRFRHRNRKGYRSQRGHSRGRNQNSRRPSRATWLSLFSSEESNLGANNYDDYRMDWLVPATCEPIQSVFFFSGDKYYRVNLRTRRVDTVDPPYPRSIAQYWLGCPAPGHL

SEQ ID NO: 14091 - protein, 118 aa, Artificial Sequence
  derived and/or modified sequence
MAPLRPLLILALLAWVALADQESCKGRCTEGFNVDKKCQCDELCSYYQSCCTDYTAECKPQVTRGDVFTMPEDEYTVYDDGEEKNNATVHEQVGGPSLTSDLQAQSKGNPEQTPVLKP

SEQ ID NO: 14092 - DNA, 1437 bp, Artificial Sequence
  derived and/or modified sequence
atggcccccctgagacccctgctgatcctggccctgctggcctgggtggccctggccgaccaggagagctgcaagggcagatgcaccgagggcttcaacgtggacaagaagtgccagtgcgacgagctgtgcagctactaccagagctgctgcaccgactacaccgccgagtgcaagccccaggtgaccagaggcgacgtgttcaccatgcccgaggacgagtacaccgtgtacgacgacggcgaggagaagaacaacgccaccgtgcacgagcaggtgggcggccccagcctgaccagcgacctgcaggcccagagcaagggcaaccccgagcagacccccgtgctgaagcccgaggaggaggcccccgcccccgaggtgggcgccagcaagcccgagggcatcgacagcagacccgagaccctgcaccccggcagaccccagccccccgccgaggaggagctgtgcagcggcaagcccttcgacgccttcaccgacctgaagaacggcagcctgttcgccttcagaggccagtactgctacgagctggacgagaaggccgtgagacccggctaccccaagctgatcagagacgtgtggggcatcgagggccccatcgacgccgccttcaccagaatcaactgccagggcaagacctacctgttcaagggcagccagtactggagattcgaggacggcgtgctggaccccgactaccccagaaacatcagcgacggcttcgacggcatccccgacaacgtggacgccgccctggccctgcccgcccacagctacagcggcagagagagagtgtacttcttcaagggcaagcagtactgggagtaccagttccagcaccagcccagccaggaggagtgcgagggcagcagcctgagcgccgtgttcgagcacttcgccatgatgcagagagacagctgggaggacatcttcgagctgctgttctggggcagaaccagcgccggcaccagacagccccagttcatcagcagagactggcacggcgtgcccggccaggtggacgccgccatggccggcagaatctacatcagcggcatggcccccagacccagcctggccaagaagcagagattcagacacagaaacagaaagggctacagaagccagagaggccacagcagaggcagaaaccagaacagcagaagacccagcagagccacctggctgagcctgttcagcagcgaggagagcaacctgggcgccaacaactacgacgactacagaatggactggctggtgcccgccacctgcgagcccatccagagcgtgttcttcttcagcggcgacaagtactacagagtgaacctgagaaccagaagagtggacaccgtggaccccccctaccccagaagcatcgcccagtactggctgggctgccccgcccccggccacctgtag

SEQ ID NO: 14093 - DNA, 357 bp, Artificial Sequence
  derived and/or modified sequence
atggcccccctgagacccctgctgatcctggccctgctggcctgggtggccctggccgaccaggagagctgcaagggcagatgcaccgagggcttcaacgtggacaagaagtgccagtgcgacgagctgtgcagctactaccagagctgctgcaccgactacaccgccgagtgcaagccccaggtgaccagaggcgacgtgttcaccatgcccgaggacgagtacaccgtgtacgacgacggcgaggagaagaacaacgccaccgtgcacgagcaggtgggcggccccagcctgaccagcgacctgcaggcccagagcaagggcaaccccgagcagacccccgtgctgaagccctag

SEQ ID NO: 14094 - DNA, 1437 bp, Artificial Sequence
  derived and/or modified sequence
atggccccacttagacctctcctcattctggcactcctcgcgtgggtagcgctcgccgaccaggagtcttgtaaggggcgctgcaccgagggcttcaacgtcgacaagaagtgtcaatgtgacgaactctgctcttattatcagagctgttgcactgactacactgccgagtgtaagccacaggtgaccaggggcgatgtgttcaccatgccggaagacgaatataccgtgtatgacgatggagaggagaaaaacaacgccacagtgcacgagcaggtgggcggtccgtccttaacaagtgacctgcaggcacagtcgaaaggcaacccggaacagactccggtgctgaaaccggaggaggaggcgccggcccccgaagtgggtgcgtctaaacctgaaggaatcgactcccggccggagaccttgcaccccggccggcctcagcctcccgctgaagaggagctgtgttccgggaagccctttgatgcttttaccgatctgaagaacggaagcctctttgcctttcgagggcagtactgctacgaattagatgagaaggcagttaggccaggataccctaaactgatccgagatgtgtgggggatcgaggggccaatcgatgccgccttcacacgcatcaattgtcagggcaaaacctatctctttaaggggagtcagtattggaggtttgaagatggagtcctcgaccctgattacccacggaacatttccgacggtttcgatgggatccccgataatgttgacgccgcccttgccctgcctgcgcattcatattcgggccgcgagcgcgtctactttttcaaaggcaagcagtactgggaatatcaatttcagcatcagccatctcaagaagaatgcgagggctcctccctatctgctgtgttcgaacactttgcaatgatgcagcgggatagttgggaagacattttcgagcttctgttctgggggagaacatcagctggaaccaggcagccgcaattcataagtagggactggcatggggtccctggacaggtggatgctgccatggcaggccgtatttacatctccggtatggccccaagaccatcactggccaaaaaacagaggttccgccaccgcaataggaaaggttaccgtagtcagcgaggacactcccgcggacgcaaccaaaactcccgaagaccgagtagagccacctggctaagtctcttctccagcgaggagtccaacttgggcgctaacaattacgacgactatcggatggactggttggtcccagccacctgtgagccaatacagtctgtattctttttttcaggcgacaaatattatcgcgtgaaccttcggacaagacgggtggatacagtggatcctccatatcctcggtctatcgcccaatactggctgggctgccctgctccaggacatctgtag

SEQ ID NO: 14095 - DNA, 357 bp, Artificial Sequence
  derived and/or modified sequence
atggccccgttgcgaccactcctgatactcgccctcctggcatgggtggcccttgctgatcaggaatcctgtaaaggcagatgcacagaggggtttaacgtcgacaaaaaatgccagtgcgatgaactctgttcctactatcaatcttgttgtactgattataccgccgagtgcaaaccacaggtcaccagaggcgacgtgtttacgatgccagaggatgagtataccgtgtacgacgatggagaagaaaagaataacgctactgttcatgagcaggtcgggggaccctctctgacaagtgatttacaggctcagagcaaggggaaccctgaacagacccctgtcctcaaaccctag

SEQ ID NO: 14096 - DNA, 1437 bp, Artificial Sequence
  derived and/or modified sequence
atggcccccctgcggcccctgctgatcctggccctgctggcctgggtggccctggccgaccaggagagctgcaagggccgctgcacagagggcttcaacgtggacaagaagtgccagtgtgatgagctgtgcagctactaccagagctgctgcacagactacacagctgagtgcaagccccaggtgaccagaggagatgtgttcaccatgccagaagatgagtacacagtgtatgatgatggagaggagaagaacaatgccaccgtgcatgagcaggtgggcggccccagcctgaccagtgacctgcaggcccagagcaaaggaaatcctgagcagacccctgtgctgaagccagaggaggaggccccagcccctgaggtgggcgccagcaagccagagggcatcgacagcaggcctgagaccctgcaccctggccggccccagcccccagctgaggaggagctgtgcagcggcaagccctttgatgccttcacagacctgaagaatggcagcctgtttgccttccggggccagtactgctatgagctggatgagaaggctgtgcggcccggctaccccaagctgatcagagatgtgtggggcatcgagggccccattgatgctgccttcacccgcatcaactgccagggcaagacctacctgttcaagggcagccagtactggaggtttgaagatggagtgctggaccctgactaccccaggaacatcagtgatggctttgatggcatcccagacaacgtggatgctgccctggccctgcctgcccacagctacagcggccgggagcgggtgtacttcttcaagggcaagcagtactgggagtaccagttccagcaccagcccagccaggaggagtgtgagggcagcagcctgtctgctgtgtttgagcactttgccatgatgcagagggacagctgggaggacatctttgagctgctcttctggggccgcaccagcgctggcacccggcagccccagttcatcagccgggactggcacggcgtgcccggccaggtggatgctgccatggccggccgcatctacatcagcggcatggccccccggcccagcctggccaagaagcagcgcttccgccacaggaacaggaagggctaccgcagccagaggggccacagccggggcaggaaccagaacagccggcggcccagccgggccacctggctgagcctcttcagcagcgaggagagcaacctgggcgccaacaactatgatgactacaggatggactggctggtgcctgccacctgtgagcccatccagagcgtcttcttcttcagcggggacaagtactacagagtgaacctgcggacccggcgggtggacacagtggaccccccctaccccaggagcatcgcccagtactggctgggctgcccagcccctggccacctgtag

SEQ ID NO: 14097 - DNA, 357 bp, Artificial Sequence
  derived and/or modified sequence
atggcccccctgcggcccctgctgatcctggccctgctggcctgggtggccctggccgaccaggagagctgcaagggccgctgcacagagggcttcaacgtggacaagaagtgccagtgtgatgagctgtgcagctactaccagagctgctgcacagactacacagctgagtgcaagccccaggtgaccagaggagatgtgttcaccatgccagaagatgagtacacagtgtatgatgatggagaggagaagaacaatgccaccgtgcatgagcaggtgggcggccccagcctgaccagtgacctgcaggcccagagcaaaggaaatcctgagcagacccctgtgctgaagccctag

SEQ ID NO: 14098 - DNA, 1437 bp, Artificial Sequence
  derived and/or modified sequence
atggcccccctgcggcccctgctgatcctggccctgctggcctgggtggccctcgccgaccaagaatcttgtaagggcaggtgtacagaaggatttaatgttgataagaagtgccaatgcgatgaactctgcagctactatcaaagttgctgcaccgactatacagctgaatgcaagccacaagttaccaggggggacgtgttcaccatgcccgaggacgagtacactgtgtatgacgatggggaggagaagaataacgctaccgttcacgaacaggtaggaggacctagcctgacaagcgatctgcaggcccagtccaagggcaacccggaacagacacctgtgctgaaacccgaggaagaggcaccggctccagaagttggagcctccaaacctgagggaattgactcacggccagagacgttacatcccggccgcccccagccgcctgctgaggaggaactatgcagcgggaaacccttcgacgccttcacagatctgaagaacgggtctctctttgcgtttagaggacagtactgttacgaattagatgaaaaagccgttaggccgggataccctaagttaatcagagatgtgtggggaatcgaaggccccatcgacgctgccttcacacgtattaattgtcagggaaagacctacttgtttaagggctcccaatactggcgatttgaggacggcgttctcgaccccgactaccccaggaatatcagtgatggcttcgatggcatccctgacaacgtcgacgcagcattggccttacctgcccattcttattcaggacgggagcgcgtttacttctttaagggtaaacagtactgggaataccaattccaacaccaaccatcccaagaggaatgtgagggtagctcactctccgcagtcttcgaacatttcgccatgatgcagagagactcctgggaggacatctttgagctgctgttctgggggcggacctctgctggtaccaggcagcctcagttcatttctcgcgactggcacggggtgcccggccaggtggacgcagccatggcaggcagaatatatatttccggcatggcccctcgcccctctctggccaagaagcagcggtttaggcaccggaatagaaaagggtaccgcagccagcgggggcattctagaggccggaaccagaatagtcgcaggccaagtagggccacctggctaagcctattttccagcgaggagtcaaacttgggtgccaacaattacgatgattatagaatggattggctagtccccgccacctgtgagcccatacagtctgtgttttttttttctggggacaagtattatcgcgtgaatctgcgcacaaggagggtggacaccgtcgacccaccatatcctagatcaatcgcacagtattggttggggtgccccgcccccggccacctgtag

SEQ ID NO: 14099 - DNA, 357 bp, Artificial Sequence
  derived and/or modified sequence
atggcccccctgcggcccctgctgatcctggccctgctggcctgggtggcattggccgaccaagagtcctgtaaggggagatgtacagagggctttaacgtggacaaaaaatgtcaatgcgacgagttgtgtagttactatcagtcctgctgtacggactacacagctgaatgcaagcctcaagttacccgtggtgacgtcttcaccatgcccgaggatgagtatactgtgtacgatgacggagaagaaaagaataacgctaccgttcacgagcaggtagggggcccttctcttacaagcgatctgcaggctcagtcgaaagggaaccccgagcagacacccgtccttaagccatag

SEQ ID NO: 14100 - DNA, 1437 bp, Artificial Sequence
  derived and/or modified sequence
atggcccctctcaggccgctgcttatccttgctctgctggcttgggtggccttggctgatcaagagagctgtaagggccgttgtacggaaggctttaatgttgacaagaaatgtcaatgtgacgagctctgcagctactaccagtcctgttgtacagactacacagcagagtgcaagccacaggtgacacgtggagacgtctttaccatgcccgaggatgagtatactgtctacgatgacggggaggagaagaataatgccaccgtccatgaacaggtcggaggcccatccctgacatcagatctccaggcccagtccaagggcaaccctgagcagacccctgtcctgaaacctgaggaggaggctccggcacctgaagtgggggcaagcaaacctgagggcatagatagcagacccgagactctgcacccaggcagaccgcagcctcccgcagaagaagagctttgcagcggcaagccattcgacgccttcacagacctcaaaaatggcagcctgtttgcatttcggggacagtactgctacgaactagatgaaaaagcagtccgacctggataccccaaactgattcgggacgtttggggtatcgaagggcctattgatgccgcatttactagaattaattgccagggtaagacttacctctttaagggctcccagtactggcgcttcgaggatggggtgctggacccagattatcctcggaatatctcagatgggtttgacgggattcctgacaacgtagatgccgctctcgcactcccggctcacagctatagcggcagagagcgagtgtatttctttaagggcaaacagtactgggagtatcaatttcagcatcagccgtcccaagaggagtgtgagggctcttcactgagtgcagttttcgaacactttgctatgatgcagcgtgactcctgggaggacatcttcgaactgcttttttggggacggacaagcgcgggaacccggcagccccagttcatttctagggactggcacggggtacctggccaggttgacgccgcaatggctggacgaatttatataagcggaatggcccctcgaccaagtctggccaagaaacaacggtttcgccaccgcaaccgtaaaggttaccgatcacagcgcggtcactccagaggccgaaaccagaatagcagacgaccatcaagggctacctggttgagcctcttctccagcgaggagagtaatttaggagccaataattacgacgattacaggatggactggctggtgccagctacttgcgaaccaatccaaagcgttttctttttttctggcgacaagtattaccgggtgaacctcagaacaagacgtgtggatacagtcgaccccccttaccccaggtctattgcgcagtactggcttgggtgccctgcaccaggccatctgtag

SEQ ID NO: 14101 - DNA, 357 bp, Artificial Sequence
  derived and/or modified sequence
atggcaccactcaggcctttgctgattctggccctcctggcttgggttgccctggccgaccaggagagctgcaaagggagatgcacagagggcttcaacgtggacaaaaagtgccagtgtgatgagctctgcagctactatcagagctgttgcaccgattatactgcggaatgtaaaccccaggtgacacgcggtgacgtcttcactatgcccgaagacgagtacaccgtttatgacgatggggaggagaagaacaacgccacggttcacgaacaggtggggggaccctccctgaccagtgatctgcaagcacagagcaaggggaatcctgaacagactcccgtcttaaagccatag

SEQ ID NO: 14102 - DNA, 2046 bp, Artificial Sequence
  derived and/or modified sequence
gagcaaacagagcagcagaaaaggcagttcctcttctccagtgccctccttccctgtctctgcctctccctcccttcctcaggcatcagagcggagacttcagggagaccagagcccagcttgccaggcactgagctagaagccctgccatggcacccctgagaccccttctcatactggccctgctggcatgggttgctctggctgaccaagagtcatgcaagggccgctgcactgagggcttcaacgtggacaagaagtgccagtgtgacgagctctgctcttactaccagagctgctgcacagactatacggctgagtgcaagccccaagtgactcgcggggatgtgttcactatgccggaggatgagtacacggtctatgacgatggcgaggagaaaaacaatgccactgtccatgaacaggtggggggcccctccctgacctctgacctccaggcccagtccaaagggaatcctgagcagacacctgttctgaaacctgaggaagaggcccctgcgcctgaggtgggcgcctctaagcctgaggggatagactcaaggcctgagacccttcatccagggagacctcagcccccagcagaggaggagctgtgcagtgggaagcccttcgacgccttcaccgacctcaagaacggttccctctttgccttccgagggcagtactgctatgaactggacgaaaaggcagtgaggcctgggtaccccaagctcatccgagatgtctggggcatcgagggccccatcgatgccgccttcacccgcatcaactgtcaggggaagacctacctcttcaagggtagtcagtactggcgctttgaggatggtgtcctggaccctgattacccccgaaatatctctgacggcttcgatggcatcccggacaacgtggatgcagccttggccctccctgcccatagctacagtggccgggagcgggtctacttcttcaaggggaaacagtactgggagtaccagttccagcaccagcccagtcaggaggagtgtgaaggcagctccctgtcggctgtgtttgaacactttgccatgatgcagcgggacagctgggaggacatcttcgagcttctcttctggggcagaacctctgctggtaccagacagccccagttcattagccgggactggcacggtgtgccagggcaagtggacgcagccatggctggccgcatctacatctcaggcatggcaccccgcccctccttggccaagaaacaaaggtttaggcatcgcaaccgcaaaggctaccgttcacaacgaggccacagccgtggccgcaaccagaactcccgccggccatcccgcgccacgtggctgtccttgttctccagtgaggagagcaacttgggagccaacaactatgatgactacaggatggactggcttgtgcctgccacctgtgaacccatccagagtgtcttcttcttctctggagacaagtactaccgagtcaatcttcgcacacgacggtggcagcgggttgggttcccaccggagaaagcggaccaccttcagcaaagggcagctactggagctggagagggcgtttgcagcatggccctaccccaacatcagcacccatgagcacctggcctgggtcacttgccttcctgaggccaaggtacaggtgtggttccagaagcgctgggccaaaataatcaagaacaggaagtcaggaattctaagccctgggtctgagtgcccccagagctcctgttctcttccagacaccctccagcagccctgggatccccaaatgccaggccaacctccaccctccagcggcacacctcagcgcacctcagtgtgtcgacatagctcctgtccagctcctggcttgagtccacggcagggctgggaaggggctaaagctgtagccccatggggatcagctggggcttcagaggtccacccttctttagagcgagctactccccagacttcactaggcagcctgtctgacctcatctatgccttggccattgtcgtcaatgtggaccactcctag

SEQ ID NO: 14103 - DNA, 2023 bp, Artificial Sequence
  derived and/or modified sequence
caatcatggatcaatagctatgtttggagaaggaatttgtggctgctccagctactgggcattttgtctggtccagttcatgtaatctcccaacaccccatgaagcaaggctttgttaatcctattttactgaaaatgaactaagactcagagagataaagctgttgcccaatgagccttctttctgccctccagatccacggtgctaattccccttccgatgacctaatgattctgagcttggcaaaggtcttatctcccagctcgcccaggcccagtgttccaggaatgtgacctttgctgcagcagccgctggagggggcagaggggatgggctggaggttgagcaaacagagcagcagaaaaggcagttcctcttctccagtgccctccttccctgtctctgcctctccctcccttcctcaggcatcagagcggagacttcagggagaccagagcccagcttgccaggcactgagctagaagccctgccatggcacccctgagaccccttctcatactggccctgctggcatgggttgctctggctgaccaagagtcatgcaagggccgctgcactgagggcttcaacgtggacaagaagtgccagtgtgacgagctctgctcttactaccagagctgctgcacagactatacggctgagtgcaagccccaagtgactcgcggggatgtgttcactatgccggaggatgagtacacggtctatgacgatggcgaggagaaaaacaatgccactgtccatgaacaggtggggggcccctccctgacctctgacctccaggcccagtccaaagggaatcctgagcagacacctgttctgaaacctgaggaagaggcccctgcgcctgaggtgggcgcctctaagcctgaggggatagactcaaggcctgagacccttcatccagggagacctcagcccccagcagaggaggagctgtgcagtgggaagcccttcgacgccttcaccgacctcaagaacggttccctctttgccttccgagggcagtactgctatgaactggacgaaaaggcagtgaggcctgggtaccccaagctcatccgagatgtctggggcatcgagggccccatcgatgccgccttcacccgcatcaactgtcaggggaagacctacctcttcaagggtagtcagtactggcgctttgaggatggtgtcctggaccctgattacccccgaaatatctctgacggcttcgatggcatcccggacaacgtggatgcagccttggccctccctgcccatagctacagtggccgggagcgggtctacttcttcaaggggaaacagtactgggagtaccagttccagcaccagcccagtcaggaggagtgtgaaggcagctccctgtcggctgtgtttgaacactttgccatgatgcagcgggacagctgggaggacatcttcgagcttctcttctggggcagaacctctgctggtaccagacagccccagttcattagccgggactggcacggtgtgccagggcaagtggacgcagccatggctggccgcatctacatctcaggcatggcaccccgcccctccttggccaagaaacaaaggtttaggcatcgcaaccgcaaaggctaccgttcacaacgaggccacagccgtggccgcaaccagaactcccgccggccatcccgcgccacgtggctgtccttgttctccagtgaggagagcaacttgggagccaacaactatgatgactacaggatggactggcttgtgcctgccacctgtgaacccatccagagtgtcttcttcttctctggagacaagtactaccgagtcaatcttcgcacacggcgagtggacactgtggaccctccctacccacgctccatcgctcagtactggctgggctgcccagctcctggccatctgtaggagtcagagcccacatggccgggccctctgtagctccctcctcccatctccttcccccagcccaataaaggtcccttagccccgagtttaaaa

SEQ ID NO: 14104 - DNA, 501 bp, Artificial Sequence
  derived and/or modified sequence
agaatgagatcatgtctggcctgttgcaagaaccagaatgaaggatggagcagaagttggattggggcggcaagaagggagcatcagagcggagacttcagggagaccagagcccagcttgccaggcactgagctagaagccctgccatggcacccctgagaccccttctcatactggccctgctggcatgggttgctctggctgaccaagagtcatgcaagggccgctgcactgagggcttcaacgtggacaagaagtgccagtgtgacgagctctgctcttactaccagagctgctgcacagactatacggctgagtgcaagccccaagtgactcgcggggatgtgttcactatgccggaggatgagtacacggtctatgacgatggcgaggagaaaaacaatgccactgtccatgaacaggtggggggcccctccctgacctctgacctccaggcccagtccaaagggaatcctgagcagacacctgttctgaaacct

SEQ ID NO: 14105 - protein, 281 aa, Artificial Sequence
  derived and/or modified sequence
MQQPFNYPYPQIYWVDSSASSPWAPPGTVLPCPTSVPRRPGQRRPPPPPPPPPLPPPPPPPPLPPLPLPPLKKRGNHSTGLCLLVMFFMVLVALVGLGLGMFQLFHLQKELAELRESTSQMHTASSLEKQIGHPSPPPEKKELRKVAHLTGKSNSRSMPLEWEDTYGIVLLSGVKYKKGGLVINETGLYFVYSKVYFRGQSCNNLPLSHKVYMRNSKYPQDLVMMEGKMMSYCTTGQMWARSSYLGAVFNLTSADHLYVNVSELSLVNFEESQTFFGLYKL

SEQ ID NO: 14106 - DNA, 846 bp, Artificial Sequence
  derived and/or modified sequence
atgcagcagcccttcaactacccctacccccagatctactgggtggacagcagcgccagcagcccctgggccccccccggcaccgtgctgccctgccccaccagcgtgcccagaagacccggccagagaagacccccccccccccccccccccccccccctgccccccccccccccccccccccccctgccccccctgcccctgccccccctgaagaagagaggcaaccacagcaccggcctgtgcctgctggtgatgttcttcatggtgctggtggccctggtgggcctgggcctgggcatgttccagctgttccacctgcagaaggagctggccgagctgagagagagcaccagccagatgcacaccgccagcagcctggagaagcagatcggccaccccagccccccccccgagaagaaggagctgagaaaggtggcccacctgaccggcaagagcaacagcagaagcatgcccctggagtgggaggacacctacggcatcgtgctgctgagcggcgtgaagtacaagaagggcggcctggtgatcaacgagaccggcctgtacttcgtgtacagcaaggtgtacttcagaggccagagctgcaacaacctgcccctgagccacaaggtgtacatgagaaacagcaagtacccccaggacctggtgatgatggagggcaagatgatgagctactgcaccaccggccagatgtgggccagaagcagctacctgggcgccgtgttcaacctgaccagcgccgaccacctgtacgtgaacgtgagcgagctgagcctggtgaacttcgaggagagccagaccttcttcggcctgtacaagctgtag

SEQ ID NO: 14107 - DNA, 846 bp, Artificial Sequence
  derived and/or modified sequence
atgcagcagccatttaactatccttatccccaaatttactgggtcgattcttcagcatcttctccatgggcacctccaggcaccgtcctcccctgtccaacttcggttccgcgcaggccaggccagcgaaggcccccgccacctccacctccccccccactaccacctcctccgccaccacctccacttccacccctccctctccctcctctaaagaagagggggaaccacagcaccggtctatgtttgctggtgatgttcttcatggtcctggtggcgctcgtgggcttaggacttggcatgtttcagcttttccacctccagaaagagctggctgaattaagagagtcgacatctcagatgcacacagcctcctcgctggaaaagcaaatcggccacccatctccacctccagaaaagaaggagctacggaaagtggcacatctgaccggtaaaagcaatagtagatcgatgcctctggagtgggaggatacttacggaattgtgctgctgtcgggcgtcaagtacaaaaagggcggactcgtcatcaacgagacaggtctgtactttgtttactctaaggtgtacttccgcggtcagtcttgcaataatctgcccctttcacataaagtgtacatgaggaatagcaaatatccccaagacctggtgatgatggaaggaaagatgatgtcatactgcactactggccagatgtgggcacggtcctcttacttgggagccgtgttcaacctcaccagcgcggaccacctctacgtgaatgtaagcgagctgagcctggtgaatttcgaggagagccagaccttcttcggcctgtacaagctctag

SEQ ID NO: 14108 - DNA, 1846 bp, Artificial Sequence
  derived and/or modified sequence
agagagagagagatagagaaagagaaagacagaggtgtttcccttagctatggaaactctataagagagatccagcttgcctcctcttgagcagtcagcaacagggtcccgtccttgacacctcagcctctacaggactgagaagaagtaaaaccgtttgctggggctggcctgactcaccagctgccatgcagcagcccttcaattacccatatccccagatctactgggtggacagcagtgccagctctccctgggcccctccaggcacagttcttccctgtccaacctctgtgcccagaaggcctggtcaaaggaggccaccaccaccaccgccaccgccaccactaccacctccgccgccgccgccaccactgcctccactaccgctgccacccctgaagaagagagggaaccacagcacaggcctgtgtctccttgtgatgtttttcatggttctggttgccttggtaggattgggcctggggatgtttcagctcttccacctacagaaggagctggcagaactccgagaggccaccccagtccaccccctgaaaaaaaggagctgaggaaagtggcccatttaacaggcaagtccaactcaaggtccatgcctctggaatgggaagacacctatggaattgtcctgctttctggagtgaagtataagaagggtggccttgtgatcaatgaaactgggctgtactttgtatattccaaagtatacttccggggtcaatcttgcaacaacctgcccctgagccacaaggtctacatgaggaactctaagtatccccaggatctggtgatgatggaggggaagatgatgagctactgcactactgggcagatgtgggcccgcagcagctacctgggggcagtgttcaatcttaccagtgctgatcatttatatgtcaacgtatctgagctctctctggtcaattttgaggaatctcagacgtttttcggcttatataagctctaagagaagcactttgggattctttccattatgattctttgttacaggcaccgagaatgttgtattcagtgagggtcttcttacatgcatttgaggtcaagtaagaagacatgaaccaagtggaccttgagaccacagggttcaaaatgtctgtagctcctcaactcacctaatgtttatgagccagacaaatggaggaatatgacggaagaacatagaactctgggctgccatgtgaagagggagaagcatgaaaaagcagctaccaggtgttctacactcatcttagtgcctgagagtatttaggcagattgaaaaggacaccttttaactcacctctcaaggtgggccttgctacctcaagggggactgtctttcagatacatggttgtgacctgaggatttaagggatggaaaaggaagactagaggcttgcataataagctaaagaggctgaaagaggccaatgccccactggcagcatcttcacttctaaatgcatatcctgagccatcggtgaaactaacagataagcaagagagatgttttggggactcatttcattcctaacacagcatgtgtatttccagtgcaattgtaggggtgtgtgtgtgtgtgtgtgtgtgtgtgtgtgtatgactaaagagagaatgtagatattgtgaagtacatattaggaaaatatgggttgcatttggtcaagattttgaatgcttcctgacaatcaactctaatagtgcttaaaaatcattgattgtcagctactaatgatgttttcctataatataataaatatttatgtagatgtgcatttttgtgaaatgaaaacatgtaataaaaagtatatgttaggatacaaat

SEQ ID NO: 14109 - DNA, 1888 bp, Artificial Sequence
  derived and/or modified sequence
agagagagatagagaaagagaaagacagaggtgtttcccttagctatggaaactctataagagagatccagcttgcctcctcttgagcagtcagcaacagggtcccgtccttgacacctcagcctctacaggactgagaagaagtaaaaccgtttgctggggctggcctgactcaccagctgccatgcagcagcccttcaattacccatatccccagatctactgggtggacagcagtgccagctctccctgggcccctccaggcacagttcttccctgtccaacctctgtgcccagaaggcctggtcaaaggaggccaccaccaccaccgccaccgccaccactaccacctccgccgccgccgccaccactgcctccactaccgctgccacccctgaagaagagagggaaccacagcacaggcctgtgtctccttgtgatgtttttcatggttctggttgccttggtaggattgggcctggggatgtttcagctcttccacctacagaaggagctggcagaactccgagagtctaccagccagatgcacacagcatcatctttggagaagcaaataggccaccccagtccaccccctgaaaaaaaggagctgaggaaagtggcccatttaacaggcaagtccaactcaaggtccatgcctctggaatgggaagacacctatggaattgtcctgctttctggagtgaagtataagaagggtggccttgtgatcaatgaaactgggctgtactttgtatattccaaagtatacttccggggtcaatcttgcaacaacctgcccctgagccacaaggtctacatgaggaactctaagtatccccaggatctggtgatgatggaggggaagatgatgagctactgcactactgggcagatgtgggcccgcagcagctacctgggggcagtgttcaatcttaccagtgctgatcatttatatgtcaacgtatctgagctctctctggtcaattttgaggaatctcagacgtttttcggcttatataagctctaagagaagcactttgggattctttccattatgattctttgttacaggcaccgagaatgttgtattcagtgagggtcttcttacatgcatttgaggtcaagtaagaagacatgaaccaagtggaccttgagaccacagggttcaaaatgtctgtagctcctcaactcacctaatgtttatgagccagacaaatggaggaatatgacggaagaacatagaactctgggctgccatgtgaagagggagaagcatgaaaaagcagctaccaggtgttctacactcatcttagtgcctgagagtatttaggcagattgaaaaggacaccttttaactcacctctcaaggtgggccttgctacctcaagggggactgtctttcagatacatggttgtgacctgaggatttaagggatggaaaaggaagactagaggcttgcataataagctaaagaggctgaaagaggccaatgccccactggcagcatcttcacttctaaatgcatatcctgagccatcggtgaaactaacagataagcaagagagatgttttggggactcatttcattcctaacacagcatgtgtatttccagtgcaattgtaggggtgtgtgtgtgtgtgtgtgtgtgtgtgtgtgtatgactaaagagagaatgtagatattgtgaagtacatattaggaaaatatgggttgcatttggtcaagattttgaatgcttcctgacaatcaactctaatagtgcttaaaaatcattgattgtcagctactaatgatgttttcctataatataataaatatttatgtagatgtgcatttttgtgaaatgaaaacatgtaataaaaagtatatgttaggatacaaat

SEQ ID NO: 14110 - DNA, 846 bp, Artificial Sequence
  derived and/or modified sequence
atgcagcagcccttcaactacccctacccccagatctactgggtggacagcagcgccagcagcccctgggcccctcctggcaccgtgctgccctgccccacctctgtgccccggcggcccggccagaggaggcctcctcctcctcctcctcctccacccctgcccccacctcctcctcctccacccctgccccccctgcccctgccccccctgaagaagaggggcaaccacagcacaggcctgtgcctgctggtgatgttcttcatggtgctggtggccctggtgggcctgggcctgggcatgttccagctgttccacctgcagaaggagctggccgagctgcgggagagcaccagccagatgcacacagccagcagcctggagaagcagatcggccaccccagccccccacctgagaagaaggagctgaggaaggtggcccacctgaccgggaagagcaacagccgctccatgcccctggagtgggaggacacctacggcatcgtgctgctgagcggcgtgaagtacaagaagggcggcctggtgatcaatgagaccggcctgtactttgtgtacagcaaggtgtacttccggggccagagctgcaacaacctgcccctgagccacaaggtgtacatgaggaacagcaagtacccccaggacctggtgatgatggagggcaagatgatgagctactgcaccaccggccagatgtgggcccggagcagctacctgggcgctgtgttcaacctgaccagcgctgaccacctgtatgtgaatgtgtctgagctgagcctggtgaactttgaggagagccagaccttcttcggcctgtacaagctgtag

SEQ ID NO: 14111 - DNA, 846 bp, Artificial Sequence
  derived and/or modified sequence
atgcagcagcccttcaactacccctacccccagatctactgggtggactcctcagcatcttctccgtgggcaccgccagggactgtgttgccctgccccacgtcagtccccagaagacctggtcagcggcgaccgccccctccccctcctccaccacctctgccgccccctcctcctccgcctcccctacctcccctcccgctccccccgctgaaaaagcgaggtaaccacagtaccggtctctgcttacttgtcatgttttttatggtgttagtcgccctggtgggcctcggtctggggatgttccagctattccatctacaaaaggagctggccgaactccgcgaaagcaccagccaaatgcacacagcatcctctttggaaaagcagatcgggcacccctctccacctccagagaagaaggagctcaggaaggtggctcaccttaccggcaagtccaactctcgaagcatgcctctcgaatgggaagacacatacggtatagtgttgctcagtggggttaagtacaagaagggcggcctagtgattaacgagactgggttgtactttgtgtacagcaaagtctatttccggggacagagttgcaacaatctcccactcagtcataaggtgtatatgcgcaattccaagtacccacaggacctggtaatgatggagggcaagatgatgtcttactgcaccaccggtcagatgtgggctaggagtagctacctcggtgccgtatttaacttgacctccgcggaccacctgtacgtgaatgtgagcgaactctccctggtgaacttcgaggaaagtcaaacatttttcgggctctataagctctag

SEQ ID NO: 14112 - DNA, 846 bp, Artificial Sequence
  derived and/or modified sequence
atgcagcaacctttcaactatccgtacccacagatttattgggtcgattcaagtgcatcctccccctgggctccacccggaacagtgctcccctgtccgacgtccgtgccacgacggccagggcagaggcgccctcctccacctccccctcccccaccactccctccaccaccgcctcccccacccctgccaccgcttccgctacctcccctgaagaagcggggtaatcattcaaccggtctgtgtctcctggtcatgttcttcatggtgctcgtagccctagtcggcctggggttgggcatgtttcaattgtttcatctccagaaggaacttgctgagctgagagagagcacgtcccagatgcataccgcgtccagcctggagaagcagatcgggcatccaagtccaccacctgagaaaaaagaactgcgcaaagtggcccacctgacaggcaagagcaactctcgctccatgcccctggaatgggaagacacttacggaattgttctgctcagtggcgtcaaatacaagaaagggggacttgtgattaacgagacggggctatactttgtctactccaaagtctacttcagagggcagagttgcaataaccttcccctgtctcataaagtgtatatgcgaaattctaagtacccgcaggacctggtcatgatggaaggaaaaatgatgtcatactgcacgactgggcagatgtgggcccgttcatcatatttgggtgccgtgtttaacctaactagcgccgatcatctatacgtcaacgtcagcgaactgtcgctggttaacttcgaggaatcacaaacgttcttcggactttataaactctag

SEQ ID NO: 14113 - DNA, 846 bp, Artificial Sequence
  derived and/or modified sequence
atgcagcagccgttcaactacccgtatccgcaaatttactgggttgacagctcagcatctagcccctgggcccctcctggaaccgttctcccttgtccgacctctgtgccacggagacctggtcaaagaaggccccctcctccacctcccccaccccctctgcctccgccgccacctcctccccctttgcctcctttaccacttccaccactgaaaaaacgagggaaccattctactggcctgtgcttgttggtcatgttctttatggtgctggtggctcttgttgggctgggcctaggaatgttccaattgttccatttacagaaggaactggctgaactgcgagagagtacttcccaaatgcacactgcaagtagcttggagaagcaaattggacacccctcaccccccccagagaagaaagagctcagaaaggttgcccacctgactggcaagagcaactcaaggagtatgccgcttgaatgggaggatacgtacgggatagttctgttatcaggagtgaaatacaaaaagggcgggcttgtgatcaatgaaaccggtctgtacttcgtctatagcaaagtgtacttcagaggccagtcatgcaacaacctgcctctgtcccacaaagtatatatgaggaatagtaagtacccccaggacctggtcatgatggaggggaaaatgatgtcttactgtactactggacagatgtgggccagatcctcttaccttggggccgtcttcaacctcacctcagccgaccatctttatgttaatgtctcagaacttagtttagtgaattttgaggagtctcagaccttcttcggcctgtacaagctgtag

SEQ ID NO: 14114 - DNA, 846 bp, Artificial Sequence
  derived and/or modified sequence
atgcagcaaccctttaattacccctatccacaaatctactgggtcgattctagcgctagttccccttgggccccacccggaaccgtcctcccttgtcctacctctgtgccacgccggcctggacaacgtcgaccccccccgccccctccgcccccgccactgcctcctccaccgccgcctcccccgttacctcccctgcctctgccacctctgaagaaacgtgggaatcactccactggcctttgcctcctggttatgttttttatggtgctagtcgcccttgtggggctaggtttgggaatgttccagcttttccacttgcagaaagagttagcagagctcagagaatccacaagccagatgcatacagcttcatccctggagaagcagatagggcacccatcacctccacccgaaaagaaggagcttaggaaagttgcccatctgaccggtaagtcaaattcccggagcatgccactcgagtgggaggacacatacggaatcgtgttgctgtctggtgtcaaatacaagaagggcgggctagtaataaatgagacgggtctttacttcgtatattccaaagtttacttccgaggccaaagctgtaataaccttccactgtctcacaaagtttatatgcgcaattctaaatatcctcaggatctggtgatgatggaggggaaaatgatgtcctactgcactactggtcaaatgtgggcgcgatcctcttacctcggagctgtgttcaatctgactagcgctgaccatctgtatgttaacgtctctgaactgtcacttgtgaattttgaagagtctcagaccttttttggcctctataaactttag

SEQ ID NO: 14115 - RNA, 846 nt, Artificial Sequence
  derived and/or modified sequence
augcagcagccguucaacuacccguauccgcaaauuuacuggguugacagcucagcaucuagccccugggccccuccuggaaccguucucccuuguccgaccucugugccacggagaccuggucaaagaaggcccccuccuccaccucccccacccccucugccuccgccgccaccuccucccccuuugccuccuuuaccacuuccaccacugaaaaaacgagggaaccauucuacuggccugugcuuguuggucauguucuuuauggugcugguggcucuuguugggcugggccuaggaauguuccaauuguuccauuuacagaaggaacuggcugaacugcgagagaguacuucccaaaugcacacugcaaguagcuuggagaagcaaauuggacaccccucaccccccccagagaagaaagagcucagaaagguugcccaccugacuggcaagagcaacucaaggaguaugccgcuugaaugggaggauacguacgggauaguucuguuaucaggagugaaauacaaaaagggcgggcuugugaucaaugaaaccggucuguacuucgucuauagcaaaguguacuucagaggccagucaugcaacaaccugccucugucccacaaaguauauaugaggaauaguaaguacccccaggaccuggucaugauggaggggaaaaugaugucuuacuguacuacuggacagaugugggccagauccucuuaccuuggggccgucuucaaccucaccucagccgaccaucuuuauguuaaugucucagaacuuaguuuagugaauuuugaggagucucagaccuucuucggccuguacaagcuguag

SEQ ID NO: 14116 - RNA, 846 nt, Artificial Sequence
  derived and/or modified sequence
augcagcaacccuuuaauuaccccuauccacaaaucuacugggucgauucuagcgcuaguuccccuugggccccacccggaaccguccucccuuguccuaccucugugccacgccggccuggacaacgucgaccccccccgcccccuccgcccccgccacugccuccuccaccgccgccucccccguuaccuccccugccucugccaccucugaagaaacgugggaaucacuccacuggccuuugccuccugguuauguuuuuuauggugcuagucgcccuuguggggcuagguuugggaauguuccagcuuuuccacuugcagaaagaguuagcagagcucagagaauccacaagccagaugcauacagcuucaucccuggagaagcagauagggcacccaucaccuccacccgaaaagaaggagcuuaggaaaguugcccaucugaccgguaagucaaauucccggagcaugccacucgagugggaggacacauacggaaucguguugcugucuggugucaaauacaagaagggcgggcuaguaauaaaugagacgggucuuuacuucguauauuccaaaguuuacuuccgaggccaaagcuguaauaaccuuccacugucucacaaaguuuauaugcgcaauucuaaauauccucaggaucuggugaugauggaggggaaaaugauguccuacugcacuacuggucaaaugugggcgcgauccucuuaccucggagcuguguucaaucugacuagcgcugaccaucuguauguuaacgucucugaacugucacuugugaauuuugaagagucucagaccuuuuuuggccucuauaaacuuuag

SEQ ID NO: 14117 - protein, 380 aa, Artificial Sequence
  derived and/or modified sequence
MAFVCLAIGCLYTFLISTTFGCTSSSDTEIKVNPPQDFEIVDPGYLGYLYLQWQPPLSLDHFKECTVEYELKYRNIGSETWKTIITKNLHYKDGFDLNKGIEAKIHTLLPWQCTNGSEVQSSWAETTYWISPQGIPETKVQDMDCVYYNWQYLLCSWKPGIGVLLDTNYNLFYWYEGLDHALQCVDYIKADGQNIGCRFPYLEASDYKDFYICVNGSSENKPIRSSYFTFQLQNIVKPLPPVYLTFTRESSCEIKLKWSIPLGPIPARCFDYEIEIREDDTTLVTATVENETYTLKTTNETRQLCFVVRSKVNIYCSDDGIWSEWSDKQCWEGEDLSKKTLLRFWLPFGFILILVIFVTGLLLRKPNTYPKMIPEFFCDT

SEQ ID NO: 14118 - DNA, 1143 bp, Artificial Sequence
  derived and/or modified sequence
atggccttcgtgtgcctggccatcggctgcctgtacaccttcctgatcagcaccaccttcggctgcaccagcagcagcgacaccgagatcaaggtgaaccccccccaggacttcgagatcgtggaccccggctacctgggctacctgtacctgcagtggcagccccccctgagcctggaccacttcaaggagtgcaccgtggagtacgagctgaagtacagaaacatcggcagcgagacctggaagaccatcatcaccaagaacctgcactacaaggacggcttcgacctgaacaagggcatcgaggccaagatccacaccctgctgccctggcagtgcaccaacggcagcgaggtgcagagcagctgggccgagaccacctactggatcagcccccagggcatccccgagaccaaggtgcaggacatggactgcgtgtactacaactggcagtacctgctgtgcagctggaagcccggcatcggcgtgctgctggacaccaactacaacctgttctactggtacgagggcctggaccacgccctgcagtgcgtggactacatcaaggccgacggccagaacatcggctgcagattcccctacctggaggccagcgactacaaggacttctacatctgcgtgaacggcagcagcgagaacaagcccatcagaagcagctacttcaccttccagctgcagaacatcgtgaagcccctgccccccgtgtacctgaccttcaccagagagagcagctgcgagatcaagctgaagtggagcatccccctgggccccatccccgccagatgcttcgactacgagatcgagatcagagaggacgacaccaccctggtgaccgccaccgtggagaacgagacctacaccctgaagaccaccaacgagaccagacagctgtgcttcgtggtgagaagcaaggtgaacatctactgcagcgacgacggcatctggagcgagtggagcgacaagcagtgctgggagggcgaggacctgagcaagaagaccctgctgagattctggctgcccttcggcttcatcctgatcctggtgatcttcgtgaccggcctgctgctgagaaagcccaacacctaccccaagatgatccccgagttcttctgcgacacctag

SEQ ID NO: 14119 - DNA, 1143 bp, Artificial Sequence
  derived and/or modified sequence
atggcctttgtctgcttagcgatcggatgtctctacaccttcctgatcagcaccacatttggctgtacctcatcaagcgataccgagataaaagtgaatcctcctcaggattttgaaatcgtcgacccaggctatctgggctatctctacctgcagtggcaacccccgttgagtctagaccactttaaagagtgcacggtagagtacgagctcaaatacaggaatataggtagtgaaacctggaagaccattattacaaagaatctccactacaaagatggcttcgacctcaataaaggaattgaggcaaagatccacaccctccttccctggcagtgtaccaacggatcggaagtccagagttcatgggccgagaccacatactggattagcccgcaaggtataccggagaccaaggttcaggatatggattgcgtgtactataactggcagtatttgctttgttcctggaagcctggaatcggcgttctgctggacactaattacaatctcttttactggtacgagggcctggatcacgcactccaatgcgtagattacatcaaggccgacggccaaaatataggttgccgattcccttacctcgaagccagtgactataaagatttttacatatgtgtaaacgggtcatcagagaataaaccgattagatcatcctatttcacctttcagcttcagaacatagtgaagcccctcccccctgtctacctcactttcaccagggaaagttcatgcgaaattaagctcaagtggagtattccacttggcccaatcccagctcgctgtttcgactatgagatcgaaattagagaagacgatactacattagtgacagccaccgtagagaatgagacatataccctcaaaactacaaacgagacaagacagctctgttttgtcgtccgcagtaaagttaatatctactgcagcgacgatggcatttggagcgagtggtctgacaaacagtgctgggaaggggaggatctatccaaaaagactctcctgagattctggctgccttttggattcattctgattttggtgattttcgtgacgggcctgctcctgcgcaagccaaacacgtaccctaaaatgattcctgaatttttctgcgacacttag

SEQ ID NO: 14120 - DNA, 1143 bp, Artificial Sequence
  derived and/or modified sequence
atggcctttgtgtgcctggccatcggctgcctgtacaccttcctgatcagcaccaccttcggctgcaccagcagcagtgacacagagatcaaggtgaaccccccccaggactttgagatcgtggaccccggctacctgggctacctgtacctgcagtggcagccccccctgagcctggaccacttcaaggagtgcaccgtggagtatgagctgaagtacagaaacatcggcagcgagacctggaagaccatcatcaccaagaacctgcactacaaggatggctttgacctgaacaagggcatcgaggccaagatccacaccctgctgccctggcagtgcaccaatggaagtgaggtgcagagctcctgggccgagaccacctactggatcagcccccagggcatccctgagaccaaggtgcaggacatggactgtgtgtactacaactggcagtacctgctgtgctcctggaagccaggcattggagtgctgctggacaccaactacaacctcttctactggtatgagggcctggaccacgccctgcagtgtgtggactacatcaaggcagatggccagaacatcggctgccgcttcccctacctggaggccagtgactacaaggacttctacatctgtgtgaatggcagcagcgagaacaagcccatccgcagcagctacttcaccttccagctgcagaacatcgtgaagcccctgccccctgtgtacctgaccttcacccgggagagcagctgtgagatcaagctgaagtggagcatccccctgggccccatcccagcccgctgctttgattatgaaattgagatccgggaggatgacaccaccctggtgacagccaccgtggagaatgagacctacaccctgaagaccaccaatgagacccggcagctgtgctttgtggtgcgcagcaaggtgaacatctactgcagtgatgatggcatctggagcgagtggagcgacaagcagtgctgggagggggaggacctgagcaagaagaccctgctgcgcttctggctgcccttcggcttcatcctgatcctggtgatctttgtgacaggcctgctgctgaggaagcccaacacctaccccaagatgatccctgagttcttctgtgacacctag

SEQ ID NO: 14121 - DNA, 1498 bp, Artificial Sequence
  derived and/or modified sequence
taaaaatttgatcctaagattctataaagtagccattgaggcttaccaaagttacaatattacagatggatcaggggagacggttgctatggagatggatgatatcataactccattgtgaaccagtaagaacactctcgtgagtctaacggtcttccggatgaaggctatttgaagtcgccataacctggtcagaagtgtgcctgtcggcggggagagaggcaatatcaaggttttaaatctcggagaaatggctttcgtttgcttggctatcggatgcttatatacctttctgataagcacaacatttggctgtacttcatcttcagacaccgagataaaagttaaccctcctcaggattttgagatagtggatcccggatacttaggttatctctatttgcaatggcaacccccactgtctctggatcattttaaggaatgcacagtggaatatgaactaaaataccgaaacattggtagtgaaacatggaagaccatcattactaagaatctacattacaaagatgggtttgatcttaacaagggcattgaagcgaagatacacacgcttttaccatggcaatgcacaaatggatcagaagttcaaagttcctgggcagaaactacttattggatatcaccacaaggaattccagaaactaaagttcaggatatggattgcgtatattacaattggcaatatttactctgttcttggaaacctggcataggtgtacttcttgataccaattacaacttgttttactggtatgagggcttggatcatgcattacagtgtgttgattacatcaaggctgatggacaaaatataggatgcagatttccctatttggaggcatcagactataaagatttctatatttgtgttaatggatcatcagagaacaagcctatcagatccagttatttcacttttcagcttcaaaatatagttaaacctttgccgccagtctatcttacttttactcgggagagttcatgtgaaattaagctgaaatggagcatacctttgggacctattccagcaaggtgttttgattatgaaattgagatcagagaagatgatactaccttggtgactgctacagttgaaaatgaaacatacaccttgaaaacaacaaatgaaacccgacaattatgctttgtagtaagaagcaaagtgaatatttattgctcagatgacggaatttggagtgagtggagtgataaacaatgctgggaaggtgaagacctatcgaagaaaactttgctacgtttctggctaccatttggtttcatcttaatattagttatatttgtaaccggtctgcttttgcgtaagccaaacacctacccaaaaatgattccagaatttttctgtgatacatgaagactttccatatcaagagacatggtattgactcaacagtttccagtcatggccaaatgttcaatatgagtctcaataaactgaatttttcttgcgaatgttgaa

SEQ ID NO: 14122 - DNA, 1143 bp, Artificial Sequence
  derived and/or modified sequence
atggccttcgtgtgcctggccatcggctgcctgtacaccttcctgatttcaactacatttggatgtaccagtagttctgatacagaaattaaagtgaacccccctcaggatttcgagatcgtggatcccgggtacttagggtatttgtatcttcagtggcaaccccctttaagtctggaccatttcaaggagtgcaccgtagaatatgaattaaagtataggaacattgggtcagaaacttggaaaaccattataaccaagaatcttcactacaaggacgggttcgacctcaacaaaggaattgaggccaagatacacacgctcctcccatggcagtgtacaaacgggagcgaggtacagtcctcgtgggcggagacaacttactggatctcaccccaaggtatcccagagacaaaggtgcaggacatggactgtgtgtactataattggcaatacctcctttgctcctggaaacccggtatcggcgtcctcctcgataccaattataatttattttattggtacgaggggctggaccacgcgctgcagtgtgtggattatatcaaagctgacggccaaaatattggatgtaggttcccctacctagaggccagtgactacaaagatttctacatctgcgtgaatggtagctcggagaataaaccgatcagaagctcttattttaccttccagcttcagaacatagtaaaacccctgcctccagtgtatctcactttcacacgggaaagtagttgcgaaatcaaattgaagtggtctatccccctcggtcctattcccgctcgatgttttgattacgagattgaaataagggaggacgacactactctggtgaccgcaaccgtggagaacgagacctacacattgaagaccactaacgaaactcggcagctctgctttgtggtgagatctaaagtgaatatctattgctccgacgatggaatctggagcgagtggtctgataaacagtgttgggagggcgaagatctttccaagaaaacccttctgcggttttggttgccctttggattcattctcatattagtgatcttcgttactggtttactgctcaggaagccaaacacgtaccccaagatgatccctgaattcttttgtgatacctag

SEQ ID NO: 14123 - DNA, 1143 bp, Artificial Sequence
  derived and/or modified sequence
atggccttcgtgtgcctggcaattgggtgcttatatacctttctgattagtaccaccttcggctgcacctcaagctccgacacagagatcaaggtgaaccctcctcaggatttcgagatcgtagatccgggataccttggctatttgtatttgcaatggcagccaccactgtctttggaccacttcaaggagtgcactgtggagtatgagttgaaatacagaaatatcggttccgagacctggaagacgattatcactaagaatttgcattacaaagacggattcgacctgaacaagggcatcgaagctaaaatacatactctcctgccatggcaatgcaccaacggtagtgaagtgcagtcctcgtgggccgaaactacctactggattagtcctcagggcatacccgaaactaaggttcaggatatggactgtgtgtattataattggcagtacctgctgtgctcttggaagcctgggattggtgtgcttctagatactaattataatctgttttactggtacgagggcctggatcatgcgctgcagtgtgtggattacattaaagcagacggacagaatatcggatgccggttcccctatctggaggctagcgattataaggacttttacatttgtgtcaatggatcttctgagaacaagcctatccgatcatcctacttcactttccaacttcagaatattgtaaagcctctccccccagtctatttaactttcacccgcgagtctagttgcgaaatcaaattaaagtggtccatccccctcggacccatcccagccagatgttttgactatgaaatcgaaatccgcgaagatgatacgactttggtgaccgcaactgtggagaacgaaacctacactctgaaaaccaccaacgagacaagacagctctgttttgtcgtgcggagcaaagtgaatatttactgttcggatgatggaatctggagcgagtggagcgataaacagtgctgggagggagaggacttaagtaagaagaccctgcttagattttggctgcccttcggctttattttgatacttgtcatcttcgtaacggggctgcttttgagaaaacctaacacctaccctaagatgatccccgagttcttttgcgatacatag

SEQ ID NO: 14124 - DNA, 1143 bp, Artificial Sequence
  derived and/or modified sequence
atggcgtttgtatgtctggctatcggatgcctgtacacctttctcatcagtacaacctttggttgcacaagctcatcagacactgagatcaaggtgaacccccctcaggatttcgagatagtcgatccaggctatttgggatacctttacctacagtggcagcctccattgagcctcgatcattttaaagaatgtactgtcgagtacgaattaaaataccggaatataggctcggaaacttggaaaacaattatcaccaagaatttgcactacaaggacggctttgacctcaataagggcattgaagccaaaatccacactctgttaccctggcagtgcacaaatggctcagaagtccaaagcagttgggcagaaactacatactggatctccccccaggggatcccagaaactaaagtacaggatatggattgtgtctactacaactggcaatatttgctttgttcttggaaaccaggtattggggtgctgctcgatactaactataacttgttctattggtatgaggggctggaccatgctctgcaatgtgtggactatatcaaagctgacggccagaatattggctgccggttcccctacctggaagcctcagattacaaggacttttatatttgcgtgaatggcagttccgagaacaaaccaatcagatcgagctacttcacttttcaactccagaacatcgttaagcccctgcccccggtgtacctcaccttcaccagagagtcctcttgcgagattaagttgaagtggagcatccctctgggacccattcctgctagatgcttcgattatgagatcgagattcgcgaagatgataccacgctcgttacagcaaccgtggagaatgagacttacacgctgaagaccaccaacgagacccgacaattgtgctttgttgtcagatcaaaggtgaatatttactgcagtgacgacggcatatggtccgaatggtctgacaagcagtgctgggaaggcgaagatctctcaaagaaaacccttctccgcttctggctgccttttgggtttattctcatactggtgatctttgttacagggctgctccttaggaagccaaatacttaccctaagatgatcccagagtttttctgcgatacctag

SEQ ID NO: 14125 - DNA, 1143 bp, Artificial Sequence
  derived and/or modified sequence
atggccttcgtgtgtctggcaataggctgtctgtatacatttttaatctctaccactttcggctgcacctcgtcttccgacactgagataaaggtcaatcctccccaggactttgaaatagtagatcccggatatctggggtatctgtacctgcagtggcagcctccactgtctctcgatcactttaaggagtgcaccgttgaatacgaactgaagtaccgcaacattggatcggaaacctggaagacaatcatcacaaagaaccttcactacaaggatgggtttgatctgaacaaggggatagaggctaaaatccatactctgctgccgtggcaatgcaccaatggatctgaggtgcaaagtagctgggcggaaactacctattggatatctccacagggaatccctgaaaccaaggtccaggatatggactgcgtctattataattggcaatatctgctgtgctcctggaaaccaggaataggcgtgctattagacacaaactacaaccttttctactggtacgagggcctggaccatgcgttgcagtgtgtcgactatattaaagctgacggtcagaatatcggatgccgctttccctacctggaagcatcagactataaagacttttatatttgcgttaatggcagctcagaaaataaacctatacgatcatcctactttacattccagctgcaaaacatcgtgaagccactgccaccagtctacctcacgttcactcgggagagttcatgcgagattaaacttaaatggagtattcccttgggccccatccccgccagatgcttcgattacgaaatagaaattagagaggatgataccaccctggtaacagccaccgtcgagaacgaaacgtacaccctgaaaaccacaaacgagacaaggcagctgtgtttcgtggttaggagtaaggtcaacatatactgttcagatgacggaatctggtctgagtggagcgataagcagtgctgggagggagaggacctgtcaaaaaagactctgctacgcttttggctgccatttggtttcatccttatcctggttatattcgtcaccggtctgctgcttagaaaaccaaacacctaccccaagatgatcccagaattcttctgtgacacctag

SEQ ID NO: 14126 - DNA, 1371 bp, Artificial Sequence
  derived and/or modified sequence
gtaagaacactctcgtgagtctaacggtcttccggatgaaggctatttgaagtcgccataacctggtcagaagtgtgcctgtcggcggggagagaggcaatatcaaggttttaaatctcggagaaatggctttcgtttgcttggctatcggatgcttatatacctttctgataagcacaacatttggctgtacttcatcttcagacaccgagataaaagttaaccctcctcaggattttgagatagtggatcccggatacttaggttatctctatttgcaatggcaacccccactgtctctggatcattttaaggaatgcacagtggaatatgaactaaaataccgaaacattggtagtgaaacatggaagaccatcattactaagaatctacattacaaagatgggtttgatcttaacaagggcattgaagcgaagatacacacgcttttaccatggcaatgcacaaatggatcagaagttcaaagttcctgggcagaaactacttattggatatcaccacaaggaattccagaaactaaagttcaggatatggattgcgtatattacaattggcaatatttactctgttcttggaaacctggcataggtgtacttcttgataccaattacaacttgttttactggtatgagggcttggatcatgcattacagtgtgttgattacatcaaggctgatggacaaaatataggatgcagatttccctatttggaggcatcagactataaagatttctatatttgtgttaatggatcatcagagaacaagcctatcagatccagttatttcacttttcagcttcaaaatatagttaaacctttgccgccagtctatcttacttttactcgggagagttcatgtgaaattaagctgaaatggagcatacctttgggacctattccagcaaggtgttttgattatgaaattgagatcagagaagatgatactaccttggtgactgctacagttgaaaatgaaacatacaccttgaaaacaacaaatgaaacccgacaattatgctttgtagtaagaagcaaagtgaatatttattgctcagatgacggaatttggagtgagtggagtgataaacaatgctgggaaggtgaagacctatcgaagaaaactttgctacgtttctggctaccatttggtttcatcttaatattagttatatttgtaaccggtctgcttttgcgtaagccaaacacctacccaaaaatgattccagaatttttctgtgatacatgaagactttccatatcaagagacatggtattgactcaacagtttccagtcatggccaaatgttcaatatgagtctcaataaactgaatttttcttgcgaatgttg

SEQ ID NO: 14127 - DNA, 1143 bp, Artificial Sequence
  derived and/or modified sequence
atggccttcgtgtgcctggccatcggctgcctgtacaccttcctgatctccaccactttcgggtgtacctcgagctcagatacagagattaaagtgaatcctccccaggactttgaaatcgtcgaccctggctatcttggttacttatatctgcaatggcagcccccactttcgctagaccatttcaaagaatgcactgtggaatacgagctgaagtaccggaacataggatccgagacctggaaaacaattattacgaaaaaccttcactataaagatggctttgatctaaacaaaggcattgaagcaaaaattcacacgctgcttccttggcagtgtacgaatggctccgaagtccagagcagctgggccgaaacgacatactggatctctcctcaggggataccagagacgaaggtgcaggacatggactgcgtttattataattggcagtacctcctttgcagttggaaacccggcattggtgtcctcctggataccaactataatctgttttattggtatgaaggtctcgatcacgctctccagtgcgttgattacataaaggctgacggccaaaatatcggatgtcgttttccatacctggaagctagtgattataaagacttttatatttgcgtcaatggcagcagtgagaataaacctatccgtagtagttatttcaccttccagttgcagaatatagttaagccactcccccccgtttatctgacttttacaagagaaagcagttgtgaaatcaagttaaagtggtccatccctttgggaccaataccagcacggtgcttcgattatgaaatagaaattagggaagatgatacaacgcttgtgactgcaacagtggagaatgaaacctatacacttaagaccacgaacgaaactcggcaactctgtttcgtggttagatcgaaggttaacatctattgctccgacgacgggatctggtccgagtggtcagataaacaatgctgggaaggcgaggacctgagtaagaaaactctgcttcggttctggctgcccttcgggttcattctgatactcgtaatcttcgtgacagggctgctgctcaggaaacccaacacgtaccccaagatgattcctgagttcttctgtgacacctag

SEQ ID NO: 14128 - DNA, 1143 bp, Artificial Sequence
  derived and/or modified sequence
atggccttcgtgtgcctggccatcggctgcctgtacaccttcctgatctctactacgttcgggtgtacttctagcagtgatacagagatcaaagtaaatcctcctcaggacttcgagattgttgatcccgggtatcttgggtatctttatctccagtggcagccaccattgagtttggatcattttaaagagtgcacggtcgaatacgagcttaaatacaggaatattggctccgaaacttggaagacaatcataaccaagaatctccattacaaggacggattcgacctgaataagggcatcgaggccaaaattcacaccttactgccatggcaatgcactaacggtagtgaagtgcagtcatcatgggccgagaccacatactggatatcacctcaggggattcctgaaactaaggtccaggatatggactgcgtgtattataactggcaatacctcctttgctcgtggaagcccggaattggcgtgctcctcgataccaattacaatcttttctactggtacgaggggctggaccatgcgttgcagtgcgtagactatattaaagccgatggacaaaatatcgggtgtaggtttccgtacctcgaagcgagcgattataaggatttctatatttgtgtcaatgggtcgagcgagaataagcctatcagaagtagttatttcacttttcagctgcagaatatagtgaagccattaccacccgtgtatctaaccttcactcgcgagtcttcgtgcgagatcaagttgaaatggagcatacctcttggacccatacctgctcgctgcttcgactatgagatagagatcagagaagacgacacaacgctcgtgacagctaccgtcgagaacgagacttacactctgaaaacaactaatgagacccggcagctatgctttgtggtaaggtctaaggttaatatctattgctccgatgatgggatttggagcgagtggtcggacaaacagtgttgggaaggggaggatctgtcaaagaaaacccttctgagattttggctgcccttcgggtttatccttatcctggtcatctttgtaactggtctcctcttgaggaagcccaacacttatcccaaaatgatccccgagttcttttgtgacacttag

SEQ ID NO: 14129 - DNA, 1143 bp, Artificial Sequence
  derived and/or modified sequence
atggccttcgtttgcctggcgataggctgtctgtacacgttcctcatctccacaacctttggatgcacaagctcatccgatactgagatcaaagtgaaccccccacaagattttgaaatcgtggatccaggctacctggggtacctgtacctgcagtggcaaccaccgttgagtctcgaccacttcaaagagtgcactgtcgaatatgagctgaaatatagaaacatcggaagcgagacttggaagactattataacgaagaatctgcactacaaggatggattcgacctcaataagggcatagaggccaaaattcacacgctcctgccctggcagtgcaccaacgggagcgaggtgcaatcttcttgggccgaaacaacctattggatctcacctcagggtattccagaaacaaaggtacaagatatggactgtgtatactataactggcaatatcttctgtgctcttggaagccaggcataggtgttttgctggacacaaactataatctgttctactggtatgaaggcctggaccatgccttgcagtgcgtcgactacattaaggctgacgggcagaacattggatgtagattcccctacctggaagcctctgactacaaggatttttacatctgcgtgaatggatcatccgaaaacaagcccatccggtccagttatttcacattccaacttcagaacatagtgaaacccttaccaccagtatacttgaccttcacacgcgagtctagctgtgaaattaagctgaagtggagtattcctctaggcccaataccagccaggtgctttgattatgagatagagatcagggaagacgataccaccttagttacggctactgtcgagaatgagacatacaccctgaaaactacgaatgagacacgacaactctgctttgtggtgcggtccaaggtgaatatttattgctcggacgacggcatttggagtgaatggtcagataaacagtgttgggaaggcgaagatttatccaagaaaacactgctgaggttctggctcccatttggctttattttaattttggtgatatttgttaccgggctgctacttagaaaaccaaatacctacccaaaaatgattccggagttcttctgtgatacctag

SEQ ID NO: 14130 - DNA, 1143 bp, Artificial Sequence
  derived and/or modified sequence
atggccttcgtctgtctcgccatcggatgcctgtacaccttcctgatatcaacaacttttggatgtacgagctctagcgatacagagatcaaagttaacccaccacaagacttcgagattgtagatcctgggtacctgggttatttgtacctgcagtggcaaccacctctctcattagatcattttaaggagtgtacagtggagtacgagttgaagtaccggaatatcggaagcgagacttggaagacaattatcactaagaacctgcactataaggacggattcgacctgaacaagggtattgaagccaagattcacacactgttgccttggcagtgtacaaacggttccgaggtgcaaagttcttgggccgagactacttactggatttcgccacagggcatccccgagaccaaggtgcaggacatggactgtgtgtactataattggcagtatctgttgtgcagttggaaaccaggaataggcgttctgctggataccaactataacctgttctactggtacgaagggctggaccacgctctacagtgtgtcgactacattaaagcagatggccagaatatcggctgcagatttccatacctggaagcaagtgattacaaggatttttatatctgtgtgaatggaagctcagagaacaagccaatccgatccagctacttcacttttcagcttcagaatatcgttaaacctctgccccctgtgtacctgacctttacccgggaatcttcatgcgaaataaagcttaagtggagcatccccttagggcctatcccagctcgttgcttcgattacgagatcgaaatccgcgaagatgacacgacacttgtcactgccacggtggaaaatgagacatacaccttgaagacaactaacgaaacgcgacagctgtgcttcgtagttaggtctaaggtgaatatatattgtagcgatgatggcatctggagcgaatggagcgataagcagtgctgggagggggaagacctgagcaagaaaacactgctgagattctggttaccctttggatttatcctgattctggttatctttgtcactgggcttttgctgaggaaacccaacacgtatccaaagatgatacccgaattcttttgcgatacgtag

SEQ ID NO: 14131 - protein, 199 aa, Artificial Sequence
  derived and/or modified sequence
MNCVCRLVLVVLSLWPDTAVAPGPPPGPPRVSPDPRAELDSTVLLTRSLLADTRQLAAQLRDKFPADGDHNLDSLPTLAMSAGALGALQLPGVLTRLRADLLSYLRHVQWLRRAGGSSLKTLEPELGTLQARLDRLLRRLQLLMSRLALPQPPPDPPAPPLAPPSSAWGGIRAAHAILGGLHLTLDWAVRGLLLLKTRL

SEQ ID NO: 14132 - DNA, 600 bp, Artificial Sequence
  derived and/or modified sequence
atgaactgcgtgtgcagactggtgctggtggtgctgagcctgtggcccgacaccgccgtggcccccggccccccccccggcccccccagagtgagccccgaccccagagccgagctggacagcaccgtgctgctgaccagaagcctgctggccgacaccagacagctggccgcccagctgagagacaagttccccgccgacggcgaccacaacctggacagcctgcccaccctggccatgagcgccggcgccctgggcgccctgcagctgcccggcgtgctgaccagactgagagccgacctgctgagctacctgagacacgtgcagtggctgagaagagccggcggcagcagcctgaagaccctggagcccgagctgggcaccctgcaggccagactggacagactgctgagaagactgcagctgctgatgagcagactggccctgccccagcccccccccgacccccccgccccccccctggccccccccagcagcgcctggggcggcatcagagccgcccacgccatcctgggcggcctgcacctgaccctggactgggccgtgagaggcctgctgctgctgaagaccagactgtag

SEQ ID NO: 14133 - DNA, 600 bp, Artificial Sequence
  derived and/or modified sequence
atgaactgtgtttgtaggctagtgttagtagtactgtccctgtggcctgataccgctgtcgcccccggcccccccccaggccctcctagggtgtctccagatccccgagctgaattagactctactgttctgctcaccaggtcgctgctggcagataccaggcagctggctgcccagctaagggacaagttccccgccgatggagatcacaatctcgactccctccctacactggcaatgtccgcaggagccctgggcgctctgcaacttcccggcgtcctgacacgcctgagagctgatcttctttcatatctcaggcatgtgcagtggctcagacgcgccggaggtagttccttgaagactctcgaacccgaattgggcaccctgcaagccaggctcgaccggttgttaagacgactccagctcctgatgagcaggttggcactgcctcagccacctccagatccgccagctccaccactcgcacctccctcatccgcttggggaggcatcagggcagcccacgctatacttggcggcctccacttaaccctcgattgggcagttcgaggcctactgctcctgaagacgagattgtag

SEQ ID NO: 14134 - DNA, 600 bp, Artificial Sequence
  derived and/or modified sequence
atgaactgtgtgtgccgcctggtgctggtggtgctgagcctgtggccagacacagctgtggcccctggccccccacctggccccccccgggtgtccccagaccccagggctgagctggacagcacagtgctgctgaccaggagcctgctggccgacacccggcagctggccgcccagctgcgggacaagtttcctgcagatggagaccacaacctggacagcctgcccaccctggccatgtctgctggggccctgggcgccctgcagctgcccggggtgctgacccggctgcgggctgacctgctgagctacctgcggcacgtgcagtggctgcggcgggccggcggcagcagcctgaagaccctggagcctgagctgggcaccctgcaggcccggctggaccggctgctgcggcggctgcagctgctgatgagccggctggccctgccccagcccccaccagaccccccagccccacccctggccccacccagcagcgcctggggcggcatccgggccgcccacgccatcctgggcggcctgcacctgaccctggactgggccgtgcggggcctgctgctgctgaagacccggctgtag

SEQ ID NO: 14135 - DNA, 600 bp, Artificial Sequence
  derived and/or modified sequence
atgaactgcgtgtgccggctggtgctggtggtgctgagcctgtggcctgacaccgccgtggctccagggccaccacccggtccacctagagtatctcctgaccctagggccgagctagatagtacagtcttattaacacgcagtttgctggcagacacccgtcagttggctgctcagctgcgcgataagtttccagccgatggagatcacaacctcgactcactgcccacgttggctatgtccgcaggtgcccttggggccctgcaacttcccggcgtgctgactcgcctacgagcagatctcctgtcctatctccgccacgttcaatggctgcgccgggcaggcggttctagcctcaagactctggaacccgagctagggaccctccaagccaggcttgacaggctgctgagacgtctccagctgctgatgagcagactggccctgccacagcctcctccggaccccccagctcctcctctggctcctccaagctcagcctggggtgggattcgggccgcccacgccatccttggcggcttacacttgacattggactgggcagtgcgtggactgctccttctgaaaacccggctgtag

SEQ ID NO: 14136 - DNA, 600 bp, Artificial Sequence
  derived and/or modified sequence
atgaattgtgtctgccgcctggtgctagtagtgctgtcgctctggccagacaccgccgtggctccgggtcccccacccggacccccaagggtgagtccggatcctcgagcagaattggattccactgtgttactcacgcggtctcttttagcggacacaaggcagctagcagctcagctcagggataagttccctgcggacggagaccacaatctagattccctgcccactctggcaatgtctgccggagctttgggcgctctgcaactgccgggtgttctcactaggctgcgggcagacctgctgtcgtacctgagacatgtccagtggctcagaagggccggtggaagctcgctgaaaacgttagaacccgaactgggaaccctgcaggctagactggataggctcctgcggaggctccagcttctaatgtcgagattagctctcccacagcctcctcccgaccccccagctcccccactcgcccctccctccagcgcgtggggaggaattcgggcagcacacgctatcttaggcggtttgcatttaacattggactgggccgtccgtggactgctgctcctgaaaacacgcctgtag

SEQ ID NO: 14137 - DNA, 600 bp, Artificial Sequence
  derived and/or modified sequence
atgaactgcgtatgtcgcttggtgctagtggtcctctccctatggccagacacagccgttgctccaggacccccaccagggcctccaagagtttctcccgaccccagggctgagctcgacagcactgtcctcctcacaagatcacttttagccgacacccggcagctcgctgctcagctgcgcgacaagtttcctgccgatggcgaccacaacctggattcactgccaaccttggctatgagcgcgggggccttgggcgctctgcagctgcccggtgtgttgaccagactgagagcagacttactgtcctacctcagacacgttcaatggctccgacgcgcaggcggatctagcctcaagaccctggaacccgagctcggaacacttcaagctcgcttggacaggctgctgcgtagactgcaattgctcatgtcgcgcctcgctctcccccagccaccaccggatcccccagcaccaccgctggcccccccatcgtcagcctggggaggtatcagggccgcgcatgcaatcctcggaggcctgcacttaacactcgattgggctgttagagggctcctgctgcttaagacccgcctatag

SEQ ID NO: 14138 - DNA, 600 bp, Artificial Sequence
  derived and/or modified sequence
atgaattgtgtgtgccgcctcgtccttgttgtcctgagtctgtggccagataccgcagtggctccaggccctccgccagggcctcctagagtgagccccgacccccgcgccgaactcgactcgaccgtgctgcttactagatctttgctggctgacaccagacagctggccgcacagttacgagataagtttcctgccgatggcgaccataacctagacagccttcccacacttgcaatgtccgctggtgcacttggcgccctgcaacttcccggagtgctcacacgcctgagggccgatttactgtcctacctcagacacgttcaatggctccgacgcgcaggcggatctagcctcaagaccctggaacccgagctcggaacacttcaagctcgcttggacaggctgctgcgtagactgcaattgctcatgtcgcgcctcgctctcccccagccaccaccggatcccccagcaccaccgctggcccccccatcgtcagcctggggaggtatcagggccgcgcatgcaatcctcggaggcctgcacttaacactcgattgggctgttagagggctcctgctgcttaagacccgcctatag

SEQ ID NO: 14139 - DNA, 2354 bp, Artificial Sequence
  derived and/or modified sequence
gctcagggcacatgcctcccctccccaggccgcggcccagctgaccctcggggctcccccggcagcggacagggaagggttaaaggcccccggctccctgccccctgccctggggaacccctggccctgtggggacatgaactgtgtttgccgcctggtcctggtcgtgctgagcctgtggccagatacagctgtcgcccctgggccaccacctggcccccctcgagtttccccagaccctcgggccgagctggacagcaccgtgctcctgacccgctctctcctggcggacacgcggcagctggctgcacagctgagggacaaattcccagctgacggggaccacaacctggattccctgcccaccctggccatgagtgcgggggcactgggagctctacagctcccaggtgtgctgacaaggctgcgagcggacctactgtcctacctgcggcacgtgcagtggctgcgccgggcaggtggctcttccctgaagaccctggagcccgagctgggcaccctgcaggcccgactggaccggctgctgcgccggctgcagctcctgatgtcccgcctggccctgccccagccacccccggacccgccggcgcccccgctggcgcccccctcctcagcctgggggggcatcagggccgcccacgccatcctgggggggctgcacctgacacttgactgggccgtgaggggactgctgctgctgaagactcggctgtgacccggggcccaaagccaccaccgtccttccaaagccagatcttatttatttatttatttcagtactgggggcgaaacagccaggtgatccccccgccattatctccccctagttagagacagtccttccgtgaggcctggggggcatctgtgccttatttatacttatttatttcaggagcaggggtgggaggcaggtggactcctgggtccccgaggaggaggggactggggtcccggattcttgggtctccaagaagtctgtccacagacttctgccctggctcttccccatctaggcctgggcaggaacatatattatttatttaagcaattacttttcatgttggggtggggacggaggggaaagggaagcctgggtttttgtacaaaaatgtgagaaacctttgtgagacagagaacagggaattaaatgtgtcatacatatccacttgagggcgatttgtctgagagctggggctggatgcttgggtaactggggcagggcaggtggaggggagacctccattcaggtggaggtcccgagtgggcggggcagcgactgggagatgggtcggtcacccagacagctctgtggaggcagggtctgagccttgcctggggccccgcactgcatagggccttttgtttgttttttgagatggagtctcgctctgttgcctaggctggagtgcagtgaggcaatctgaggtcactgcaacctccacctcccgggttcaagcaattctcctgcctcagcctcccgattagctgggatcacaggtgtgcaccaccatgcccagctaattatttatttcttttgtatttttagtagagacagggtttcaccatgttggccaggctggtttcgaactcctgacctcaggtgatcctcctgcctcggcctcccaaagtgctgggattacaggtgtgagccaccacacctgacccataggtcttcaataaatatttaatggaaggttccacaagtcaccctgtgatcaacagtacccgtatgggacaaagctgcaaggtcaagatggttcattatggctgtgttcaccatagcaaactggaaacaatctagatatccaacagtgagggttaagcaacatggtgcatctgtggatagaacgccacccagccgcccggagcagggactgtcattcagggaggctaaggagagaggcttgcttgggatatagaaagatatcctgacattggccaggcatggtggctcacgcctgtaatcctggcactttgggaggacgaagcgagtggatcactgaagtccaagagttcgagaccggcctgcgagacatggcaaaaccctgtctcaaaaaagaaagaatgatgtcctgacatgaaacagcaggctacaaaaccactgcatgctgtgatcccaattttgtgtttttctttctatatatggattaaaacaaaaatcctaaagggaaatacgccaaaatgttgacaatgactgtctccaggtcaaaggagagaggtgggattgtgggtgacttttaatgtgtatgattgtctgtattttacagaatttctgccatgactgtgtattttgcatgacacattttaaaaataataaacactatttttagaat

SEQ ID NO: 14140 - RNA, 600 nt, Artificial Sequence
  derived and/or modified sequence
augaacugcguaugucgcuuggugcuagugguccucucccuauggccagacacagccguugcuccaggacccccaccagggccuccaagaguuucucccgaccccagggcugagcucgacagcacuguccuccucacaagaucacuuuuagccgacacccggcagcucgcugcucagcugcgcgacaaguuuccugccgauggcgaccacaaccuggauucacugccaaccuuggcuaugagcgcgggggccuugggcgcucugcagcugcccgguguguugaccagacugagagcagacuuacuguccuaccucagacacguucaauggcuccgacgcgcaggcggaucuagccucaagacccuggaacccgagcucggaacacuucaagcucgcuuggacaggcugcugcguagacugcaauugcucaugucgcgccucgcucucccccagccaccaccggaucccccagcaccaccgcuggcccccccaucgucagccuggggagguaucagggccgcgcaugcaauccucggaggccugcacuuaacacucgauugggcuguuagagggcuccugcugcuuaagacccgccuauag

SEQ ID NO: 14141 - RNA, 600 nt, Artificial Sequence
  derived and/or modified sequence
augaauugugugugccgccucguccuuguuguccugagucuguggccagauaccgcaguggcuccaggcccuccgccagggccuccuagagugagccccgacccccgcgccgaacucgacucgaccgugcugcuuacuagaucuuugcuggcugacaccagacagcuggccgcacaguuacgagauaaguuuccugccgauggcgaccauaaccuagacagccuucccacacuugcaauguccgcuggugcacuuggcgcccugcaacuucccggagugcucacacgccugagggccgauuuacuguccuaccucagacacguucaauggcuccgacgcgcaggcggaucuagccucaagacccuggaacccgagcucggaacacuucaagcucgcuuggacaggcugcugcguagacugcaauugcucaugucgcgccucgcucucccccagccaccaccggaucccccagcaccaccgcuggcccccccaucgucagccuggggagguaucagggccgcgcaugcaauccucggaggccugcacuuaacacucgauugggcuguuagagggcuccugcugcuuaagacccgccuauag

SEQ ID NO: 14142 - protein, 2489 aa, Artificial Sequence
  derived and/or modified sequence
MGASSPRSPEPVGPPAPGLPFCCGGSLLAVVVLLALPVAWGQCNAPEWLPFARPTNLTDEFEFPIGTYLNYECRPGYSGRPFSIICLKNSVWTGAKDRCRRKSCRNPPDPVNGMVHVIKGIQFGSQIKYSCTKGYRLIGSSSATCIISGDTVIWDNETPICDRIPCGLPPTITNGDFISTNRENFHYGSVVTYRCNPGSGGRKVFELVGEPSIYCTSNDDQVGIWSGPAPQCIIPNKCTPPNVENGILVSDNRSLFSLNEVVEFRCQPGFVMKGPRRVKCQALNKWEPELPSCSRVCQPPPDVLHAERTQRDKDNFSPGQEVFYSCEPGYDLRGAASMRCTPQGDWSPAAPTCEVKSCDDFMGQLLNGRVLFPVNLQLGAKVDFVCDEGFQLKGSSASYCVLAGMESLWNSSVPVCEQIFCPSPPVIPNGRHTGKPLEVFPFGKTVNYTCDPHPDRGTSFDLIGESTIRCTSDPQGNGVWSSPAPRCGILGHCQAPDHFLFAKLKTQTNASDFPIGTSLKYECRPEYYGRPFSITCLDNLVWSSPKDVCKRKSCKTPPDPVNGMVHVITDIQVGSRINYSCTTGHRLIGHSSAECILSGNAAHWSTKPPICQRIPCGLPPTIANGDFISTNRENFHYGSVVTYRCNPGSGGRKVFELVGEPSIYCTSNDDQVGIWSGPAPQCIIPNKCTPPNVENGILVSDNRSLFSLNEVVEFRCQPGFVMKGPRRVKCQALNKWEPELPSCSRVCQPPPDVLHAERTQRDKDNFSPGQEVFYSCEPGYDLRGAASMRCTPQGDWSPAAPTCEVKSCDDFMGQLLNGRVLFPVNLQLGAKVDFVCDEGFQLKGSSASYCVLAGMESLWNSSVPVCEQIFCPSPPVIPNGRHTGKPLEVFPFGKTVNYTCDPHPDRGTSFDLIGESTIRCTSDPQGNGVWSSPAPRCGILGHCQAPDHFLFAKLKTQTNASDFPIGTSLKYECRPEYYGRPFSITCLDNLVWSSPKDVCKRKSCKTPPDPVNGMVHVITDIQVGSRINYSCTTGHRLIGHSSAECILSGNAAHWSTKPPICQRIPCGLPPTIANGDFISTNRENFHYGSVVTYRCNPGSGGRKVFELVGEPSIYCTSNDDQVGIWSGPAPQCIIPNKCTPPNVENGILVSDNRSLFSLNEVVEFRCQPGFVMKGPRRVKCQALNKWEPELPSCSRVCQPPPDVLHAERTQRDKDNFSPGQEVFYSCEPGYDLRGAASMRCTPQGDWSPAAPTCEVKSCDDFMGQLLNGRVLFPVNLQLGAKVDFVCDEGFQLKGSSASYCVLAGMESLWNSSVPVCEQIFCPSPPVIPNGRHTGKPLEVFPFGKAVNYTCDPHPDRGTSFDLIGESTIRCTSDPQGNGVWSSPAPRCGILGHCQAPDHFLFAKLKTQTNASDFPIGTSLKYECRPEYYGRPFSITCLDNLVWSSPKDVCKRKSCKTPPDPVNGMVHVITDIQVGSRINYSCTTGHRLIGHSSAECILSGNTAHWSTKPPICQRIPCGLPPTIANGDFISTNRENFHYGSVVTYRCNLGSRGRKVFELVGEPSIYCTSNDDQVGIWSGPAPQCIIPNKCTPPNVENGILVSDNRSLFSLNEVVEFRCQPGFVMKGPRRVKCQALNKWEPELPSCSRVCQPPPEILHGEHTPSHQDNFSPGQEVFYSCEPGYDLRGAASLHCTPQGDWSPEAPRCAVKSCDDFLGQLPHGRVLFPLNLQLGAKVSFVCDEGFRLKGSSVSHCVLVGMRSLWNNSVPVCEHIFCPNPPAILNGRHTGTPSGDIPYGKEISYTCDPHPDRGMTFNLIGESTIRCTSDPHGNGVWSSPAPRCELSVRAGHCKTPEQFPFASPTIPINDFEFPVGTSLNYECRPGYFGKMFSISCLENLVWSSVEDNCRRKSCGPPPEPFNGMVHINTDTQFGSTVNYSCNEGFRLIGSPSTTCLVSGNNVTWDKKAPICEIISCEPPPTISNGDFYSNNRTSFHNGTVVTYQCHTGPDGEQLFELVGERSIYCTSKDDQVGVWSSPPPRCISTNKCTAPEVENAIRVPGNRSFFTLTEIIRFRCQPGFVMVGSHTVQCQTNGRWGPKLPHCSRVCQPPPEILHGEHTLSHQDNFSPGQEVFYSCEPSYDLRGAASLHCTPQGDWSPEAPRCTVKSCDDFLGQLPHGRVLLPLNLQLGAKVSFVCDEGFRLKGRSASHCVLAGMKALWNSSVPVCEQIFCPNPPAILNGRHTGTPFGDIPYGKEISYACDTHPDRGMTFNLIGESSIRCTSDPQGNGVWSSPAPRCELSVPAACPHPPKIQNGHYIGGHVSLYLPGMTISYICDPGYLLVGKGFIFCTDQGIWSQLDHYCKEVNCSFPLFMNGISKELEMKKVYHYGDYVTLKCEDGYTLEGSPWSQCQADDRWDPPLAKCTSRTHDALIVGTLSGTIFFILLIIFLSWIILKHRKGNNAHENPKEVAIHLHSQGGSSVHPRTLQTNEENSRVLP

SEQ ID NO: 14143 - protein, 584 aa, Artificial Sequence
  derived and/or modified sequence
GHCQAPDHFLFAKLKTQTNASDFPIGTSLKYECRPEYYGRPFSITCLDNLVWSSPKDVCKRKSCKTPPDPVNGMVHVITDIQVGSRINYSCTTGHRLIGHSSAECILSGNAAHWSTKPPICQRIPCGLPPTIANGDFISTNRENFHYGSVVTYRCNPGSGGRKVFELVGEPSIYCTSNDDQVGIWSGPAPQCIIPNKCTPPNVENGILVSDNRSLFSLNEVVEFRCQPGFVMKGPRRVKCQALNKWEPELPSCSRVCQPPPDVLHAERTQRDKDNFSPGQEVFYSCEPGYDLRGAASMRCTPQGDWSPAAPTCEVKSCDDFMGQLLNGRVLFPVNLQLGAKVDFVCDEGFQLKGSSASYCVLAGMESLWNSSVPVCEQIFCPSPPVIPNGRHTGKPLEVFPFGKTVNYTCDPHPDRGTSFDLIGESTIRCTSDPQGNGVWSSPAPRCGILGHCQAPDHFLFAKLKTQTNASDFPIGTSLKYECRPEYYGRPFSITCLDNLVWSSPKDVCKRKSCKTPPDPVNGMVHVITDIQVGSRINYSCTTGHRLIGHSSAECILSGNAAHWSTKPPICQRSCHLPCELFGR

SEQ ID NO: 14144 - DNA, 7470 bp, Artificial Sequence
  derived and/or modified sequence
atgggggccagctctcctcgctccccggagcctgttggtccacctgcccccgggttacccttctgttgtggaggctccttactggccgttgtggtactgctggccctgcccgtggcttggggccagtgcaacgcccccgaatggcttccctttgcacggcctacgaacctgacagatgagttcgagtttcccatcggaacctacctgaattatgaatgtagaccaggttacagcgggcgaccattcagcatcatctgcctaaagaactccgtgtggacgggagccaaggacagatgtcgtagaaaatcttgtcggaatcccccggatcccgttaacggcatggttcacgtgatcaagggcatccagttcggctcgcagatcaaatatagctgcactaaggggtatcgactgatcggatcgtcttccgccacctgcattatcagtggagataccgtcatctgggacaatgagactccgatctgtgacaggatcccctgcgggttgccgcctactatcactaatggagattttatttctaccaacagggaaaattttcactatggctctgtcgtaacttatagatgcaaccccgggagtggtgggaggaaggtattcgaactggtgggggagcccagcatctactgcacatcaaatgatgatcaggtggggatctggtccggaccagcaccccagtgcatcattcccaacaaatgcaccccgccaaacgttgaaaatggcatactcgtcagcgacaaccgctcactgttctcattgaatgaagtggtggagtttcgatgccagccaggattcgtaatgaaggggcctcgcagggtgaaatgccaggccctgaacaaatgggaacccgaactgcccagttgcagtcgcgtgtgccagcctccacctgatgtgctacacgccgagaggacccagcgcgataaagacaacttcagccctggacaggaagtgttttattcttgcgaaccgggctatgacctcaggggagccgcctctatgagatgtactccccagggggactggagccccgccgccccaacttgtgaggtcaagtcctgtgatgactttatgggtcagttactaaatggcagggtactgtttccagtgaacctccagctgggcgccaaggtagacttcgtgtgtgatgaggggttccaactcaagggctcttcagccagctactgcgtgttggctggcatggagtcactgtggaactcgagcgttcccgtctgtgagcagattttttgcccctcaccgccagtgatcccaaatggcagacacacaggcaaacccttagaagtttttcccttcggcaaaactgtaaattatacatgcgacccacaccctgatcggggaacctcatttgacctgattggcgagagcacaatccgttgtacttcagacccacagggcaatggagtttggtcaagccccgcccccagatgcggcatcctggggcactgccaagcaccagaccatttccttttcgctaagctgaaaactcagacgaatgctagcgacttcccgattggcaccagcctcaagtatgaatgccgaccagaatactacggccgaccattcagcataacatgtctggataaccttgtctggtcctccccgaaagacgtgtgcaaacggaaatcatgcaagaccccccccgatccagtcaacggcatggtgcacgtcatcaccgacattcaggtgggctcgaggatcaactactcctgcacgacaggtcaccgcttgataggccactcttctgcagagtgtattctgtctgggaatgccgctcactggtccacaaagccccctatttgtcagcgcataccttgcggcctgccacctaccatcgccaatggtgacttcatctcaactaaccgtgagaactttcattacggatccgtcgtgacttatcgatgcaatcctggaagcggggggaggaaggtgtttgaactggtcggggagccctcaatctactgcacctccaatgatgaccaggtgggcatctggagtggcccagcccctcaatgcatcatcccgaataagtgcacccctccaaatgttgagaacggtatcctggtttccgataacaggtccttattctctctgaacgaagtggtggagtttaggtgtcagccgggcttcgtgatgaaaggaccgagacgagtaaaatgccaggctctcaacaaatgggagccagaacttcctagctgttcacgggtgtgccagcctccgcccgatgttctgcatgccgagagaacccagagagacaaggataacttctcccccggtcaagaagtcttctattcttgtgagccagggtacgatctgcgaggagccgcaagcatgcgctgcaccccccagggcgactggagccccgcagcccccacgtgcgaagtgaaaagctgcgatgacttcatgggccagcttctgaatggcagggttttatttcccgtaaatttacagctgggcgctaaagttgacttcgtgtgtgacgaaggatttcaacttaagggatctagcgcttcctattgcgtcctggccggtatggaatctctttggaattcttctgtcccagtgtgcgaacaaattttctgcccaagtccccccgttattcccaacgggaggcatactggaaagccgctagaggtgttcccattcggaaaaaccgtcaactatacgtgcgatcctcaccctgatagagggacctcctttgacttaatcggcgaatctactataagatgtactagcgaccctcaaggtaatggcgtgtggtcgtctccggcaccgcgctgtggcatcttaggccattgtcaggctccagaccactttctctttgccaaactgaagacccagactaatgcgtcagattttccaatagggacatcccttaagtatgaatgtcggcccgaatactatgggcgacccttttccataacctgcctcgataatctcgtgtggtctagtcccaaagacgtgtgcaagagaaagtcctgtaaaacacccccagatcccgttaatggaatggtgcacgtaatcaccgacatccaggtgggctcgagaatcaactatagttgcacaacgggtcatcggctgattggccattcctctgctgagtgtatattgtctggaaacgcggcgcactggtctactaagccacctatctgtcaaagaatcccttgtggcctccctccaacaatcgcgaacggggattttatttctaccaatagagagaattttcattacggatctgtggtgacatataggtgtaatcctggatctggaggacgaaaagtgtttgagctagtgggagagcctagcatctactgcaccagcaatgatgaccaggtcggaatttggtctggaccagcaccccagtgcatcatcccgaataaatgcacgccccccaatgtcgagaatggaatcctcgtgagcgataacaggtcacttttctcacttaacgaagtcgtggagtttcgctgtcagccaggtttcgtcatgaaaggccctagacgtgttaaatgtcaggctctgaataagtgggaaccagagctgccttcatgttccagggtgtgtcagccaccccccgacgtcctccatgccgagcggactcagagagacaaggacaactttagcccaggtcaggaagtgttctatagttgcgaaccaggctatgatcttcgcggcgcagcatccatgcggtgcactcctcagggggattggtccccagctgcccctacctgcgaggtgaagagctgcgacgatttcatgggtcaactcttgaatggccgggtcctatttccagtcaacctacagctcggcgctaaggtcgattttgtctgtgacgaggggtttcagttgaagggcagtagcgcgagttattgcgttcttgctggaatggaaagtctgtggaatagcagtgtgcccgtctgcgagcagatattctgtccctcgcctcctgtgatcccaaacggccggcatacagggaaaccattggaggtctttccattcggaaaagcagtgaattatacctgcgatcctcaccctgatagaggcacctcctttgatctcataggggagagcacaatcagatgcacatcggatccccaggggaacggggtgtggtctagtcctgcccccagatgcggtattctgggtcattgccaggcgccagaccatttcctgttcgccaagctaaaaactcagacgaacgcatctgactttccaattggaacctccctcaaatacgagtgcagacctgaatactacggccggccattcagtattacttgcctcgataacttggtttggtcatctccaaaggatgtgtgtaagcgcaagagctgtaaaacgccacctgaccccgtcaacggaatggtccacgtgataactgacatccaggtaggaagtcggataaactatagctgcacaaccggccatcgtctgattggacattcatcagccgagtgtattctgtctggaaacacagcacactggtccactaaacctccaatttgtcagcggataccctgtggcctgccccctactattgcaaatggcgactttatctccaccaacagagaaaattttcactatgggagcgtcgtgacatataggtgcaatttaggaagccgcggcaggaaggttttcgagctggttggcgaaccctctatttactgcacctcaaacgatgaccaagttggtatttggtccgggcctgcaccgcagtgtattatccccaacaaatgcacaccacctaatgtggagaacgggattcttgttagtgataatcggtctctcttctctctgaatgaggttgtggaattcaggtgtcagccagggttcgttatgaagggtcccagaagggttaagtgccaggcactcaataaatgggagcctgagctcccctcttgcagtcgggtctgccaaccacctcctgagattctccacggcgagcatactcccagccatcaagacaatttctcacctggacaagaagtgttctattcctgcgaacctggctacgatctccggggggcggcatcacttcactgcactccacagggagactggtcacctgaggctcctaggtgcgccgtgaagtcatgtgatgatttcctggggcagctcccacacgggcgtgtacttttcccgttaaatctgcaactgggggccaaggtgtctttcgtctgcgacgaaggatttagactgaagggaagctccgtctctcattgtgtcctcgtgggaatgaggagcctgtggaacaacagcgtccctgtgtgtgaacatatcttctgccctaatccccctgctatcctgaatggacgccacacagggacgccatccggtgacatcccctacggcaaagagatcagttatacctgcgaccctcatcctgataggggtatgacattcaatctgattggagaaagcactattagatgcaccagtgacccacacggaaacggcgtttggtcgtcccccgccccacgttgtgagctcagtgttagagcgggacattgcaaaacacccgagcagtttccattcgcttcgccaaccatccctattaatgacttcgagtttccagtaggaacttccctgaactatgagtgtcgtcccgggtacttcgggaaaatgtttagtattagttgtctcgagaatctggtctggagctccgtcgaggataattgtagacggaaatcttgtgggcctcctcctgagccatttaatgggatggtccacatcaacacagatacacagttcggatctaccgttaactacagttgcaatgaggggttcagattgatcggatctccgtcgaccacttgtctcgttagcggaaacaatgtcacatgggacaaaaaggcaccaatctgcgagatcataagttgtgaaccacctcctaccatcagtaacggcgacttctattcgaataatcgcacaagcttccacaacggcacagtggtgacctatcagtgtcacacaggcccagacggcgagcagctttttgagctggtgggcgaaaggagtatctactgtaccagcaaggatgatcaggtgggggtgtggagttcaccacctccacggtgcattagcactaacaagtgtaccgctccagaagtggaaaacgccatacgcgtgccaggcaacagatcgttctttaccttaaccgaaattattaggtttcgatgtcagccaggtttcgtcatggtcggaagtcatacggtgcagtgtcagaccaacggtaggtggggccccaaactgccccactgttccagggtctgccagccccccccagaaatcctgcacggcgaacatactttgtctcatcaagataacttttcccctgggcaggaggttttctacagctgcgagcctagttatgatctgcgaggcgcagcaagtctacactgcaccccgcaaggggactggtctcccgaagccccaagatgtactgtgaagtcctgtgatgacttcttgggacaactgccccacggacgtgttttactccctttgaacctgcaactcggagccaaagtctccttcgtgtgtgacgagggatttcggctgaagggccggtctgcttctcactgtgtgctggctgggatgaaggccctctggaatagttcggtgcctgtgtgtgagcagattttctgccccaatcccccggccattttaaatggacggcataccggaaccccctttggagacatcccctacggaaaagagatttcttatgcatgcgacacacaccccgaccggggcatgacttttaacctcataggggaatccagcatcagatgtacatcagatccccaggggaatggcgtgtggagcagcccagctcccagatgtgaactctcagtgcctgctgcatgtccacatcctcccaagattcagaacggacactacattggtgggcatgtgagtctttatcttcccgggatgactatctcatacatctgtgaccctggataccttctggtggggaaagggttcatcttttgcaccgaccaggggatatggtcccagttagatcattattgtaaggaggtcaattgtagcttcccgctgtttatgaatggtatctccaaagagctggagatgaaaaaagtgtaccactacggcgactacgttaccctcaagtgtgaggatggatacacccttgaagggtcgccatggtcacagtgccaggccgacgatagatgggaccctccactggcaaaatgtacctctagaactcacgatgcccttatagtgggcaccctaagtggaaccatcttttttatactgttgatcatcttcttaagctggatcatattgaagcataggaagggcaataacgcacatgaaaaccctaaggaagtggccatccatctgcattcccagggaggtagctcagttcatccccggactctgcagactaacgaagaaaacagtcgggtcctaccctag

SEQ ID NO: 14145 - DNA, 7470 bp, Artificial Sequence
  derived and/or modified sequence
atgggcgccagcagccccaggagccctgagcctgtgggccccccagcccctggcctgcccttctgctgcggcggcagcctgctggccgtggtggtgctgctggccctgcctgtggcctggggccagtgcaatgcccctgagtggctgccctttgcccggcccaccaacctgacagatgaatttgagttccccatcggcacctacctgaactatgagtgcaggcctggctacagcggccggcccttcagcatcatctgcctgaagaacagcgtgtggacaggagccaaggaccgctgcaggaggaagagctgcagaaatcctccagaccctgtgaatggcatggtgcacgtgatcaagggcatccagtttggcagccagatcaagtacagctgcaccaagggctaccgcctcatcggcagcagcagcgccacctgcatcatcagcggggacaccgtcatctgggacaatgagacccccatctgtgaccgcatcccctgtggcctgccccccaccatcaccaacggggacttcatcagcaccaaccgggagaacttccactacggctctgtggtgacctaccgctgcaaccctggcagcggcggcaggaaggtgtttgagctggtgggggagcccagcatctactgcaccagcaatgatgaccaggtgggcatctggagcggccctgccccccagtgcatcatccccaacaagtgcaccccacccaacgtggagaatggcatcctggtgtctgacaacagaagcctcttcagcctgaatgaggtggtggagttccgctgccagcccggctttgtgatgaagggcccccggcgggtgaagtgccaggccctgaacaagtgggagcctgagctgcccagctgcagccgggtgtgccagcccccaccagatgtgctgcacgccgagaggacccagagggacaaggacaacttcagccctggccaggaggtgttctacagctgtgagcccggctatgacctgcggggagctgcctccatgcgctgcaccccccagggcgactggagccctgctgcccccacctgtgaggtgaagagctgtgatgacttcatgggccagctgctgaatggccgggtgctcttccctgtgaacctgcagctgggcgccaaggtggactttgtgtgtgatgagggcttccagctgaagggcagcagcgccagctactgtgtgctggccggcatggagagcctgtggaacagctctgtgcctgtgtgtgagcagatcttctgccccagcccccctgtgatccccaacggccgccacacaggcaagcccctggaggtgttcccctttgggaagacagtgaactacacctgtgacccccacccagaccggggcaccagctttgacctgattggagagagcaccatccgctgcaccagtgacccccagggcaatggagtgtggagcagccctgccccccgctgtggcatcctgggccactgccaggccccagaccacttcctgtttgccaagctgaagacccagaccaatgccagtgacttccccatcggcaccagcctgaagtatgagtgcaggcctgagtactacggccggcccttcagcatcacctgcctggacaacctggtgtggagcagccccaaggatgtgtgcaagaggaagagctgcaagaccccaccagaccctgtgaatggcatggtgcacgtgatcacagacatccaggtgggcagccgcatcaactacagctgcaccaccggccacaggctcatcggccacagcagcgctgagtgcatcctgtctggaaatgctgcccactggagcaccaagccacccatctgccagaggatcccctgtggcctgccccccaccatcgccaacggggacttcatcagcaccaaccgggagaacttccactacggctctgtggtgacctaccgctgcaaccctggcagcggcggcaggaaggtgtttgagctggtgggggagcccagcatctactgcaccagcaatgatgaccaggtgggcatctggagcggccctgccccccagtgcatcatccccaacaagtgcaccccacccaacgtggagaatggcatcctggtgtctgacaacagaagcctcttcagcctgaatgaggtggtggagttccgctgccagcccggctttgtgatgaagggcccccggcgggtgaagtgccaggccctgaacaagtgggagcctgagctgcccagctgcagccgggtgtgccagcccccaccagatgtgctgcacgccgagaggacccagagggacaaggacaacttcagccctggccaggaggtgttctacagctgtgagcccggctatgacctgcggggagctgcctccatgcgctgcaccccccagggcgactggagccctgctgcccccacctgtgaggtgaagagctgtgatgacttcatgggccagctgctgaatggccgggtgctcttccctgtgaacctgcagctgggcgccaaggtggactttgtgtgtgatgagggcttccagctgaagggcagcagcgccagctactgtgtgctggccggcatggagagcctgtggaacagctctgtgcctgtgtgtgagcagatcttctgccccagcccccctgtgatccccaacggccgccacacaggcaagcccctggaggtgttcccctttgggaagacagtgaactacacctgtgacccccacccagaccggggcaccagctttgacctgattggagagagcaccatccgctgcaccagtgacccccagggcaatggagtgtggagcagccctgccccccgctgtggcatcctgggccactgccaggccccagaccacttcctgtttgccaagctgaagacccagaccaatgccagtgacttccccatcggcaccagcctgaagtatgagtgcaggcctgagtactacggccggcccttcagcatcacctgcctggacaacctggtgtggagcagccccaaggatgtgtgcaagaggaagagctgcaagaccccaccagaccctgtgaatggcatggtgcacgtgatcacagacatccaggtgggcagccgcatcaactacagctgcaccaccggccacaggctcatcggccacagcagcgctgagtgcatcctgtctggaaatgctgcccactggagcaccaagccacccatctgccagaggatcccctgtggcctgccccccaccatcgccaacggggacttcatcagcaccaaccgggagaacttccactacggctctgtggtgacctaccgctgcaaccctggcagcggcggcaggaaggtgtttgagctggtgggggagcccagcatctactgcaccagcaatgatgaccaggtgggcatctggagcggccctgccccccagtgcatcatccccaacaagtgcaccccacccaacgtggagaatggcatcctggtgtctgacaacagaagcctcttcagcctgaatgaggtggtggagttccgctgccagcccggctttgtgatgaagggcccccggcgggtgaagtgccaggccctgaacaagtgggagcctgagctgcccagctgcagccgggtgtgccagcccccaccagatgtgctgcacgccgagaggacccagagggacaaggacaacttcagccctggccaggaggtgttctacagctgtgagcccggctatgacctgcggggagctgcctccatgcgctgcaccccccagggcgactggagccctgctgcccccacctgtgaggtgaagagctgtgatgacttcatgggccagctgctgaatggccgggtgctcttccctgtgaacctgcagctgggcgccaaggtggactttgtgtgtgatgagggcttccagctgaagggcagcagcgccagctactgtgtgctggccggcatggagagcctgtggaacagctctgtgcctgtgtgtgagcagatcttctgccccagcccccctgtgatccccaacggccgccacacaggcaagcccctggaggtgttcccctttgggaaggctgtgaactacacctgtgacccccacccagaccggggcaccagctttgacctgattggagagagcaccatccgctgcaccagtgacccccagggcaatggagtgtggagcagccctgccccccgctgtggcatcctgggccactgccaggccccagaccacttcctgtttgccaagctgaagacccagaccaatgccagtgacttccccatcggcaccagcctgaagtatgagtgcaggcctgagtactacggccggcccttcagcatcacctgcctggacaacctggtgtggagcagccccaaggatgtgtgcaagaggaagagctgcaagaccccaccagaccctgtgaatggcatggtgcacgtgatcacagacatccaggtgggcagccgcatcaactacagctgcaccaccggccacaggctcatcggccacagcagcgctgagtgcatcctgagcggcaacacagcccactggagcaccaagccacccatctgccagaggatcccctgtggcctgccccccaccatcgccaacggggacttcatcagcaccaaccgggagaacttccactacggctctgtggtgacctaccgctgcaacctgggcagccggggcaggaaggtgtttgagctggtgggggagcccagcatctactgcaccagcaatgatgaccaggtgggcatctggagcggccctgccccccagtgcatcatccccaacaagtgcaccccacccaacgtggagaatggcatcctggtgtctgacaacagaagcctcttcagcctgaatgaggtggtggagttccgctgccagcccggctttgtgatgaagggcccccggcgggtgaagtgccaggccctgaacaagtgggagcctgagctgcccagctgcagccgggtgtgccagcccccacctgagatcctgcatggagagcacacccccagccaccaggacaacttcagccctggccaggaggtgttctacagctgtgagcccggctatgacctgcggggagctgccagcctgcactgcaccccccagggcgactggagccctgaggccccccgctgtgctgtgaagagctgtgatgacttcctgggccagctgccccacggccgggtgctcttccccctgaacctgcagctgggcgccaaggtgtcctttgtgtgtgatgagggcttccggctgaagggcagctctgtgagccactgtgtgctggtgggcatgaggagcctgtggaacaacagcgtgcctgtgtgtgagcacatcttctgccccaaccccccagccatcctgaatggccgccacacaggcaccccatctggggacatcccctacggcaaggagatctcctacacctgtgacccccacccagaccggggcatgaccttcaacctgattggagagagcaccatccgctgcaccagtgacccccatggaaatggagtgtggagcagccctgccccccgctgtgagctgtctgtgcgggccggccactgcaagaccccagagcagttcccctttgccagccccaccatccccatcaatgactttgagttccctgtgggcaccagcctgaactatgaatgtcggcccggctactttgggaagatgttcagcatcagctgcctggagaacctggtgtggagctctgtggaggacaactgcaggaggaagagctgtggccccccacctgagcccttcaacggcatggtgcacatcaacacagacacccagtttggcagcacagtgaactacagctgcaatgaaggcttccggctgattggcagccccagcaccacctgcctggtgtctggcaacaacgtgacctgggacaagaaggcccccatctgtgagatcatcagctgtgagcccccacccaccatcagcaatggagacttctacagcaacaacagaaccagcttccacaacggcaccgtggtgacctaccagtgccacacaggcccagatggagagcagctgtttgagctggtgggggagaggagcatctactgcaccagcaaggatgaccaggtgggcgtgtggagcagccccccaccccgctgcatcagcaccaacaagtgcacagcccctgaggtggagaatgccatccgggtgcccggcaacagaagcttcttcaccctgacagagatcatccgcttccgctgccagcccggctttgtgatggtgggcagccacacagtgcagtgccagaccaacggccgctggggccccaagctgccccactgcagccgggtgtgccagcccccacctgagatcctgcacggggagcacaccctgagccaccaggacaacttcagccctggccaggaggtgttctacagctgtgagcccagctatgacctgcggggggccgccagcctgcactgcaccccccagggcgactggagccctgaggccccccgctgcaccgtgaagagctgtgatgacttcctgggccagctgccccacggccgggtgctgctgcccctgaacctgcagctgggcgccaaggtgtcctttgtgtgtgatgagggcttccggctgaagggccgcagcgccagccactgtgtgctggccggcatgaaggccctgtggaacagctctgtgcctgtgtgtgagcagatcttctgccccaaccccccagccatcctgaatggccgccacacaggcaccccatttggagacatcccctacggcaaggagatctcctatgcctgtgacacccacccagaccggggcatgaccttcaacctgattggagagagcagcatccgctgcaccagtgacccccagggcaatggagtgtggagcagccctgccccccgctgtgagctgtctgtgcctgctgcctgcccccacccccccaagatccagaatggccactacatcggcggccacgtgtccctgtacctgcccggcatgaccatctcctacatctgtgaccccggctacctgctggtgggcaagggcttcatcttctgcacagaccagggcatctggagccagctggaccactactgcaaggaggtgaactgcagcttccccctcttcatgaatggcatcagcaaggagctggagatgaagaaggtgtaccactacggggactatgtgaccctgaagtgtgaagatggctacaccctggagggcagcccctggagccagtgccaggctgatgaccgctgggacccccccctggccaagtgcaccagcaggacccatgatgccctgattgtgggcaccctgagcggcaccatcttcttcatcctgctgatcatcttcctgtcctggatcatcctgaagcacaggaagggcaacaatgcccacgagaaccccaaggaggtggccatccacctgcacagccagggcggcagctctgtgcaccccaggaccctgcagaccaatgaggagaacagccgggtgctgccctag

SEQ ID NO: 14146 - DNA, 7470 bp, Artificial Sequence
  derived and/or modified sequence
atgggcgccagcagcccccggagccccgagcccgtgggcccccccgcacccggtctaccattttgttgtgggggctccctgcttgccgttgtcgtacttctggctctcccggtggcttgggggcaatgcaatgcacccgaatggttgccatttgcacgccccacaaatctcactgatgaatttgagtttccaatcggcacctatctcaattatgagtgtcggcctgggtatagtggcagaccattttccatcatatgcttgaaaaactccgtgtggacaggggcgaaagataggtgtcggaggaaatcttgcaggaaccctcccgatcctgtaaacggcatggtgcatgtaattaaagggatccagtttggcagccagattaagtacagttgtaccaagggttatagactgattggcagctcctcagctacttgtatcatcagcggggataccgtgatttgggacaacgagacacccatttgcgaccgaatcccatgtggcctgccccctaccatcacaaatggggacttcattagcacgaatcgcgagaactttcattacggctctgtggtgacctacaggtgtaacccaggctccggtggccgaaaggtcttcgagcttgtcggggagccctctatttactgcactagcaacgacgaccaggtgggcatttggtctggcccagctcctcagtgcatcattcctaataaatgcacacccccaaacgtggaaaatgggatactcgttagcgataatcggagcctcttttctctcaatgaagtagtcgaattccgttgtcaacccgggttcgtcatgaaagggcctaggagagtgaaatgtcaggctttgaataagtgggagcctgaactgccaagttgcagccgggtgtgtcagcccccccctgatgtgctgcacgctgagcgcacccagcgcgataaagacaatttttctccaggtcaggaggtgttctacagttgcgagcccggttacgatctcaggggtgctgcctccatgcgttgcacacctcagggtgattggtctcctgcagccccgacatgcgaggttaaaagttgcgatgactttatgggacagctgttgaacggcagagtgcttttccctgtaaatcttcaactaggggcaaaagttgattttgtgtgcgacgaaggtttccagctcaaggggtcttccgctagctattgtgtcctagctggcatggagtccctctggaattcctcggtgccagtgtgcgaacagatcttttgcccatctccacccgtgatacccaacggcaggcacaccgggaagcctctggaagtgtttccatttggtaagactgtaaactatacgtgcgatccgcatccagatcggggcacatcttttgaccttatcggtgaatccaccatccgatgcaccagtgacccacaagggaatggcgtatggagttccccggctcccagatgtggcatcttaggtcactgccaagcccctgatcattttctcttcgccaaattaaaaacccagaccaacgcatcagatttccccatcggaacaagtctcaaatacgaatgcaggcctgagtattacggccggcctttcagcatcacgtgcctggataacttggtctggtcctcccccaaggatgtctgtaagcgcaaatcttgtaaaactcctcctgaccctgtgaacgggatggttcacgtgatcacagatatacaggtgggaagcagaataaactattcatgcactacgggccaccggttgattggacattcttcagctgagtgcattttaagcgggaacgctgcccactggtccacaaagccgcctatatgtcagcgcattccatgtggcttgcctccaaccatcgccaacggagattttatctcaacgaatagagaaaactttcattatgggtcggtggtcacgtaccggtgtaaccccggcagcggaggccggaaggtgtttgagctggtcggcgagccatcaatctattgcacaagtaacgacgaccaagtcggaatttggtcagggcccgctcctcagtgtatcattcccaacaagtgcaccccgccaaacgtagagaatggaatcctggtctctgacaacaggtccttatttagtttgaacgaggtcgtggaatttcgctgtcagccaggctttgtcatgaaaggaccaagaagagtcaagtgccaggctttaaacaagtgggaacctgaattgccctcatgcagccgcgtgtgccagcccccccctgacgtgcttcatgccgagcgaacacagcgcgataaagacaacttcagtcccggccaggaggtattctactcttgtgagcccgggtacgacttgagaggggcagcctccatgaggtgtacacctcagggagactggtcccccgcggcgcccacctgtgaagttaaatcttgcgacgattttatgggacagctgttaaatggccgggtgctgttccctgtaaacctacaacttggagctaaggtggacttcgtttgcgacgaagggtttcaactgaagggcagcagtgcaagttactgcgttctggccgggatggaatcactctggaacagttccgtccctgtatgtgagcaaatcttttgtcctagcccaccagtaatcccaaatggacgccacaccggcaagcctctggaagtatttccgtttggaaagacagtcaattatacctgcgacccccatcccgacagaggtacaagctttgatctgatcggcgaatcaaccatcagatgcaccagtgatccccagggcaatggggtttggtcttccccagccccaagatgtggaatccttggtcattgtcaggctcctgatcattttttgttcgcaaaactgaaaacacaaaccaacgcttctgattttcccattggaacatcgcttaaatatgagtgtagaccagaatactacggacggcccttctctatcacatgtctggataatctggtgtggtcgtctcccaaggacgtgtgcaagaggaaatcatgtaagactccgccagacccagtcaacggcatggtgcacgttatcaccgatatacaagttggaagccgtataaattatagctgcactacgggccataggcttatcggacattcctcagctgaatgcatactctctgggaatgctgcccactggtccactaagcctcccatctgtcagagaatcccctgtggccttccacccaccattgcaaatggcgatttcatatctactaatcgagaaaactttcactatgggtccgttgtcacgtacaggtgcaaccctggctctggggggagaaaagtctttgaactggtcggagagccatctatttactgcaccagtaatgacgaccaagttgggatatggtcaggtccagcaccacagtgcatcatccccaataagtgtacacctccgaacgttgaaaacggaattctggtgagcgataaccgttctttgttcagcctgaatgaggtagtggagttcaggtgtcaacctgggtttgtcatgaaagggcctcgtagggtgaaatgccaagcacttaataaatgggaaccagaactgcctagctgtagcagagtctgccagcccccccctgatgtactgcacgcggaacgcacacaacgcgataaagacaatttctccccagggcaggaggtcttttactcatgcgaacccggttacgacttaaggggcgccgcttctatgcgatgcaccccacaaggagactggtcacccgctgcgccgacttgtgaagtcaagagttgcgatgacttcatggggcagctgttaaatgggcgcgtgttgtttccagtaaacctgcagctgggtgccaaggtggattttgtgtgcgacgaaggcttccaactgaaggggagctcagccagctactgtgtgctcgccgggatggaaagcctgtggaattcaagtgtcccagtttgcgaacagatcttctgccctagtcctcctgtgatacctaatggacgccatactgggaaacccctggaggtgttcccgttcgggaaggctgtaaattacacttgtgacccccatcccgatcgaggcacaagtttcgatctgatcggggagtccacaattaggtgcacttcagatccacagggcaacggggtgtggagctccccagcgccacgctgcggcatacttgggcactgccaggctccagaccatttcctgtttgccaaattgaagactcagacaaatgcttccgactttccgatcggaacttccctcaagtatgagtgtcgcccagagtattacggccgccctttcagcatcacgtgtctggacaatctggtgtggagctcaccaaaggacgtctgtaagcggaagtcctgtaaaaccccgcctgatcctgtcaacgggatggttcacgttatcactgacatccaagtcggtagccggattaactattcgtgtacgactgggcatagattgataggccactcctctgccgagtgcattcttagtggtaacaccgctcactggtcgactaagccgcccatttgccagaggattccctgtggtctgcctccgacaatcgcaaatggtgactttatctccacgaaccgcgaaaacttccattatgggtctgttgttacctacaggtgcaacttgggttcccgcgggcggaaagtgttcgagctggtcggtgaaccttctatctactgcacttcaaacgatgatcaggtgggcatttggagcggtcctgcaccccagtgtattattccgaacaaatgcacacctcctaatgttgaaaatggaattctcgtttctgacaaccgcagcctgtttagtcttaatgaggtcgtagagttcaggtgtcaaccaggattcgtcatgaaaggccctcgcagagttaaatgtcaggccttgaataaatgggagcctgaactgccctcatgttcccgggtatgccagccccctccagagattctgcatggtgagcacactccaagccatcaggataactttagtcccgggcaggaggtgttctatagttgcgagccgggctatgatctgcgtggggcagcctcactacattgcacccctcagggcgattggtcgccggaggccccccgctgcgccgtaaaaagttgcgacgactttttgggccaactgccccacggcagagtgctgttcccactgaatttgcaactcggagccaaggtgtcattcgtctgcgacgagggatttagattgaaagggtcatcagtgagccactgcgttcttgtcggcatgcgcagcctgtggaacaattcggtccccgtgtgtgagcacatcttctgcccaaatcctcctgctattctgaacggccgccatactggcaccccctccggagacataccctacgggaaagaaatttcttacacttgtgatccgcacccggacaggggtatgactttcaacctgattggcgaaagtactatcaggtgtacttctgatccccacggaaatggtgtctggtcctcgcctgccccccgttgcgagctttctgtgagagccggccattgtaaaactcccgaacagtttccgtttgcgagtccgaccattcctatcaacgacttcgaattccccgtcggaacaagcttgaattacgagtgccgacccggttatttcggaaagatgttcagcatctcttgcttggaaaaccttgtgtggtcttccgttgaagataactgtcggcgcaagtcttgtgggccaccccctgagcccttcaacgggatggtgcacattaacacggacacacaattcggtagtaccgtgaattactcatgcaacgagggctttaggctgataggctcaccctcaactacttgcctggtaagcggaaataatgtgacttgggataagaaggctccaatctgcgaaattatctcttgtgaaccccccccaaccatatccaacggtgacttctattcgaacaatcggacgtcttttcacaacggaacagtggtgacataccagtgtcacaccggacctgacggggaacagctctttgaattggtcggggaaaggtctatttactgtacttcaaaggacgaccaggtaggtgtgtggagctcccccccaccccgatgcattagcactaataagtgtactgccccagaggtcgaaaacgccatccgtgtccctggcaaccgttcattcttcaccctgactgaaataattagatttcggtgtcaaccgggcttcgttatggtcggaagtcacaccgtccagtgccagaccaatggccggtgggggcctaagttgccccattgcagccgcgtttgccagccgccaccagaaattctgcacggtgagcacaccctgtcccaccaggataacttcagccctggtcaggaggttttctatagctgcgagccatcgtatgatctcagaggggctgcgagcttgcactgtactccccagggagattggagtcccgaagctccaagatgcacagtcaagtcttgtgacgacttcttgggacagctcccacatggccgcgttctgctgcccctaaatctgcagcttggcgctaaagtctcattcgtatgtgacgaaggcttccgcctgaaaggcaggtccgcctcacactgcgtactcgccggcatgaaggcactctggaattcgagtgtgcccgtttgtgagcagatcttctgcccgaacccccctgcgattctgaatgggcgccacacagggacaccattcggggacatcccttacggcaaggagattagttacgcttgtgacacccaccctgaccgcgggatgaccttcaacctcatcggtgagagcagcatcagatgtacctcagatcctcaaggaaacggcgtatggtcaagccccgccccacgatgtgaactgtctgttcccgcggcttgtccgcacccgccaaagatccagaacgggcattatatcgggggacacgtgtccttgtatctgcccggtatgaccatttcttatatttgtgaccctggctacctcttggtaggcaaggggtttattttctgcaccgatcagggtatctggtcgcaactggaccactattgcaaagaagtcaattgttcttttcccctcttcatgaatgggatttccaaggagctggagatgaagaaggtttaccactatggagattatgtgactctcaagtgtgaagacggttacacactggaaggttcaccctggtcccagtgccaagcggacgaccgatgggatccgcccctcgcaaagtgcacttctcggacccacgacgcgttgattgtgggaacactttccggcacgatcttctttattctattaatcattttcctgtcctggattattctgaaacaccgcaagggaaataacgcccacgaaaatcccaaggaagtggccatccatttgcacagtcagggcgggtcctcggtgcatcctcggactctgcagacaaatgaggagaacagcagggtcctgccgtag

SEQ ID NO: 14147 - DNA, 7469 bp, Artificial Sequence
  derived and/or modified sequence
atgggagcatcttctccacggtcccccgagcctgtgggacctcccgctccaggtctacctttctgctgcggaggctccctcctagcagttgtagtgttgctcgcgttgcccgtagcctggggccagtgtaacgcacctgaatggttaccattcgcaaggcccaccaaccttacggacgaattcgaatttccaatcggaacgtatctgaattacgagtgtagaccgggatatagtggacgacctttcagcatcatatgtctaaaaaattcggtttggaccggggcaaaggacagatgtagacgtaagagctgcaggaatccgccagacccagtcaacggaatggtgcacgtgattaaagggattcagttcgggagccagattaaatatagctgtacaaaagggtatcgcttgatcggctcaagtagcgccacatgcatcatttctggcgataccgttatctgggataacgagacgcccatttgcgatcgaatcccctgtggcctcccacctacgatcacgaatggggattttatctccacaaatcgggaaaatttccattacggctctgttgtcacctataggtgtaatcctgggtctgggggaaggaaggttttcgaacttgttggggaaccatcaatatattgtactagcaacgatgaccaggtggggatatggtccggacccgcaccgcagtgcattatccctaataagtgcaccccacccaatgtggaaaatgggatccttgtcagcgataacagatcccttttcagtttgaatgaggtggtggagtttcgctgtcagcccggtttcgtgatgaagggaccaaggcgcgtgaagtgtcaggctctcaacaagtgggagcccgagctgccgtcatgctctcgggtgtgccagcctccgcctgacgttttgcacgccgaacgcacccagcgggataaggataactttagcccaggccaggaagtcttttacagctgcgaacctgggtacgacctccggggtgctgccagtatgcgctgtacgccacagggcgattggagccccgctgcccctacctgtgaggtgaagtcatgcgacgacttcatgggccagctcctgaatggccgtgtcttgtttccagtcaacctgcagctcggggcaaaggttgatttcgtgtgtgatgagggctttcagctgaagggcagttccgcctcctactgtgtgctggcaggtatggaaagcctgtggaacagctcagttccggtatgtgaacaaatcttctgtccatccccccctgtgatacccaatggtaggcacaccggaaagcccctggaggtgttccccttcggcaagaccgttaactatacctgcgacccccaccccgatagggggacatcattcgacctcataggcgagtctacaatacggtgtacgtcagatccccagggaaacggcgtatggtcttcaccggcaccaaggtgcgggatcctgggtcactgtcaagcaccagatcacttcctcttcgcaaaactgaagacacagacaaatgctagtgacttccccatcggaacatccctgaagtatgagtgtaggccagaatactacggacgcccttttagcataacatgcctcgacaatcttgtgtggagttccccgaaggatgtgtgtaaaagaaaatcatgcaagacaccaccagatcccgtgaatggcatggtacatgtgattacagacatacaagtgggttcaagaattaattacagttgcacaacaggacaccggctgatcggtcattcctcagctgaatgcatcttgtctgggaacgcagctcattggagtactaagcccccaatctgtcagcgaattccctgcggtttaccccctaccatagctaatggggactttatctcgactaatcgcgagaactttcattatggctcggtggtcacttatcggtgcaaccccggaagcggcggacgcaaggtgtttgagctggtgggggagccttcaatctactgtacctcaaatgatgatcaagtcgggatatggagcgggcctgcaccacagtgtatcatcccaaacaaatgcactccaccaaatgtggagaacggaatcctcgtctctgacaacagaagcctgtttagcctcaatgaagtggtggaattccggtgccagccagggttcgtaatgaaaggaccacggagggtgaagtgccaagccctcaataagtgggaacccgaacttccttcgtgctcacgagtgtgccagcccccacctgatgttcttcacgcagagaggacacaaagggacaaggacaacttctctccaggtcaggaagtattctactcttgtgagcccggatatgacctgaggggggcagccagcatgaggtgtacccctcagggcgactggagtccggcagcaccaacatgtgaagtgaagtcctgcgacgacttcatgggccagttactcaacgggagagtgctatttcccgttaatcttcagttaggggcaaaggtcgactttgtgtgcgacgaaggttttcagctgaaaggatctagcgcttcttattgtgtgctcgctggaatggagagtctgtggaattcttctgtgcccgtatgtgagcaaatattctgcccttccccccctgtcatacccaatggcagacacacaggcaagccactggaagtattcccatttggcaaaactgtaaactatacgtgtgatcctcaccccgataggggaactagcttcgacctcattggcgaatcaaccatccgttgcacctccgatccccagggaaatggagtgtggtccagtccagcgccaagatgcggtatcctcggccactgccaggcaccagaccactttttgttcgcaaaattgaagacacagactaatgcgagtgacttcccaatcggcaccagtctcaagtacgaatgccgccctgagtactatggccgacccttcagtatcacttgcctagataaccttgtgtggtcttcaccgaaagacgtgtgcaagcggaaatcgtgcaagacccctcccgatcctgtgaacgggatggtccacgttatcactgatattcaagtgggtagtaggataaactacagctgcacaacgggacacaggttaatcggacactcaagcgccgagtgcatcctgtctggcaatgccgcacactggtccaccaaaccaccgatttgtcagcgcatcccgtgcggtctccctccaactattgccaacggggactttatctccactaaccgcgagaacttccactacggtagtgttgtgacttatcgttgcaaccctggtagtggaggcaggaaagtgttcgagctggttggcgagccaagtatttactgcaccagcaacgacgatcaggtgggtatctggagcggaccagcgcctcagtgcattattccaaacaagtgtacacctccaaatgttgagaatggaatccttgtgtccgacaatcgaagcctcttttctttaaatgaagtggtcgaattcagatgccaacccggttttgtcatgaaggggccacggagagtgaaatgtcaggccctgaacaaatgggagcctgaactcccctcatgtagcagggtgtgtcagcccccaccggatgttctccatgcagagcgcacccagcgcgataaggataattttagccccggacaagaagtgttttatagctgcgagcctggctatgatcttaggggtgcggcatctatgcggtgcactcctcaaggtgattggtcgccagctgcaccaacctgtgaggtgaagtcctgcgatgacttcatgggtcagcttctgaacggccgagtactgttccctgtcaacctacagttaggggcaaaggttgacttcgtgtgtgatgagggcttccagttgaaaggatccagtgccagctattgcgtgctggcaggtatggagagcttatggaactctagtgttcctgtgtgcgagcagatcttctgcccaagtccccctgttatccctaacgggcgtcacacaggtaagcccctggaagttttcccatttggcaaagctgttaattatacctgtgatcctcatccagaccgcggtacgagctttgaccttattggggagtccaccattcgctgcacctcagatcctcagggcaatggcgtgtggtccagcccagctcccaggtgtggcatcctcggtcactgtcaagcgccagatcattttttattcgccaagttaaaaacccagacaaacgcgagcgactttcccatcggtaccagtcttaaatatgagtgtcggccagaatattatggtcgcccattctcgataacatgtctggataatctcgtttggtcgagccccaaggacgtatgtaaacgaaaatcctgtaaaacacccccagatccggtgaacgggatggtccacgtgatcaccgatatccaggtcgggagtagaattaactactcttgcaccaccggccacaggctcatcggacactcatcagccgaatgtatcttgtctgggaacacagcccattggtccacgaagccccctatctgtcagagaattccatgcggcctacctcctactattgcaaacggcgactttatctccaccaaccgggagaatttccattatgggagcgtggttacatatcgttgtaacttggggtcacgcggacgtaaggtcttcgaactggtcggagaaccatcgatctactgcacatctaatgatgaccaagtgggcatatggagcggacctgccccacagtgtattatccctaacaagtgcaccccccctaatgtcgaaaatggcatactcgtttccgataatagatcactgttctcattaaacgaagttgtggaatttagatgtcagcccggttttgtgatgaagggtccacgccgtgtgaagtgtcaagcactcaataaatgggaacctgagctgcccagctgttcccgcgtgtgccagccccctccggaaattctgcatggcgaacatactcccagccaccaggataatttctcgcccggacaggaggtattttacagctgtgagcctggatatgacctgcgcggagctgctagcctgcattgcactcctcagggcgactggagtcccgaggcccctcggtgcgctgtcaaatcatgtgatgatttccttggccagctaccccatggaagggtattgtttccactgaacctacagttaggcgcaaaagtaagttttgtgtgtgatgaggggttccggctgaaagggtcttctgtgtcgcattgtgtgctggttggaatgcgaagtctatggaacaattcagtccctgtctgcgagcatatcttctgcccaaatcccccagctattcttaacgggcgtcacactggaactccatccggcgacatcccatacggcaaagagatctcttatacctgtgatccacatccagatcgcggtatgacattcaatttgataggcgagtcaactataaggtgcacctcggacccccacggcaacggggtgtggtcgtcgccggctcccagatgcgaactgtccgtgagggcaggccattgtaaaacaccagagcagtttccattcgcaagtcctacaatccctatcaacgacttcgagtttccggtcgggacttccctgaactatgagtgtagaccaggctactttggtaaaatgttctcaattagctgccttgaaaatctggtgtggagtagcgtggaggacaattgccgacgcaagagctgcggacctccgcctgagcctttcaatggcatggtccatattaatacggacacccagttcggatccacggttaactattcctgcaacgagggttttaggctcatcgggtccccctcgacaacctgtctggtatcgggcaacaatgttacatgggataagaaggccccaatctgtgagataatttcgtgcgagcccccacctaccattagtaacggagatttctactctaataatcgtacatccttccataacggaacggtggtaacttaccagtgccacaccggcccagacggagagcagctgttcgagctggttggtgagcgcagcatctactgtacctctaaggatgatcaggtaggcgtgtggagctcgccccctcccaggtgcatcagcacaaacaagtgcaccgcccctgaggtggagaatgccatccgcgtgcctggtaaccgatcttttttcacattgacagaaataattcgtttccgctgtcaacccggtttcgtgatggttgggagccatactgtgcagtgtcagacgaacggtcgctgggggccaaagctgccgcattgctccagggtatgccagcctcctccagagatcctgcatggcgagcacactttaagccatcaggacaacttcagcccgggacaggaagtcttctattcctgtgaacccagttacgaccttcgcggagccgcttcacttcattgcactccccagggtgactggagccctgaggcccctcgatgcaccgtgaagtcttgcgacgattttctaggacaactgccccatggcagagtgttgctccccctcaatttgcagttgggggcaaaggtttcattcgtatgtgacgaggggttccgactcaagggaagaagcgcatcacactgcgtgctggccggtatgaaggccttgtggaattcaagtgtgccagtttgcgagcagatcttctgccccaaccctcccgctatcctcaatggcaggcacaccggtactccgttcggcgatataccctacggcaaagaaataagctatgcatgcgatactcatcccgacaggggtatgaccttcaacctgattggtgagtcgtcgattcgctgtacttccgacccccagggcaatggagtatggtcctccccggctcccagatgtgagctgagcgtgcccgctgcctgccctcaccctccaaaaattcaaaacggacactacattggaggccacgtttcactgtacctcccagggatgaccatatcttacatatgcgaccccggatacctgctggtgggcaaaggattcattttttgcacagaccagggaatctggtctcagctagaccactactgtaaggaggttaattgttcttttcccctgttcatgaacggaatctcaaaggaactggagatgaaaaaggtgtaccactatggagattatgtcacattgaagtgtgaggatggctacaccctggagggctccccttggagtcagtgccaggctgatgacagatgggatccaccactggcgaagtgtaccagccgcacccacgacgctctcattgtaggaaccctgtccgggaccatcttttttattctgctgatcatatttctgtcatggatcatcctcaagcacagaaaaggcaataatgcccacgaaaatcctaaagaggtagctatacatctacattcccagggaggttcaagtgtgcaccccaggactctccagacaaacgaggaaaacagtcgagttctcccata

SEQ ID NO: 14148 - DNA, 7470 bp, Artificial Sequence
  derived and/or modified sequence
atgggggcctcttctccaagaagcccggagcctgtcgggccgccggcgcccggtctccccttctgctgcggaggatccctgctggcggttgtggtgctgcttgcgctgccggtggcctggggtcaatgcaatgccccagaatggcttccatttgccaggcctaccaacctaactgatgaatttgagtttcccattgggacatatctgaactatgaatgccgccctggttattccggaagaccgttttctatcatctgcctaaaaaactcagtctggactggtgctaaggacaggtgcagacgtaaatcatgtcgtaatcctccagatcctgtgaatggcatggtgcatgtgatcaaaggcatccagttcggatcccaaattaaatattcttgtactaaaggataccgactcattggttcctcgtctgccacatgcatcatctcaggtgatactgtcatttgggataatgaaacacctatttgtgacagaattccttgtgggctaccccccaccatcaccaatggagatttcattagcaccaacagagagaattttcactatggatcagtggtgacctaccgctgcaatcctggaagcggagggagaaaggtgtttgagcttgtgggtgagccctccatatactgcaccagcaatgacgatcaagtgggcatctggagcggccccgcccctcagtgcattatacctaacaaatgcacgcctccaaatgtggaaaatggaatattggtatctgacaacagaagcttattttccttaaatgaagttgtggagtttaggtgtcagcctggctttgtcatgaaaggaccccgccgtgtgaagtgccaggccctgaacaaatgggagccggagctaccaagctgctccagggtatgtcagccacctccagatgtcctgcatgctgagcgtacccaaagggacaaggacaacttttcacctgggcaggaagtgttctacagctgtgagcccggctacgacctcagaggggctgcgtctatgcgctgcacaccccagggagactggagccctgcagcccccacatgtgaagtgaaatcctgtgatgacttcatgggccaacttcttaatggccgtgtgctatttccagtaaatctccagcttggagcaaaagtggattttgtttgtgatgaaggatttcaattaaaaggcagctctgctagttactgtgtcttggctggaatggaaagcctttggaatagcagtgttccagtgtgtgaacaaatcttttgtccaagtcctccagttattcctaatgggagacacacaggaaaacctctggaagtctttccctttgggaaaacagtaaattacacatgcgacccccacccagacagagggacgagcttcgacctcattggagagagcaccatccgctgcacaagtgaccctcaagggaatggggtttggagcagccctgcccctcgctgtggaattctgggtcactgtcaagccccagatcattttctgtttgccaagttgaaaacccaaaccaatgcatctgactttcccattgggacatctttaaagtacgaatgccgtcctgagtactacgggaggccattctctatcacatgtctagataacctggtctggtcaagtcccaaagatgtctgtaaacgtaaatcatgtaaaactcctccagatccagtgaatggcatggtgcatgtgatcacagacatccaggttggatccagaatcaactattcttgtactacagggcaccgactcattggtcactcatctgctgaatgtatcctctcgggcaatgctgcccattggagcacgaagccgccaatttgtcaacgaattccttgtgggctaccccccaccatcgccaatggagatttcattagcaccaacagagagaattttcactatggatcagtggtgacctaccgctgcaatcctggaagcggagggagaaaggtgtttgagcttgtgggtgagccctccatatactgcaccagcaatgacgatcaagtgggcatctggagcggcccggcccctcagtgcattatacctaacaaatgcacgcctccaaatgtggaaaatggaatattggtatctgacaacagaagcttattttccttaaatgaagttgtggagtttaggtgtcagcctggctttgtcatgaaaggaccccgccgtgtgaagtgccaggccctgaacaaatgggagccggagctaccaagctgctccagggtatgtcagccacctccagatgtcctgcatgctgagcgtacccaaagggacaaggacaacttttcacccgggcaggaagtgttctacagctgtgagcccggctacgacctcagaggggctgcgtctatgcgctgcacaccccagggagactggagccctgcagcccccacatgtgaagtgaaatcctgtgatgacttcatgggccaacttcttaatggccgtgtgctatttccagtaaatctccagcttggagcaaaagtggattttgtttgtgatgaaggatttcaattaaaaggcagctctgctagttactgtgtcttggctggaatggaaagcctttggaatagcagtgttccagtgtgtgaacaaatcttttgtccaagtcctccagttattcctaatgggagacacacaggaaaacctctggaagtctttccctttgggaaaacagtaaattacacatgcgacccccacccagacagagggacgagcttcgacctcattggagagagcaccatccgctgcacaagtgaccctcaagggaatggggtttggagcagccctgcccctcgctgtggaattctgggtcactgtcaagccccagatcattttctgtttgccaagttgaaaacccaaaccaatgcatctgactttcccattgggacatctttaaagtacgaatgccgtcctgagtactacgggaggccattctctatcacatgtctagataacctggtctggtcaagtcccaaagatgtctgtaaacgtaaatcatgtaaaactcctccagatccagtgaatggcatggtgcatgtgatcacagacatccaggttggatccagaatcaactattcttgtactacagggcaccgactcattggtcactcatctgctgaatgtatcctctcgggcaatgctgcccattggagcacgaagccgccaatttgtcaacgaattccttgtgggctaccccccaccatcgccaatggagatttcattagcaccaacagagagaattttcactatggatcagtggtgacctaccgctgcaatcctggaagcggagggagaaaggtgtttgagcttgtgggtgagccctccatatactgcaccagcaatgacgatcaagtgggcatctggagcggcccggcccctcagtgcattatacctaacaaatgcacgcctccaaatgtggaaaatggaatattggtatctgacaacagaagcttattttccttaaatgaagttgtggagtttaggtgtcagcctggctttgtcatgaaaggaccccgccgtgtgaagtgccaggccctgaacaaatgggagccggagctaccaagctgctccagggtatgtcagccacctccagatgtcctgcatgctgagcgtacccaaagggacaaggacaacttttcacccgggcaggaagtgttctacagctgtgagcccggctatgacctcagaggggctgcgtctatgcgctgcacaccccagggagactggagccctgcagcccccacatgtgaagtgaaatcctgtgatgacttcatgggccaacttcttaatggccgtgtgctatttccagtaaatctccagcttggagcaaaagtggattttgtttgtgatgaaggatttcaattaaaaggcagctctgctagttattgtgtcttggctggaatggaaagcctttggaatagcagtgttccagtgtgtgaacaaatcttttgtccaagtcctccagttattcctaatgggagacacacaggaaaacctctggaagtctttccctttggaaaagcagtaaattacacatgcgacccccacccagacagagggacgagcttcgacctcattggagagagcaccatccgctgcacaagtgaccctcaagggaatggggtttggagcagccctgcccctcgctgtggaattctgggtcactgtcaagccccagatcattttctgtttgccaagttgaaaacccaaaccaatgcatctgactttcccattgggacatctttaaagtacgaatgccgtcctgagtactacgggaggccattctctatcacatgtctagataacctggtctggtcaagtcccaaagatgtctgtaaacgtaaatcatgtaaaactcctccagatccagtgaatggcatggtgcatgtgatcacagacatccaggttggatccagaatcaactattcttgtactacagggcaccgactcattggtcactcatctgctgaatgtatcctctcaggcaatactgcccattggagcacgaagccgccaatttgtcaacgaattccttgtgggctacccccaaccatcgccaatggagatttcattagcaccaacagagagaattttcactatggatcagtggtgacctaccgctgcaatcttggaagcagagggagaaaggtgtttgagcttgtgggtgagccctccatatactgcaccagcaatgacgatcaagtgggcatctggagcggccccgcccctcagtgcattatacctaacaaatgcacgcctccaaatgtggaaaatggaatattggtatctgacaacagaagcttattttccttaaatgaagttgtggagtttaggtgtcagcctggctttgtcatgaaaggaccccgccgtgtgaagtgccaggccctgaacaaatgggagccagagttaccaagctgctccagggtgtgtcagccgcctccagaaatcctgcatggtgagcataccccaagccatcaggacaacttttcacctgggcaggaagtgttctacagctgtgagcctggctatgacctcagaggggctgcgtctctgcactgcacaccccagggagactggagccctgaagccccgagatgtgcagtgaaatcctgtgatgacttcttgggtcaactccctcatggccgtgtgctatttccacttaatctccagcttggggcaaaggtgtcctttgtctgtgatgaagggtttcgcttaaagggcagttccgttagtcattgtgtcttggttggaatgagaagcctttggaataacagtgttcctgtgtgtgaacatatcttttgtccaaatcctccagctatccttaatgggagacacacaggaactccctctggagatattccctatggaaaagaaatatcttacacatgtgacccccacccagacagagggatgaccttcaacctcattggggagagcaccatccgctgcacaagtgaccctcatgggaatggggtttggagcagccctgcccctcgctgtgaactttctgttcgtgctggtcactgtaaaaccccagagcagtttccatttgccagtcctacgatcccaattaatgactttgagtttccagtcgggacatctttgaattatgaatgccgtcctgggtattttgggaaaatgttctctatctcctgcctagaaaacttggtctggtcaagtgttgaagacaactgtagacgaaaatcatgtggacctccaccagaacccttcaatggaatggtgcatataaacacagatacacagtttggatcaacagttaattattcttgtaatgaagggtttcgactcattggttccccatctactacttgtctcgtctcaggcaataatgtcacatgggataagaaggcacctatttgtgagatcatatcttgtgagccacctccaaccatatccaatggagacttctacagcaacaatagaacatcttttcacaatggaacggtggtaacttaccagtgccacactggaccagatggagaacagctgtttgagcttgtgggagaacggtcaatatattgcaccagcaaagatgatcaagttggtgtttggagcagccctccccctcggtgtatttctactaataaatgcacagctccagaagttgaaaatgcaattagagtaccaggaaacaggagtttctttaccctcactgagatcatcagatttagatgtcagcccgggtttgtcatggtagggtcccacactgtgcagtgccagaccaatggcagatgggggcccaagctgccacactgctccagggtgtgtcagccgcctccagaaatcctgcatggtgagcataccctaagccatcaggacaacttttcacctgggcaggaagtgttctacagctgtgagcccagctatgacctcagaggggctgcgtctctgcactgcacgccccagggagactggagccctgaagcccctagatgtacagtgaaatcctgtgatgacttcctgggccaactccctcatggccgtgtgctacttccacttaatctccagcttggggcaaaggtgtcctttgtttgcgatgaagggttccgattaaaaggcaggtctgctagtcattgtgtcttggctggaatgaaagccctttggaatagcagtgttccagtgtgtgaacaaatcttttgtccaaatcctccagctatccttaatgggagacacacaggaactccctttggagatattccctatggaaaagaaatatcttacgcatgcgacacccacccagacagagggatgaccttcaacctcattggggagagctccatccgctgcacaagtgaccctcaagggaatggggtttggagcagccctgcccctcgctgtgaactttctgttcctgctgcctgcccacatccacccaagatccaaaacgggcattacattggaggacacgtatctctatatcttcctgggatgacaatcagctacatttgtgaccccggctacctgttagtgggaaagggcttcattttctgtacagaccagggaatctggagccaattggatcattattgcaaagaagtaaattgtagcttcccactgtttatgaatggaatctcgaaggagttagaaatgaaaaaagtatatcactatggagattatgtgactttgaagtgtgaagatgggtatactctggaaggcagtccctggagccagtgccaggcggatgacagatgggaccctcctctggccaaatgtacctctcgtacacatgatgctctcatagttggcactttatctggtacgatcttctttattttactcatcattttcctctcttggataattctaaagcacagaaaaggcaataatgcacatgaaaaccctaaagaagtggctatccatttacattctcaaggaggcagcagcgttcatccccgaactctgcaaacaaatgaagaaaatagcagggtccttccttga
